United States Patent Application Publication US 2026/0337666 A1 - sequence listing, part 6

SEQ ID NO: 7365 - DNA, 3229 bp, Homo sapiens
  source 1..3229: mol_type = unassigned DNA; mol_type = unassigned DNA
agtgcaccgggcacgccgcgccaggctgggggcaggcaccgagcctccgtgggaggtcccgaggcagcttcgcctgctcgccctggctccagccctcacctgccgcagccttagctgagcagccgccgccactgggcgccccccgctccccacttcgccagcgcccgctcctcggctcggcccggggtagtttgtagggacgcagctctccacgtgcgcgactgcgaggctggacgctacgggctcctggaaaggagacaccagcatttgccacaatgctgtcatccactgactttacatttgcttcctgggagcttgtggtccgcgttgaccatcccaatgaagagcagcagaaagacgtcacactgagagtatctggagaccttcatgttggaggagtgatgctcaaatatatcccaagactggtcagactttgctctttggtgggaacagaagcattgctggcttctgaaaacccactggaccctggacaaatatggggtccaggcagatgcaaagcttctcttcacccctcagcataaaatgctgcgccttcgtctgccgaatttgaagatggtgaggttgcgagtcagcttctcagctgtggtttttaaagctgtcagtgatatctgcaaaatcctgaatattagaagatcagaagagctttccttgttaaagccgtctggtgactattttaagaagaagaagaaaaaagacaaaaataataaggaacccataattgaagatattctaaacctggagagttctccaacagcttcaggttcatcagttggctagactcctcacgctcccttatggaacaaggcatccaagaggatgagcagctgctcttacgatttaaatattattctttcttcgacttgaatcctaaatatgatgctgtccgaataaaccaactctatgagcaagccaggtgggccattctcttagaagaaattgattgcacagaggaagaaatgttgatctttgcagctctacagtaccacattagcaaactgtcgttgtctgctgaaacacaggattttgcaggcgagtccgaggttgatgaaatagaagcggcgctttctaatttggaagtaaccctagaaggtggaaaagcggacagccttttggaggacattactgatatccctaaacttgcagataatctcaaattatttaggcccaagaagttactaccaaaagctttcaaacaatattggtttatctttaaagacacatccatagcatactttaaaaataaggaacttgaacaaggagaaccactagaaaaactaaatcttagaggctgcgaagttgtgcccgatgtaaatgtagcaggaagaaaatttggaatcaagttactaatccctgttgccgatggtatgaatgaaatgtatttgagatgtgaccatgagaatcaatacgcccaatggatggctgcctgcatgttggcatcgaagggcaaaaccatggcagacagctcctaccagccagaggtcctcaacatcctttcatttctgaggatgaaaaacaggaactctgcatctcaggtggcttccagtctcgaaaacatggatatgaacccagaatgttttgtgtcaccacggtgtgcaaaaagacacaaatccaaacagctggccgcccggatcctggaggcgcaccagaacgtggcccagatgcccctggtcgaagccaagctgcggttcatccaggcgtggcagtcactgcctgagtttggcctcacctactaccttgtcagatttaaaggaagcaaaaaagatgacattctgggagtttcatataacaggttgattaaaattgatgcagccaccgggattccagtgacaacatggagattcacaaatatcaaacagtggaatgtaaactgggaaacccggcaggtggtcatcgagtttgaccaaaacgtctttactgctttcacctgcctgagtgcagattgcaagattgtgcacgagtacattggcggctacattttcttgtccacccgctccaaggaccagaatgaaacactcgatgaggacttgttccacaaattgaccggcggtcaggattgaaacaagcacgcgtgctcggctcacaccaacaaggcaagccaaaggcgcccctccccagagggatccctaacgtgcccagcatgtagattctggactaacagacaacatacattcaccgctggtcacccagatcctcattcaaacccactgctggcacatccctttccttactttgccctgtgctaccagccacggaaggagcctctcttgttttttctataaaatgggtaggcaggagaaaagcaggtgccctaagattgctctaaggcccagcatgtggttacagttctctgacttgcagaacctgccaggtgtatggctacaagttatcctcgtgctgatctgtctcattactaagtcaatggagaagacagaaaggtaaaaatcacgtgtagcaagaacaactcttatttcacaaactcaggtatgaaacgaaacgcctgtccttcatggaactgcttttagctcctgtcttttcaaaatggcagagggagttcctacacacactttttccctggaggccaaggtctaggggtagaaaggggaggggtggggctaccaggtagcagttgacaacccaaggtcagaggagtggccctcagtgtcatctgtccacagtgatacctgccaagatgaccactgacccacatctggtcttagtcattggtctcctcagatttctggggccacctgcaagccccattccattcctacagatctctcagccacctgtaagtcctttgtgaagatgtgggtgacacagggggacaggaaaacccatttctcaacccagatccatgtctccactgcttctactctgggttgggattcaggaagacaggcacagtcctctctgttcatagaaacacctgccagtgtcaaggattccagtcaggtgtctatcccaactggtcagggagagaagggcagacccattctcaaagaccaccatgtccaaggtctgacagctccccactggctgcccccacaggggctttaggctggtctgggtcatggggaagcgtccctcttatcgctggtctgtgttctcctggatttggtatctatgttggtacgactcctggccttttatctaaaggactttggcttttgtaaatcacaagccaataatagacttttttctccccctc

SEQ ID NO: 7366 - DNA, 2001 bp, Homo sapiens
  source 1..2001: mol_type = unassigned DNA; mol_type = unassigned DNA
gatgggaccttctcaattatacaaacatgacttcatgtgatgtcagctgaatgtaaaagacagtgatctcacgcggaggggaagatgtttgccatcaaaatgtgacagaagagacacgctgcatggctcggaacgcatctccttggtggtgggggaaagagacttagaggagagaggctgcgccctggcccagcctggctcggctcagctccgcgcgccatggcaagctcggcttccctggagaccatggtgcccccggcctgcccgcgcgccggagcgtcgccggccacttccaagacactggccttttccatcgagcgcatcatggccaagacgtcggagccccgtgcgccctttgagccccggcctggagcgctagaggcggacggcagccagggcaagaaactgctcaacctctgctcgccgctgccctgtatgatccccctccagcccctaggctacgaggtgccgtcaaagacactgctcagttactcggagctctggaaaagcagcctccgggcgggcggcggcggaggcggcggcggcggtggcggcggcggcggcgggggggccccagtgtgcggcgccagcggcttgtgcaaaaccaactgtggcgtgtgctgcaaggccgagctgggcctggcgccgtccgcgctgcccgcgggcagggtcatcaagccgcaggtcatcaaccaggctgtggggctgccggccagcggctcgctctactacttcaactacctggactcgaccgcgtacccgccgtctgagctcctcagcggccacctcttcccgtctggcctcctcaatgcgcaggcccccgccgccctggctgctcaccccaagctctttctgctggagaacgccaagctggccggcctggctgcggacaagttcccccacccggctccctatccccataaggagcgcttgccggcgccgctggagcaggtactgaaggaaaactcggccctgactgccgagcgcggaggcgtcaagggccacagcaagctgccaggaggctccgcagatggcaagcccaaaaacttcacctgcgaggtgtgcggcaaggtgtttaacgctcactataatctcacccgccacatgccggtccacaccggagccagaccgttcgtgtgcaaagtctgcggcaaaggctttcgccaggccagcacgctctgcaggcacaaaattatccacacccaggaaaagccacataaatgcaaccagtgcggcaaagcgttcaaccgcagctccacgctcaacacgcatatccgcatccacgcgggctacaagcccttcgtctgcgaattttgcggcaaaggctttcaccaaaaagggaactacaagaaccacaagctgacccacagcggcgagaagcagtacaaatgtaccatctgcaacaaggccttccaccaggtctacaacctaaccttccatatgcacacccacaacgacaagaagcctttcacgtgcgccacttgcggcaaagggttttgcagaaactttgacttaaagaaacatgtgcgcaaactccacgacagcgtgggccctgctgccccctccgcaaaggacctgactaggacagtgcagagctgagagctactgccttgcccttccttccctccctgtaccacctgaaaacagatcacacatataaacttatttctaaaattaaaagaaaaaaaaactatagcagagaggctaaaatctatttatcgaaaccagcatatttttggaaagctaaatgtttcctcgatgactggcagcaaactcgtggcccccacctttgtatattcaggaaacttatttaaatccagtgcgccgaaacgtatttaattccaggcctccgcttctcctggggcagccagttttaaccccagcctgtcaccgtgagcgccccagaagagcgcggcgcccctagccatctttatacagccatgtaaatcctcctgtacaagcgaacacggaatatatacatatataactcaataaacagaa

SEQ ID NO: 7367 - DNA, 2074 bp, Homo sapiens
  source 1..2074: mol_type = unassigned DNA; mol_type = unassigned DNA
cttttaaagtttgaggggcggtggtggcggcggccggcaggcgcgggggaacacaggggccgctacgggagccgcgccgccgcccatgtcattccacttcaagtgacttcatgtgatgtcagctgaatgtaaaagacagtgatctcacgcggaggggaagatgtttgccatcaaaatgtgacagaagagacacgctgcatggctcggaacgcatctccttggtggtgggggaaagagacttagaggagagaggctgcgccctggcccagcctggctcggctcagctccgcgcgccatggcaagctcggcttccctggagaccatggtgcccccggcctgcccgcgcgccggagcgtcgccggccacttccaagacactggccttttccatcgagcgcatcatggccaagacgtcggagccccgtgcgccctttgagccccggcctggagcgctagaggcggacggcagccagggcaagaaactgctcaacctctgctcgccgctgccctgtatgatccccctccagcccctaggctacgaggtgccgtcaaagacactgctcagttactcggagctctggaaaagcagcctccgggcgggcggcggcggaggcggcggcggcggtggcggcggcggcggcgggggggccccagtgtgcggcgccagcggcttgtgcaaaaccaactgtggcgtgtgctgcaaggccgagctgggcctggcgccgtccgcgctgcccgcgggcagggtcatcaagccgcaggtcatcaaccaggctgtggggctgccggccagcggctcgctctactacttcaactacctggactcgaccgcgtacccgccgtctgagctcctcagcggccacctcttcccgtctggcctcctcaatgcgcaggcccccgccgccctggctgctcaccccaagctctttctgctggagaacgccaagctggccggcctggctgcggacaagttcccccacccggctccctatccccataaggagcgcttgccggcgccgctggagcaggtactgaaggaaaactcggccctgactgccgagcgcggaggcgtcaagggccacagcaagctgccaggaggctccgcagatggcaagcccaaaaacttcacctgcgaggtgtgcggcaaggtgtttaacgctcactataatctcacccgccacatgccggtccacaccggagccagaccgttcgtgtgcaaagtctgcggcaaaggctttcgccaggccagcacgctctgcaggcacaaaattatccacacccaggaaaagccacataaatgcaaccagtgcggcaaagcgttcaaccgcagctccacgctcaacacgcatatccgcatccacgcgggctacaagcccttcgtctgcgaattttgcggcaaaggctttcaccaaaaagggaactacaagaaccacaagctgacccacagcggcgagaagcagtacaaatgtaccatctgcaacaaggccttccaccaggtctacaacctaaccttccatatgcacacccacaacgacaagaagcctttcacgtgcgccacttgcggcaaagggttttgcagaaactttgacttaaagaaacatgtgcgcaaactccacgacagcgtgggccctgctgccccctccgcaaaggacctgactaggacagtgcagagctgagagctactgccttgcccttccttccctccctgtaccacctgaaaacagatcacacatataaacttatttctaaaattaaaagaaaaaaaaactatagcagagaggctaaaatctatttatcgaaaccagcatatttttggaaagctaaatgtttcctcgatgactggcagcaaactcgtggcccccacctttgtatattcaggaaacttatttaaatccagtgcgccgaaacgtatttaattccaggcctccgcttctcctggggcagccagttttaaccccagcctgtcaccgtgagcgccccagaagagcgcggcgcccctagccatctttatacagccatgtaaatcctcctgtacaagcgaacacggaatatatacatatataactcaataaaca

SEQ ID NO: 7368 - DNA, 1918 bp, Homo sapiens
  source 1..1918: mol_type = unassigned DNA; mol_type = unassigned DNA
cctgttcatttgaatgcaaatgggtgacccgggcccgactaggtgcttattaaattgcagttttcccccctgccttttccggaatgcagacttagaggagagaggctgcgccctggcccagcctggctcggctcagctccgcgcgccatggcaagctcggcttccctggagaccatggtgcccccggcctgcccgcgcgccggagcgtcgccggccacttccaagacactggccttttccatcgagcgcatcatggccaagacgtcggagccccgtgcgccctttgagccccggcctggagcgctagaggcggacggcagccagggcaagaaactgctcaacctctgctcgccgctgccctgtatgatccccctccagcccctaggctacgaggtgccgtcaaagacactgctcagttactcggagctctggaaaagcagcctccgggcgggcggcggcggaggcggcggcggcggtggcggcggcggcggcgggggggccccagtgtgcggcgccagcggcttgtgcaaaaccaactgtggcgtgtgctgcaaggccgagctgggcctggcgccgtccgcgctgcccgcgggcagggtcatcaagccgcaggtcatcaaccaggctgtggggctgccggccagcggctcgctctactacttcaactacctggactcgaccgcgtacccgccgtctgagctcctcagcggccacctcttcccgtctggcctcctcaatgcgcaggcccccgccgccctggctgctcaccccaagctctttctgctggagaacgccaagctggccggcctggctgcggacaagttcccccacccggctccctatccccataaggagcgcttgccggcgccgctggagcaggtactgaaggaaaactcggccctgactgccgagcgcggaggcgtcaagggccacagcaagctgccaggaggctccgcagatggcaagcccaaaaacttcacctgcgaggtgtgcggcaaggtgtttaacgctcactataatctcacccgccacatgccggtccacaccggagccagaccgttcgtgtgcaaagtctgcggcaaaggctttcgccaggccagcacgctctgcaggcacaaaattatccacacccaggaaaagccacataaatgcaaccagtgcggcaaagcgttcaaccgcagctccacgctcaacacgcatatccgcatccacgcgggctacaagcccttcgtctgcgaattttgcggcaaaggctttcaccaaaaagggaactacaagaaccacaagctgacccacagcggcgagaagcagtacaaatgtaccatctgcaacaaggccttccaccaggtctacaacctaaccttccatatgcacacccacaacgacaagaagcctttcacgtgcgccacttgcggcaaagggttttgcagaaactttgacttaaagaaacatgtgcgcaaactccacgacagcgtgggccctgctgccccctccgcaaaggacctgactaggacagtgcagagctgagagctactgccttgcccttccttccctccctgtaccacctgaaaacagatcacacatataaacttatttctaaaattaaaagaaaaaaaaactatagcagagaggctaaaatctatttatcgaaaccagcatatttttggaaagctaaatgtttcctcgatgactggcagcaaactcgtggcccccacctttgtatattcaggaaacttatttaaatccagtgcgccgaaacgtatttaattccaggcctccgcttctcctggggcagccagttttaaccccagcctgtcaccgtgagcgccccagaagagcgcggcgcccctagccatctttatacagccatgtaaatcctcctgtacaagcgaacacggaatatatacatatataactc

SEQ ID NO: 7369 - DNA, 3321 bp, Homo sapiens
  source 1..3321: mol_type = unassigned DNA; mol_type = unassigned DNA
tgcctgtgggtgccgcggaccttcggggcgggccagggaggcgggaccgctcctcagaaccccaggggcttcagtcctgggctgattggcgcgggaagcacagcccggccctccaggtccccaaggagaccccagcctcctgctgcccactgtgagcgacctccccggggctcctctggaagcggctccggcaagtatcgagtttgcctgtgcggagctgggggagcctccggctttcctgtttgctttgttaattattttcgtccccagaggaaggcgtacctcctaaatggctctactttgaacctgctgggcaaggaagagattttcaaggaaaccatctaccgtgtgcaagctcctgccggccaaccccagaccccagcacggagccaggcgcctgtgcccgccgaccctcagcatcctcctcagaaaggctggtggcatcaggaagcccctggccagcctccacctgagcccagtgagctcagctttaaggatggagtcaggcagggggtcctcaacccctccaggacccattgctgccctagggatgccagacactgggcctggcagttcctccctagggaagcttcaggcgctccctgttgggcccagagcccactgtggggaccctgtcagcctggctgcagcaggggacggctctccagacataggccccacgggagagctgagtggtagcttaaagatccccaaccgggacagcgggatcgacagtccctcctccagtgtggctggagagaactttccctgcgaggagggcttggaggctggcccaagccccactgtactgggggcgcacgcagagatggccctggacagccaggtcccgaaggtcaccccccaggaggaggcggacagcgacgtgggtgaggaacctgactctgagaacaccccccagaaggctgacaaggatgccggcctggcccagcactctggcccccagaagcttctccacattgcccaggagctcctgcacaccgaggagacctatgtgaagcggctgcacctgctggaccaggttttctgcaccaggctgacggatgcggggatccctccagaagtcatcatgggcatattctctaacatctcctccatccaccgcttccacgggcagttcctgctgccggagctgaagacgcggatcacggaggagtgggacacaaacccacggctcggggacatcctgcagaagctggccccattcctgaagatgtacggcgagtatgtcaagaactttgaccgagccgtagggctggtgagcacgtggacccagcgctccccactgtttaaagacgtcgtccacagcatccagaagcaggaggtatgcgggaacctgacgctgcagcaccacatgctggagcccgtgcagagggtcccccggtacgagctgctgctcaaggactatctgaagaggctcccgcaggacgccccagaccggaaggatgcggagaggtccttggagctcatctccacagccgccaaccactccaatgctgccattcggaaagtggagaaaatgcacaagctcttggaggtgtacgagcagctgggtggggaagaagacattgtcaacccggccaatgaactgatcaaggagggccaaatccagaaactgtcagccaagaacggcaccccccaggaccgccacctcttcctgttcaacagcatgatcctttactgtgtgcccaagctgcggctcatgggccagaagttcagcgtccgggagaagatggacatctcaggcctccaggtgcaggatatcgtcaagccaaacacagcacatacattcatcataacaggaagaaaaaggtccctggagctgcagacgcggacagaggaagagaagaaagaatggattcagatcatccaggccaccatcgagaagcacaaacagaacagcgaaaccttcaaggcttttggtggcgccttcagccaggatgaggaccccagcctctctccagacatgcctatcacgagcaccagccctgtggagcctgtggtgaccaccgaaggcagttcgggtgcagcagggctcgagcccagaaaactatcctctaagaccagacgtgacaaggagaagcagagctgtaagagctgtggtgagaccttcaactccatcaccaagaggaggcatcactgcaagctgtgtggggcggtcatctgtgggaagtgctccgagttcaaggccgagaacagccggcagagccgtgtctgcagagattgtttcctgacacagccagtggcccctgagagcacagagaagacacccactgcagacccccagcccagcctgctctgcggccccctgcggctgtcagagagcggtgagacctggagcgaggtgtgggccgccatccccatgtcagatccccaggtgctgcacctgcagggaggcagccaggacggccggctgccccgcaccatccctctccccagctgcaaactgagtgtgccggaccctgaggagaggctggactcggggcatgtgtggaagctgcagtgggccaagcagtcctggtacctgagcgcctcctccgcagagctgcagcagcagtggctggaaaccctaagcactgctgcccatggggacacggcccaggacagcccgggggccctgcagcttcaggtccctatgggcgcagctgctccgtgagctgagtctcccactgccctgcacaccaccacattggacctgtgctgtcctgggaggtggtgttggaggccccatgaagagcgccctggactgctgagggtgggccaacagcccagagctcaggacacttggctttggggggaaggaaactgaggcccagagaggggcaaccactggccaagggtcacccagcaagttttggctaagagcctggcctccagccccagcagtgtggcccagagcaggggccgactgccaaagtaaccatcatccatatgggccgtgtggtgatgctggcccggaaggcagaaagaggcagcatgggcactgccagggacagccacatcctgctggtctgcagcgtggtccaccccgcctctgcccagcctgtctacaccgtgtgagctgaatcgtgacttgcttcccacctcctttctctgtcctctcctgaggttctgcctgcagcccccaggaggtgggcctgccccatcctagctggactcatggttcctaaataaccacgctcagaagctctgctaggacttaccccagccactgagtggcaggcgcatgagatttgtggctgttcctgatgctagtggcacacagtgcttatctgcataaataaacactggccaccagcagtg

SEQ ID NO: 7370 - DNA, 918 bp, Homo sapiens
  source 1..918: mol_type = unassigned DNA; mol_type = unassigned DNA
tgagcctagcacctgatcagtggagagctgtggattgcatgtttgtttgccattgcccccgccaccctgcaagttgcaccttctagaatcagcaagccaagctcctctcacccagcgtaatgatgcggaaatgcaaatgcaccatcatgttgtgacccatattgcgaaaattagaaaaaaggaagttgtgtttcgctattgcacgaagttcagcccagaggagaaactcgctcgccttcagaagacagtacctcctaaatggctctactttgaacctgctgggcaaggaagagattttcaaggaaaccatctaccgtgtgcaagctcctgccggccaaccccagaccccagcacggagccaggcgcctgtgcccgccgaccctcagcatcctcctcagaaaggctggtggcatcaggaagcccctggccagcctccacctgagcccagtgagctcagctttaaggatggagtcaggcagggggtcctcaacccctccaggacccattgctgccctagggatgccagacactgggcctggcagttcctccctagggaagcttcaggcgctccctgttgggcccagagcccactgtggggaccctgtcagcctggctgcagcaggggacggctctccagacataggccccacgggagagctgagtggtagcttaaagatccccaaccgggacagcgggatcgacagtccctcctccagtgtggctggagagaactttccctgcgaggagggcttggaggctggcccaagccccactgtactgggggcgcacgcagagatggccctggacagccaggtcccgaaggtcaccccccaggaggaggcggacagcgacgtgggtgaggaacctgactctgagaacaccccccagaaggctgacaaggatgccggcctggcccag

SEQ ID NO: 7371 - DNA, 915 bp, Homo sapiens
  source 1..915: mol_type = unassigned DNA; mol_type = unassigned DNA
gtgtggtgggggtgctccaccatagagctggtcggcatccacagccaccaggacgctgccagagcccaggcctgcgccacgccctgcccagaggcacacctgcctgctcaaggcaaccagggcaggctcaaggcagccagggccagctcactgtgtgcctgtcactgtgtgaagcctgcttcttctttatttcgcttagcaagtgaggcaggagcatgtaaagctgctggcagaggaatatctaatttacctcctaaatggctctactttgaacctgctgggcaaggaagagattttcaaggaaaccatctaccgtgtgcaagctcctgccggccaaccccagaccccagcacggagccaggcgcctgtgcccgccgaccctcagcatcctcctcagaaaggctggtggcatcaggaagcccctggccagcctccacctgagcccagtgagctcagctttaaggatggagtcaggcagggggtcctcaacccctccaggacccattgctgccctagggatgccagacactgggcctggcagttcctccctagggaagcttcaggcgctccctgttgggcccagagcccactgtggggaccctgtcagcctggctgcagcaggggacggctctccagacataggccccacgggagagctgagtggtagcttaaagatccccaaccgggacagcgggatcgacagtccctcctccagtgtggctggagagaactttccctgcgaggagggcttggaggctggcccaagccccactgtactgggggcgcacgcagagatggccctggacagccaggtcccgaaggtcaccccccaggaggaggcggacagcgacgtgggtgaggaacctgactctgagaacaccccccagaaggctgacaaggatgccggcctggccc

SEQ ID NO: 7372 - DNA, 4697 bp, Homo sapiens
  source 1..4697: mol_type = unassigned DNA; mol_type = unassigned DNA
ggctctactttgaacctgctgggcaaggaagagattttcaaggaaaccatctaccgtgtgcaagctcctgccggccaaccccagaccccagcacggagccaggcgcctgtgcccgccgaccctcagcatcctcctcagaaaggctggtggcatcaggaagcccctggccagcctccacctgagcccagtgagctcagctttaaggatggagtcaggcagggggtcctcaacccctccaggacccattgctgccctagggatgccagacactgggcctggcagttcctccctagggaagcttcaggcgctccctgttgggcccagagcccactgtggggaccctgtcagcctggctgcagcaggggacggctctccagacataggccccacgggagagctgagtggtagcttaaagatccccaaccgggacagcgggatcgacagtccctcctccagtgtggctggagagaactttccctgcgaggagggcttggaggctggcccaagccccactgtactgggggcgcacgcagagatggccctggacagccaggtcccgaaggtcaccccccaggaggaggcggacagcgacgtgggtgaggaacctgactctgagaacaccccccagaaggctgacaaggatgccggcctggcccagcactctggcccccagaagcttctccacattgcccaggagctcctgcacaccgaggagacctatgtgaagcggctgcacctgctggaccaggttttctgcaccaggctgacggatgcggggatccctccagaagtcatcatgggcatattctctaacatctcctccatccaccgcttccacgggcagttcctgctgccggagctgaagacgcggatcacggaggagtgggacacaaacccacggctcggggacatcctgcagaagctggccccattcctgaagatgtacggcgagtatgtcaagaactttgaccgagccgtagggctggtgagcacgtggacccagcgctccccactgtttaaagacgtcgtccacagcatccagaagcaggaggtatgcgggaacctgacgctgcagcaccacatgctggagcccgtgcagagggtcccccggtacgagctgctgctcaaggactatctgaagaggctcccgcaggacgccccagaccggaaggatgcggagaggtccttggagctcatctccacagccgccaaccactccaatgctgccattcggaaagtggagaaaatgcacaagctcttggaggtgtacgagcagctgggtggggaagaagacattgtcaacccggccaatgaactgatcaaggagggccaaatccagaaactgtcagccaagaacggcaccccccaggaccgccacctcttcctgttcaacagcatgatcctttactgtgtgcccaagctgcggctcatgggccagaagttcagcgtccgggagaagatggacatctcaggcctccaggtgcaggatatcgtcaagccaaacacagcacatacattcatcataacaggaagaaaaaggtccctggagctgcagacgcggacagaggaagagaagaaagaatggattcagatcatccaggccaccatcgagaagcacaaacagaacagcgaaaccttcaaggcttttggtggcgccttcagccaggatgaggaccccagcctctctccagacatgcctatcacgagcaccagccctgtggagcctgtggtgaccaccgaaggcagttcgggtgcagcagggctcgagcccagaaaactatcctctaagaccagacgtgacaaggagaagcagagctgtaagagctgtggtgagaccttcaactccatcaccaagaggaggcatcactgcaagctgtgtggggcggtcatctgtgggaagtgctccgagttcaaggccgagaacagccggcagagccgtgtctgcagagattgtttcctgacacagccagtggcccctgagagcacagaggtgggtgctcccagctcctgctcccctcctggtggcgcggcagagcctccagacacctgctcctgtgccccagcagctccagctgcctctgctttcggagtgtccctgggaccaggatagatgtgggtgtgtctcagtggggcccccaggctgggaacacactcggaagatcccgtgtgtgcacgctggcttctcgggaccagccagggccaaggcttgggaaccatttgcatccaggagttagatgggaacaagtgtcactcctggtcacctggttggagggcatggattgaagctgccctcaagtccaggccttgaggcccacctgaggggagatactgcccttctctctgcctgcctcacctccagctgtcagagggtgagcagggccctggaggcaggcaccccctcctcctcctccccgtccccttctcctcctcctccccgtccccttctcctcctcctccccgtccccttctcctcttcctctccctccttcctctccctccgcctcgctgtctttctccttctcctctccctcctcctcctgctccttctcctccccgtaccctttttctactcttccctctccttctcctcctcctttctctccctcctcctccccctccccttctcctcctctctttctcttcctcttttcctcctccactcctctttctgagagtagctgctgctttccctgacttccttcctcaagaatacagtctattctggggggttgcaggacagctgaaaaagaaaacgtgagtttccagaaaagcacatcgccctttctctccactcgacacagcctgcggtttgcagtgccagctgcacgttggagtctcctgggaagcttctagtgttgatctccctcctagaggctcagtgaggtgatcggggggtcagtgtgttttcagagtcccagctgctctgacttacagctgtggttggagccctgacctaggtccttggtctaagaagtcaaggatgtaagtctattaggactgagtgttgaatggtcttgatggtgaagaaggaccttgcactgcctaccgagctccctcatgcctgcaatttaaataccgaggtgtgttctgagagccccaggtccttggggcacgggcctccagggccctgtaaggtggactctggcctcgaaggggggcccaggtctgaggggtccagctctggcagggggtgtctaagccacgtccaaatggtggacagtagctccaacagtgacatgacagagggagggcctgtgtgtgtggtgtgtgtgtgtgtgctgtgtgtgcacgcacgtgcatgtatatggtgtgtgtagaactgacacgcttgaagtccctgtcccgtgacccaccctcaggtacttgctgttgggttttcctatgattttgatgtgtcctgacccagcatatggatgccctccccttggagggcccagcctgcaaaccccatctgataccacacatgcctatgtcctgcaggcttctagtgacccttgcaagccgggtgaggctggtcccagtctctgtgcagatcttggccatgtctccacagccagctccccccaagcagtggccctggccctaccccagcctcctcagaacaggggtgaccactgcaggggagactgcccctaacctgtgtctttgtgtccccagaagacacccactgcagacccccagcccagcctgctctgcggccccctgcggctgtcagagagcggtgagacctggagcgaggtgtgggccgccatccccatgtcagatccccaggtgctgcacctgcagggaggcagccaggacggccggctgccccgcaccatccctctccccagctgcaaactgagtgtgccggaccctgaggagaggctggactcggggcatgtgtggaagctgcagtgggccaagcagtcctggtacctgagcgcctcctccgcagagctgcagcagcagtggctggaaaccctaagcactgctgcccatggggacacggcccaggacagcccgggggccctgcagcttcaggtccctatgggcgcagctgctccgtgagctgagtctcccactgccctgcacaccaccacattggacctgtgctgtcctgggaggtggtgttggaggccccatgaagagcgccctggactgctgagggtgggccaacagcccagagctcaggacacttggctttggggggaaggaaactgaggcccagagaggggcaaccactggccaagggtcacccagcaagttttggctaagagcctggcctccagccccagcagtgtggcccagagcaggggccgactgccaaagtaaccatcatccatatgggccgtgtggtgatgctggcccggaaggcagaaagaggcagcatgggcactgccagggacagccacatcctgctggtctgcagcgtggtccaccccgcctctgcccagcctgtctacaccgtgtgagctgaatcgtgacttgcttcccacctcctttctctgtcctctcctgaggttctgcctgcagcccccaggaggtgggcctgccccatcctagctggactcatggttcctaaataaccacgctcagaagctctgctaggacttaccccagccactgagtggcaggcgcatgagatttgtggctgttcctgatgctagtggcacacagtgcttatctgcataaataaacactggccaccagcagtg

SEQ ID NO: 7373 - DNA, 244 bp, Homo sapiens
  source 1..244: mol_type = unassigned DNA; mol_type = unassigned DNA
aaggatcccatgtgagaagctcactggggcccctggggggacctgcgggcagctctcgttcctcacctgtgccatccctcttgcagttcaacagcatgatcctttactgtgtgcccaagctgcggctcatgggccagaagttcagcgtccgggagaagatggacatctcaggcctccaggtgcaggatatcgtcaagccaaacacagcacatacattcatcataacaggaagaaaaaggtccct

SEQ ID NO: 7374 - DNA, 462 bp, Homo sapiens
  source 1..462: mol_type = unassigned DNA; mol_type = unassigned DNA
ctcgagcccagaaaactatcctctaagaccagacgtgacaaggagaagcagagctgtaagagctgtggtgagaccttcaactccatcaccaagaggaggcatcactgcaagctgtgtggggcgccatgctgaggggtgagaggtggtttctggttatgaatttgatttgcgtttccctgatggccagtgatggggcatcttcccctgtgcttggtggctcttcacactcttcctcccacgcacacaagactcctggactctggaccctccaggacagaagggtcatctgtgggaagtgctccgagttcaaggccgagaacagccggcagagccgtgtctgcagagattgtttcctgacacagccagtggcccctgagagcacagagacacccactgcagacccccagcccagcctgctctgcggccccctgcggctgtcagagagcggtgagacctggagcg

SEQ ID NO: 7375 - DNA, 3432 bp, Homo sapiens
  source 1..3432: mol_type = unassigned DNA
attccctgctgggcccctcctccctgaagatctacacagcagatctactcacaaaagtccacccagcagaagcaggaggatggtggttgtgggtcctctgtgagcagccctgttaacctttaaaccagcacggccgccgcagctgtgagcctagcacctgatcagtggagagctgtggattgcatgtttgtttgccattgcccccgccaccctgcaagttgcaccttctagaatcagcaagccaagctcctctcacccagcgtaatgatgcggaaatgcaaatgcaccatcatgttgtgacccatattgcgaaaattagaaaaaaggaagttgtgtttcgctattgcacgaagttcagcccagaggagaaactcgctcgccttcagaagacagtacctcctaaatggctctactttgaacctgctgggcaaggaagagattttcaaggaaaccatctaccgtgtgcaagctcctgccggccaaccccagaccccagcacggagccaggcgcctgtgcccgccgaccctcagcatcctcctcagaaaggctggtggcatcaggaagcccctggccagcctccacctgagcccagtgagctcagctttaaggatggagtcaggcagggggtcctcaacccctccaggacccattgctgccctagggatgccagacactgggcctggcagttcctccctagggaagcttcaggcgctccctgttgggcccagagcccactgtggggaccctgtcagcctggctgcagcaggggacggctctccagacataggccccacgggagagctgagtggtagcttaaagatccccaaccgggacagcgggatcgacagtccctcctccagtgtggctggagagaactttccctgcgaggagggcttggaggctggcccaagccccactgtactgggggcgcacgcagagatggccctggacagccaggtcccgaaggtcaccccccaggaggaggcggacagcgacgtgggtgaggaacctgactctgagaacaccccccagaaggctgacaaggatgccggcctggcccagcactctggcccccagaagcttctccacattgcccaggagctcctgcacaccgaggagacctatgtgaagcggctgcacctgctggaccaggttttctgcaccaggctgacggatgcggggatccctccagaagtcatcatgggcatattctctaacatctcctccatccaccgcttccacgggcagttcctgctgccggagctgaagacgcggatcacggaggagtgggacacaaacccacggctcggggacatcctgcagaagctggccccattcctgaagatgtacggcgagtatgtcaagaactttgaccgagccgtagggctggtgagcacgtggacccagcgctccccactgtttaaagacgtcgtccacagcatccagaagcaggaggtatgcgggaacctgacgctgcagcaccacatgctggagcccgtgcagagggtcccccggtacgagctgctgctcaaggactatctgaagaggctcccgcaggacgccccagaccggaaggatgcggagaggtccttggagctcatctccacagccgccaaccactccaatgctgccattcggaaagtggagaaaatgcacaagctcttggaggtgtacgagcagctgggtggggaagaagacattgtcaacccggccaatgaactgatcaaggagggccaaatccagaaactgtcagccaagaacggcaccccccaggaccgccacctcttcctgttcaacagcatgatcctttactgtgtgcccaagctgcggctcatgggccagaagttcagcgtccgggagaagatggacatctcaggcctccaggtgcaggatatcgtcaagccaaacacagcacatacattcatcataacaggaagaaaaaggtccctggagctgcagacgcggacagaggaagagaagaaagaatggattcagatcatccaggccaccatcgagaagcacaaacagaacagcgaaaccttcaaggcttttggtggcgccttcagccaggatgaggaccccagcctctctccagacatgcctatcacgagcaccagccctgtggagcctgtggtgaccaccgaaggcagttcgggtgcagcagggctcgagcccagaaaactatcctctaagaccagacgtgacaaggagaagcagagctgtaagagctgtggtgagaccttcaactccatcaccaagaggaggcatcactgcaagctgtgtggggcggtcatctgtgggaagtgctccgagttcaaggccgagaacagccggcagagccgtgtctgcagagattgtttcctgacacagccagtggcccctgagagcacagagacacccactgcagacccccagcccagcctgctctgcggccccctgcggctgtcagagagcggtgagacctggagcgaggtgtgggccgccatccccatgtcagatccccaggtgctgcacctgcagggaggcagccaggacggccggctgccccgcaccatccctctccccagctgcaaactgagtgtgccggaccctgaggagaggctggactcggggcatgtgtggaagctgcagtgggccaagcagtcctggtacctgagcgcctcctccgcagagctgcagcagcagtggctggaaaccctaagcactgctgcccatggggacacggcccaggacagcccgggggccctgcagcttcaggtccctatgggcgcagctgctccgtgagctgagtctcccactgccctgcacaccaccacattggacctgtgctgtcctgggaggtggtgttggaggccccatgaagagcgccctggactgctgagggtgggccaacagcccagagctcaggacacttggctttggggggaaggaaactgaggcccagagaggggcaaccactggccaagggtcacccagcaagttttggctaagagcctggcctccagccccagcagtgtggcccagagcaggggccgactgccaaagtaaccatcatccatatgggccgtgtggtgatgctggcccggaaggcagaaagaggcagcatgggcactgccagggacagccacatcctgctggtctgcagcgtggtccaccccgcctctgcccagcctgtctacaccgtgtgagctgaatcgtgacttgcttcccacctcctttctctgtcctctcctgaggttctgcctgcagcccccaggaggtgggcctgccccatcctagctggactcatggttcctaaataaccacgctcagaagctctgctaggacttaccccagccactgagtggcaggcgcatgagatttgtggctgttcctgatgctagtggcacacagtgcttatctgcataaataaacactggccaccagcagtg

SEQ ID NO: 7376 - DNA, 3303 bp, Homo sapiens
  source 1..3303: mol_type = unassigned DNA; mol_type = unassigned DNA
gagcactcaggagactgtgtgtggtgggggtgctccaccatagagctggtcggcatccacagccaccaggacgctgccagagcccaggcctgcgccacgccctgcccagaggcacacctgcctgctcaaggcaaccagggcaggctcaaggcagccagggccagctcactgtgtgcctgtcactgtgtgaagcctgcttcttctttatttcgcttagcaagtgaggcaggagcatgtaaagctgctggcagaggaatatctaatttacctcctaaatggctctactttgaacctgctgggcaaggaagagattttcaaggaaaccatctaccgtgtgcaagctcctgccggccaaccccagaccccagcacggagccaggcgcctgtgcccgccgaccctcagcatcctcctcagaaaggctggtggcatcaggaagcccctggccagcctccacctgagcccagtgagctcagctttaaggatggagtcaggcagggggtcctcaacccctccaggacccattgctgccctagggatgccagacactgggcctggcagttcctccctagggaagcttcaggcgctccctgttgggcccagagcccactgtggggaccctgtcagcctggctgcagcaggggacggctctccagacataggccccacgggagagctgagtggtagcttaaagatccccaaccgggacagcgggatcgacagtccctcctccagtgtggctggagagaactttccctgcgaggagggcttggaggctggcccaagccccactgtactgggggcgcacgcagagatggccctggacagccaggtcccgaaggtcaccccccaggaggaggcggacagcgacgtgggtgaggaacctgactctgagaacaccccccagaaggctgacaaggatgccggcctggcccagcactctggcccccagaagcttctccacattgcccaggagctcctgcacaccgaggagacctatgtgaagcggctgcacctgctggaccaggttttctgcaccaggctgacggatgcggggatccctccagaagtcatcatgggcatattctctaacatctcctccatccaccgcttccacgggcagttcctgctgccggagctgaagacgcggatcacggaggagtgggacacaaacccacggctcggggacatcctgcagaagctggccccattcctgaagatgtacggcgagtatgtcaagaactttgaccgagccgtagggctggtgagcacgtggacccagcgctccccactgtttaaagacgtcgtccacagcatccagaagcaggaggtatgcgggaacctgacgctgcagcaccacatgctggagcccgtgcagagggtcccccggtacgagctgctgctcaaggactatctgaagaggctcccgcaggacgccccagaccggaaggatgcggagaggtccttggagctcatctccacagccgccaaccactccaatgctgccattcggaaagtggagaaaatgcacaagctcttggaggtgtacgagcagctgggtggggaagaagacattgtcaacccggccaatgaactgatcaaggagggccaaatccagaaactgtcagccaagaacggcaccccccaggaccgccacctcttcctgttcaacagcatgatcctttactgtgtgcccaagctgcggctcatgggccagaagttcagcgtccgggagaagatggacatctcaggcctccaggtgcaggatatcgtcaagccaaacacagcacatacattcatcataacaggaagaaaaaggtccctggagctgcagacgcggacagaggaagagaagaaagaatggattcagatcatccaggccaccatcgagaagcacaaacagaacagcgaaaccttcaaggcttttggtggcgccttcagccaggatgaggaccccagcctctctccagacatgcctatcacgagcaccagccctgtggagcctgtggtgaccaccgaaggcagttcgggtgcagcagggctcgagcccagaaaactatcctctaagaccagacgtgacaaggagaagcagagctgtaagagctgtggtgagaccttcaactccatcaccaagaggaggcatcactgcaagctgtgtggggcggtcatctgtgggaagtgctccgagttcaaggccgagaacagccggcagagccgtgtctgcagagattgtttcctgacacagccagtggcccctgagagcacagagaagacacccactgcagacccccagcccagcctgctctgcggccccctgcggctgtcagagagcggtgagacctggagcgaggtgtgggccgccatccccatgtcagatccccaggtgctgcacctgcagggaggcagccaggacggccggctgccccgcaccatccctctccccagctgcaaactgagtgtgccggaccctgaggagaggctggactcggggcatgtgtggaagctgcagtgggccaagcagtcctggtacctgagcgcctcctccgcagagctgcagcagcagtggctggaaaccctaagcactgctgcccatggggacacggcccaggacagcccgggggccctgcagcttcaggtccctatgggcgcagctgctccgtgagctgagtctcccactgccctgcacaccaccacattggacctgtgctgtcctgggaggtggtgttggaggccccatgaagagcgccctggactgctgagggtgggccaacagcccagagctcaggacacttggctttggggggaaggaaactgaggcccagagaggggcaaccactggccaagggtcacccagcaagttttggctaagagcctggcctccagccccagcagtgtggcccagagcaggggccgactgccaaagtaaccatcatccatatgggccgtgtggtgatgctggcccggaaggcagaaagaggcagcatgggcactgccagggacagccacatcctgctggtctgcagcgtggtccaccccgcctctgcccagcctgtctacaccgtgtgagctgaatcgtgacttgcttcccacctcctttctctgtcctctcctgaggttctgcctgcagcccccaggaggtgggcctgccccatcctagctggactcatggttcctaaataaccacgctcagaagctctgctaggacttaccccagccactgagtggcaggcgcatgagatttgtggctgttcctgatgctagtggcacacagtgcttatctgcataaataaacactggccaccagc

SEQ ID NO: 7377 - DNA, 2977 bp, Homo sapiens
  source 1..2977: mol_type = unassigned DNA; mol_type = unassigned DNA
ggtagcggctttgagtgagtgcgggagctgcagataccgagacgctgcgactgccgcaggagtcgccgcagccaaactcgccgcgacgccgggagggagcgtaccgggaaggagagggagaggaggcactcgctgaggagacgccgcagtagagggcgcccccggagtcgcgccgaacctgggcatgcaggcgacgccccccaggggccgctcgcggctggacgggagcgggaggagtcggggagcggcggtcgagcccggcaggatgagcgacgagggcggctccaacttcaggcgggtggcgatccggcggaagtccaacccctcctacctgccgcccggggtgccccggccctggagcaggcccgcgtcgcacctgggacgtgtagggaccgctgccttcaagggccaggtgccctcaggagccacaggcagcagtacctgtccaaagatcgctttagttccaccttgctccacaagcagcacaaccacactggttggtgagaatgtatctgaagaagaggctcagggaataaatgggaacaggccagcaaaacactcagctgcaagtccaaagccacaagtgcctccaaagccattacacctgcagaattcaccttcgtccaatatacaccaaacccccaggcataaagctttacctagtgcaaaaccaaggatggaggaaattaaacctgcctctgcttcttgtgtctcaaaagaaaaacccagtaaggtatcagatctcatcagtcgctttgaaggaggcagctcattatcaaattatagtgatttgaagaaagagtctgctgtgaacctaaatgctcctagaaccccaggaaggcatggattgacaaccacacctcaacaaaaactcctctcccagcacttgccacagaggcagggaaatgatacagataagactcagggtgcacagacttgtgtggccaacggtgtaatggcagcacaaaaccagatggaatgtgaggaggagaaagctgccactcttagctcagatacttctattcaagcttctgaacccttgcttgatacgcacatagtgaatggagaaagagatgaaactgccacagctcctgcatcacccacaacagacagctgtgatggaaatgcttctgacagtagctacaggactccaggcataggcccagtgctccccctagaagaaagaggggcagaaacagaaaccaaggtacaagagagggaaaatggggaaagccctctggaactggagcagctggaccagcaccatgagatgaaggagactaatgagcaaaaacttcacaaaatagccaatgaacttttgcttactgaaagagcttatgtcaaccgacttgacctcttagatcaggtattttattgcaaactgttggaagaagcaaaccgaggctcgtttccagcagagatggtgaataaaatcttttctaatatttcatcaataaatgccttccatagtaaattcctcttgccagagctggagaaacgaatgcaagaatgggaaactactcctagaattggagacatccttcagaaattggcaccattccttaagatgtatggagaatatgtgaaaggatttgataatgcaatggaattggttaaaaacatgacagaacgtattccccagttcaaatcagtggttgaagaaattcagaaacagaaaatctgtgggagcttaactttgcagcatcacatgctagaacctgttcagcggattccccggtatgagatgctccttaaggactatctaaggaaattgcctcctgattccctggactggaatgatgctaaaaaatcacttgaaattatatctacagcagcaagccattctaatagtgcaataaggaaaatggagaacctaaagaaactcttagagatttatgaaatgttgggagaagaagaagacattgtaaacccttcaaatgaactaataaaagaaggacagatcctcaaactagctgctcggaacacttcagcacaagaacgctaccttttcttattcaacaacatgttgctgtactgtgtgcccaaattcagcttggtaggctctaaattcacagttcgaaccagggttggcattgatggaatgaaaattgtagagactcaaaatgaagaatatccacatactttccaggtgtctgggaaagagagaacactggaactgcaggccagttctgcgcaagacaaagaagaatggatcaaggcccttcaagaaaccatcgatgcttttcatcaaaggcatgaaaccttcagaaatgcaattgcaaaggataatgacattcactcagaggtttctactgctgagctagggaaaagagccccaagatggatccgagataatgaagtgacaatgtgtatgaaatgtaaagaacctttcaatgcactgacacgaaggaggcatcattgtcgagcatgtggatatgtggtttgttggaaatgctccgactacaaagctcaacttgaatatgatggtggtaaattgagcaaagtttgtaaagactgttatcaaatcataagtggattcacagacagtgaagaaaagaaaagaaaaggaattttagagattgaatcagcagaagtatctggaaacagtgtggtgtgcagctttcttcagtatatggagaagtcaaaaccttggcagaaagcttggtgtgtgatccccaagcaagaccctcttgtgctgtacatgtatggtgccccccaggacgtcagagcccaggccaccattccacttctgggctatgtggtggatgaaatgccaaggagcgcagacctgccacacagtttcaaactgacccagtctaagtccgtgcacagctttgctgcagacagtgaggaactgaagcagaagtggctgaaagtcatccttttagctgtcacaggtgagacaccaggtggtccaaatgagcatccagccaccttggatgatcatcctgaacctaagaaaaaatcagaatgctga

SEQ ID NO: 7378 - DNA, 549 bp, Homo sapiens
  source 1..549: mol_type = unassigned DNA; mol_type = unassigned DNA
ctacctgccgcccggggtgccccggccctggagcaggcccgcgtcgcacctgggacgtgtagggaccgctgccttcaagggccaggtgccctcaggagccacaggcagcagtacctgtccaaagatcgctttagttccaccttgctccacaagcagcacaaccacactggttggtgagaatgtatctgaagaagaggctcagggaataaatgggaacaggccagcaaaacactcagctgcaagtccaaagccacaagctcattatcaaattatagtgatttgaagaaagagtctgctgtgaacctaaatgctcctagaaccccaggaaggcatggattgacaaccacacctcaacaaaaactcctctcccagcacttgccacagaggcagggaaatgatacagataagactcagggtgcacagacttgtgtggccaacggtgtaatggcagcacaaaaccagatggaatgtgaggaggagaaagctgccactcttagctcagatacttctattcaagcttctgaacccttgcttgatacgcacatagtg

SEQ ID NO: 7379 - DNA, 2924 bp, Homo sapiens
  source 1..2924: mol_type = unassigned DNA; mol_type = unassigned DNA
agttagttctttatcatgttgaacactagatgtgtatgtgtctagtgtctaaatacagaatgcctatagtttctaccaacaaattatggatccaaatccttgctccagaagcaggaaataggttaatcagaagattgctggatgttatgaaaagaatcttttatggggggctgcagcagtacctgtccaaagatcgctttagttccaccttgctccacaagcagcacaaccacactggttggtgagaatgtatctgaagaagaggctcagggaataaatgggaacaggccagcaaaacactcagctgcaagtccaaagccacaagtgcctccaaagccattacacctgcagaattcaccttcgtccaatatacaccaaacccccaggcataaagctttacctagtgcaaaaccaaggatggaggaaattaaacctgcctctgcttcttgtgtctcaaaagaaaaacccagtaaggtatcagatctcatcagtcgctttgaaggaggcagctcattatcaaattatagtgatttgaagaaagagtctgctgtgaacctaaatgctcctagaaccccaggaaggcatggattgacaaccacacctcaacaaaaactcctctcccagcacttgccacagaggcagggaaatgatacagataagactcagggtgcacagacttgtgtggccaacggtgtaatggcagcacaaaaccagatggaatgtgaggaggagaaagctgccactcttagctcagatacttctattcaagcttctgaacccttgcttgatacgcacatagtgaatggagaaagagatgaaactgccacagctcctgcatcacccacaacagacagctgtgatggaaatgcttctgacagtagctacaggactccaggcataggcccagtgctccccctagaagaaagaggggcagaaacagaaaccaaggtacaagagagggaaaatggggaaagccctctggaactggagcagctggaccagcaccatgagatgaaggagactaatgagcaaaaacttcacaaaatagccaatgaacttttgcttactgaaagagcttatgtcaaccgacttgacctcttagatcaggtattttattgcaaactgttggaagaagcaaaccgaggctcgtttccagcagagatggtgaataaaatcttttctaatatttcatcaataaatgccttccatagtaaattcctcttgccagagctggagaaacgaatgcaagaatgggaaactactcctagaattggagacatccttcagaaattggcaccattccttaagatgtatggagaatatgtgaaaggatttgataatgcaatggaattggttaaaaacatgacagaacgtattccccagttcaaatcagtggttgaagaaattcagaaacagaaaatctgtgggagcttaactttgcagcatcacatgctagaacctgttcagcggattccccggtatgagatgctccttaaggactatctaaggaaattgcctcctgattccctggactggaatgatgctaaaaaatcacttgaaattatatctacagcagcaagccattctaatagtgcaataaggaaaatggagaacctaaagaaactcttagagatttatgaaatgttgggagaagaagaagacattgtaaacccttcaaatgaactaataaaagaaggacagatcctcaaactagctgctcggaacacttcagcacaagaacgctaccttttcttattcaacaacatgttgctgtactgtgtgcccaaattcagcttggtaggctctaaattcacagttcgaaccagggttggcattgatggaatgaaaattgtagagactcaaaatgaagaatatccacatactttccaggtgtctgggaaagagagaacactggaactgcaggccagttctgcgcaagacaaagaagaatggatcaaggcccttcaagaaaccatcgatgcttttcatcaaaggcatgaaaccttcagaaatgcaattgcaaaggataatgacattcactcagaggtttctactgctgagctagggaaaagagccccaagatggatccgagataatgaagtgacaatgtgtatgaaatgtaaagaacctttcaatgcactgacacgaaggaggcatcattgtcgagcatgtggatatgtggtttgttggaaatgctccgactacaaagctcaacttgaatatgatggtggtaaattgagcaaagtttgtaaagactgttatcaaatcataagtggattcacagacagtgaagaaaagaaaagaaaaggaattttagagattgaatcagcagaagtatctggaaacagtgtggtgtgcagctttcttcagtatatggagaagtcaaaaccttggcagaaagcttggtgtgtgatccccaagcaagaccctcttgtgctgtacatgtatggtgccccccaggacgtcagagcccaggccaccattccacttctgggctatgtggtggatgaaatgccaaggagcgcagacctgccacacagtttcaaactgacccagtctaagtccgtgcacagctttgctgcagacagtgaggaactgaagcagaagtggctgaaagtcatccttttagctgtcacaggtgagacaccaggtggtccaaatgagcatccagccaccttggatgatcatcctgaacctaagaaaaaatcagaatgctgaactcctccaggaccagccatggtgtggaggtctcaggacttacagctcaagacattcccagctcttcttacacatctgctagcactttatgttgaaaaatataggcccataaatgcatcttttgaggactattttcctatgtttatgtactcttagtgaaattagtgtgcagagtcattctaccgataaagttttgaaataatgtg

SEQ ID NO: 7380 - DNA, 1629 bp, Homo sapiens
  source 1..1629: mol_type = unassigned DNA; mol_type = unassigned DNA
ggagcacaaagacagcgattgttacccaataagcagtagtcacacacttctaccaatcgccttaggagggctggttaccatggaatccaccatctgttcactccccaccggaatgtgattatccttgctgggctgggaagtggggaaagcaggggagcctgtgctgggtgagattatctgcaatggaccgggttaatgggaggcttgctttggctcgctggaagaacaaatgaagggagttttacttcaaccatttgtgacttctggccaagaggaataaattcagcttttataaggcagcagtacctgtccaaagatcgctttagttccaccttgctccacaagcagcacaaccacactggttggtgagaatgtatctgaagaagaggctcagggaataaatgggaacaggccagcaaaacactcagctgcaagtccaaagccacaagtgcctccaaagccattacacctgcagaattcaccttcgtccaatatacaccaaacccccaggcataaagctttacctagtgcaaaaccaaggatggaggaaattaaacctgcctctgcttcttgtgtctcaaaagaaaaacccagtaaggtatcagatctcatcagtcgctttgaaggaggcagctcattatcaaattatagtgatttgaagaaagagtctgctgtgaacctaaatgctcctagaaccccaggaaggcatggattgacaaccacacctcaacaaaaactcctctcccagcacttgccacagaggcagggaaatgatacagataagactcagggtgcacagacttgtgtggccaacggtgtaatggcagcacaaaaccagatggaatgtgaggaggagaaagctgccactcttagctcagatacttctattcaagcttctgaacccttgcttgatacgcacatagtgaatggagaaagagatgaaactgccacagctcctgcatcacccacaacagacagctgtgatggaaatgcttctgacagtagctacaggactccaggcataggcccagtgctccccctagaagaaagaggggcagaaacagaaaccaaggtacaagagagggaaaatggggaaagccctctggaactggagcagctggaccagcaccatgagatgaaggtagagcatgagactagctcatgagcagggaaaaccctgcctattcgattgttgtcttaaaactctttatttattgcacccctgaaatgtatgaatcagatcacccacactggcagttaaacgattttcaagctctggctgctgattagcatttcccctatgctctaagcagatatttcactttttcttttcatgtagtttctgttaatatctctgttgtaatttcaggagtcagaacagtgtggaaactttaatataggaaatccacaaatgtattgtttttacatagaaagaaaatgttccttgttgctctagatgttggtgctgtatccctaatacttacgggccaagcaagaagaaattgtataatctttgttgttcagaagtttctaatagaataaataggcctgtaagatgaacttgccactagtaaatgttacttttaaggacatgaatatggaagtattaaattattcaacagattataa

SEQ ID NO: 7381 - DNA, 1439 bp, Homo sapiens
  source 1..1439: mol_type = unassigned DNA; mol_type = unassigned DNA
caaagacagcgattgttacccaataagcagtagtcacacacttctaccaatcgccttaggagggctggttaccatggaatccaccatctgttcactccccaccggaatgtgattatccttgctgggctgggaagtggggaaagcaggggagcctgtgctgggtgagattatctgcaatggaccgggttaatgggaggcttgctttggctcgctggaagaacaaatgaagggagttttacttcaaccatttgtgacttctggccaagaggaataaattcagcttttataaggcagcagtacctgtccaaagatcgctttagttccaccttgctccacaagcagcacaaccacactggttggtgagaatgtatctgaagaagaggctcagggaataaatgggaacaggccagcaaaacactcagctgcaagtccaaagccacaagctcattatcaaattatagtgatttgaagaaagagtctgctgtgaacctaaatgctcctagaaccccaggaaggcatggattgacaaccacacctcaacaaaaactcctctcccagcacttgccacagaggcagggaaatgatacagataagactcagggtgcacagacttgtgtggccaacggtgtaatggcagcacaaaaccagatggaatgtgaggaggagaaagctgccactcttagctcagatacttctattcaagcttctgaacccttgcttgatacgcacatagtgaatggagaaagagatgaaactgccacagctcctgcatcacccacaacagacagctgtgatggaaatgcttctgacagtagctacaggactccaggcataggcccagtgctccccctagaagaaagaggggcagaaacagaaaccaaggtacaagagagggaaaatggggaaagccctctggaactggagcagctggaccagcaccatgagatgaaggtagagcatgagactagctcatgagcagggaaaaccctgcctattcgattgttgtcttaaaactctttatttattgcacccctgaaatgtatgaatcagatcacccacactggcagttaaacgattttcaagctctggctgctgattagcatttcccctatgctctaagcagatatttcactttttcttttcatgtagtttctgttaatatctctgttgtaatttcaggagtcagaacagtgtggaaactttaatataggaaatccacaaatgtattgtttttacatagaaagaaaatgttccttgttgctctagatgttggtgctgtatccctaatacttacgggccaagcaagaagaaattgtataatctttgttgttcagaagtttctaatagaataaataggcctgtaagatgaacttgccactagtaaatgttacttttaaggacatgaatatggaagtattaaattattcaacagattataa

SEQ ID NO: 7382 - DNA, 537 bp, Homo sapiens
  source 1..537: mol_type = unassigned DNA; mol_type = unassigned DNA
accatctgttcactccccaccggaatgtgattatccttgctgggctgggaagtggggaaagcaggggagcctgtgctgggtgagattatctgcaatggaccgggttaatgggaggcttgctttggctcgctggaagaacaaatgaagggagttttacttcaaccatttgtgacttctggccaagaggaataaattcagcttttataaggcagcagtacctgtccaaagatcgctttagttccaccttgctccacaagcagcacaaccacactggttggtgagaatgtatctgaagaagaggctcagggaataaatgggaacaggccagcaaaacactcagctgcaagtccaaagccacaagatctaggccagtgagcatgagccaactgtcagctaactgagtttataaaagagatgagatcactaaaaaccaggggaaccagctgggggaaaatgaggcatgtaattaggaggcgacatgactcctcacccttcttccagaagtgcctccaaagccattacacctgcagaattcac

SEQ ID NO: 7383 - DNA, 2987 bp, Homo sapiens
  source 1..2987: mol_type = unassigned DNA; mol_type = unassigned DNA
atctgttcactccccaccggaatgtgattatccttgctgggctgggaagtggggaaagcaggggagcctgtgctgggtgagattatctgcaatggaccgggttaatgggaggcttgctttggctcgctggaagaacaaatgaagggagttttacttcaaccatttgtgacttctggccaagaggaataaattcagcttttataaggcagcagtacctgtccaaagatcgctttagttccaccttgctccacaagcagcacaaccacactggttggtgagaatgtatctgaagaagaggctcagggaataaatgggaacaggccagcaaaacactcagctgcaagtccaaagccacaagtgcctccaaagccattacacctgcagaattcaccttcgtccaatatacaccaaacccccaggcataaagctttacctagtgcaaaaccaaggatggaggaaattaaacctgcctctgcttcttgtgtctcaaaagaaaaacccagtaaggtatcagatctcatcagtcgctttgaaggaggcagctcattatcaaattatagtgatttgaagaaagagtctgctgtgaacctaaatgctcctagaaccccaggaaggcatggattgacaaccacacctcaacaaaaactcctctcccagcacttgccacagaggcagggaaatgatacagataagactcagggtgcacagacttgtgtggccaacggtgtaatggcagcacaaaaccagatggaatgtgaggaggagaaagctgccactcttagctcagatacttctattcaagcttctgaacccttgcttgatacgcacatagtgaatggagaaagagatgaaactgccacagctcctgcatcacccacaacagacagctgtgatggaaatgcttctgacagtagctacaggactccaggcataggcccagtgctccccctagaagaaagaggggcagaaacagaaaccaaggtacaagagagggaaaatggggaaagccctctggaactggagcagctggaccagcaccatgagatgaaggagactaatgagcaaaaacttcacaaaatagccaatgaacttttgcttactgaaagagcttatgtcaaccgacttgacctcttagatcagaaaatagagtggaggtgaatttagaaaattaacaaccatctggacattatgaaggaatagacctccttctgcctacatgtaacagaatggcaattaagaggtattttattgcaaactgttggaagaagcaaaccgaggctcgtttccagcagagatggtgaataaaatcttttctaatatttcatcaataaatgccttccatagtaaattcctcttgccagagctggagaaacgaatgcaagaatgggaaactactcctagaattggagacatccttcagaaattggcaccattccttaagatgtatggagaatatgtgaaaggatttgataatgcaatggaattggttaaaaacatgacagaacgtattccccagttcaaatcagtggttgaagaaattcagaaaacctttctcattacagaaacagaaaatctgtgggagcttaactttgcagcatcacatgctagaacctgttcagcggattccccggtatgagatgctccttaaggactatctaaggaaattgcctcctgattccctggactggaatgatgctaaaaaatcacttgaaattatatctacagcagcaagccattctaatagtgcaataaggaaaatggagaacctaaagaaactcttagagatttatgaaatgttgggagaagaagaagacattgtaaacccttcaaatgaactaataaaagaaggacagatcctcaaactagctgctcggaacacttcagcacaagaacgctaccttttcttattcaacaacatgttgctgtactgtgtgcccaaattcagcttggtaggctctaaattcacagttcgaaccagggttggcattgatggaatgaaaattgtagagactcaaaatgaagaatatccacatactttccaggtgtctgggaaagagagaacactggaactgcaggccagttctgcgcaagacaaagaagaatggatcaaggcccttcaagaaaccatcgatgcttttcatcaaaggcatgaaaccttcagaaatgcaattgcaaaggataatgacattcactcagaggtttctactgctgagctagggaaaagagccccaagatggatccgagataatgaagtgacaatgtgtatgaaatgtaaagaacctttcaatgcactgacacgaaggaggcatcattgtcgagcatgtggatatgtggtttgttggaaatgctccgactacaaagctcaacttgaatatgatggtggtaaattgagcaaagtttgtaaagactgttatcaaatcataagtggattcacagacagtgaagaaaagaaaagaaaaggaattttagagattgaatcagcagaagtatctggaaacagtgtggtgtgcagctttcttcagtatatggagaagtcaaaaccttggcagaaagcttggtgtgtgatccccaagcaagaccctcttgtgctgtacatgtatggtgccccccaggacgtcagagcccaggccaccattccacttctgggctatgtggtggatgaaatgccaaggagcgcagacctgccacacagtttcaaactgacccagtctaagtccgtgcacagctttgctgcagacagtgaggaactgaagcagaagtggctgaaagtcatccttttagctgtcacaggtgagacaccaggtggtccaaatgagcatccagccaccttggatgatcatcctgaacctaagaaaaaatcagaatgctgaactcctccaggaccagccatggtgtggaggtctcaggacttacagctcaagacattcccagctcttcttacacatctgctagcactttatgttgaaaaatataggcccataaatgca

SEQ ID NO: 7384 - DNA, 2435 bp, Homo sapiens
  source 1..2435: mol_type = unassigned DNA; mol_type = unassigned DNA
gtgattatccttgctgggctgggaagtggggaaagcaggggagcctgtgctgggtgagattatctgcaatggaccgggttaatgggaggcttgctttggctcgctggaagaacaaatgaagggagttttacttcaaccatttgtgacttctggccaagaggaataaattcagcttttataaggcagcagtacctgtccaaagatcgctttagttccaccttgctccacaagcagcacaaccacactggttggtgagaatgtatctgaagaagaggctcagggaataaatgggaacaggccagcaaaacactcagctgcaagtccaaagccacaagtgcctccaaagccattacacctgcagaattcaccttcgtccaatatacaccaaacccccaggcataaagctttacctagtgcaaaaccaaggatggaggaaattaaacctgcctctgcttcttgtgtctcaaaagaaaaacccagtaaggtatcagatctcatcagtcgctttgaaggaggcaggagactaatgagcaaaaacttcacaaaatagccaatgaacttttgcttactgaaagagcttatgtcaaccgacttgacctcttagatcaggtattttattgcaaactgttggaagaagcaaaccgaggctcgtttccagcagagatggtgaataaaatcttttctaatatttcatcaataaatgccttccatagtaaattcctcttgccagagctggagaaacgaatgcaagaatgggaaactactcctagaattggagacatccttcagaaattggcaccattccttaagatgtatggagaatatgtgaaaggatttgataatgcaatggaattggttaaaaacatgacagaacgtattccccagttcaaatcagtggttgaagaaattcagaaacagaaaatctgtgggagcttaactttgcagcatcacatgctagaacctgttcagcggattccccggtatgagatgctccttaaggactatctaaggaaattgcctcctgattccctggactggaatgatgctaaaaaatcacttgaaattatatctacagcagcaagccattctaatagtgcaataaggaaaatggagaacctaaagaaactcttagagatttatgaaatgttgggagaagaagaagacattgtaaacccttcaaatgaactaataaaagaaggacagatcctcaaactagctgctcggaacacttcagcacaagaacgctaccttttcttattcaacaacatgttgctgtactgtgtgcccaaattcagcttggtaggctctaaattcacagttcgaaccagggttggcattgatggaatgaaaattgtagagactcaaaatgaagaatatccacatactttccaggtgtctgggaaagagagaacactggaactgcaggccagttctgcgcaagacaaagaagaatggatcaaggcccttcaagaaaccatcgatgcttttcatcaaaggcatgaaaccttcagaaatgcaattgcaaaggataatgacattcactcagaggtttctactgctgagctagggaaaagagccccaagatggatccgagataatgaagtgacaatgtgtatgaaatgtaaagaacctttcaatgcactgacacgaaggaggcatcattgtcgagcatgtggatatgtggtttgttggaaatgctccgactacaaagctcaacttgaatatgatggtggtaaattgagcaaagtttgtaaagactgttatcaaatcataagtggattcacagacagtgaagaaaagaaaagaaaaggaattttagagattgaatcagcagaagtatctggaaacagtgtggtgtgcagctttcttcagtatatggagaagtcaaaaccttggcagaaagcttggtgtgtgatccccaagcaagaccctcttgtgctgtacatgtatggtgccccccaggacgtcagagcccaggccaccattccacttctgggctatgtggtggatgaaatgccaaggagcgcagacctgccacacagtttcaaactgacccagtctaagtccgtgcacagctttgctgcagacagtgaggaactgaagcagaagtggctgaaagtcatccttttagctgtcacaggtgagacaccaggtggtccaaatgagcatccagccaccttggatgatcatcctgaacctaagaaaaaatcagaatgctgaactcctccaggaccagccatggtgtggaggtctcaggacttacagctcaagacattcccagctcttcttacacatctgctagcactttatgttgaaaaatataggcccataaatgcatcttttgaggactattttcctatgtttatgtactcttagtgaaattagtgtgcagagtcattctaccgataaagttttgaaataatgtgaaaactgga

SEQ ID NO: 7385 - DNA, 8242 bp, Homo sapiens
  source 1..8242: mol_type = unassigned DNA; mol_type = unassigned DNA
attatccttgctgggctgggaagtggggaaagcaggggagcctgtgctgggtgagattatctgcaatggaccgggttaatgggaggcttgctttggctcgctggaagaacaaatgaagggagttttacttcaaccatttgtgacttctggccaagaggaataaattcagcttttataaggcagcagtacctgtccaaagatcgctttagttccaccttgctccacaagcagcacaaccacactggttggtgagaatgtatctgaagaagaggctcagggaataaatgggaacaggccagcaaaacactcagctgcaagtccaaagccacaagtgcctccaaagccattacacctgcagaattcaccttcgtccaatatacaccaaacccccaggcataaagctttacctagtgcaaaaccaaggatggaggaaattaaacctgcctctgcttcttgtgtctcaaaagaaaaacccagtaaggtatcagatctcatcagtcgctttgaaggaggcagctcattatcaaattatagtgatttgaagaaagagtctgctgtgaacctaaatgctcctagaaccccaggaaggcatggattgacaaccacacctcaacaaaaactcctctcccagcacttgccacagaggcagggaaatgatacagataagactcagggtgcacagacttgtgtggccaacggtgtaatggcagcacaaaaccagatggaatgtgaggaggagaaagctgccactcttagctcagatacttctattcaagcttctgaacccttgcttgatacgcacatagtgaatggagaaagagatgaaactgccacagctcctgcatcacccacaacagacagctgtgatggaaatgcttctgacagtagctacaggactccaggcataggcccagtgctccccctagaagaaagaggggcagaaacagaaaccaaggtacaagagagggaaaatggggaaagccctctggaactggagcagctggaccagcaccatgagatgaaggagactaatgagcaaaaacttcacaaaatagccaatgaacttttgcttactgaaagagcttatgtcaaccgacttgacctcttagatcaggtattttattgcaaactgttggaagaagcaaaccgaggctcgtttccagcagagatggtgaataaaatcttttctaatatttcatcaataaatgccttccatagtaaattcctcttgccagagctggagaaacgaatgcaagaatgggaaactactcctagaattggagacatccttcagaaattggcaccattccttaagatgtatggagaatatgtgaaaggatttgataatgcaatggaattggttaaaaacatgacagaacgtattccccagttcaaatcagtggttgaagaaattcagaaacagaaaatctgtgggagcttaactttgcagcatcacatgctagaacctgttcagcggattccccggtatgagatgctccttaaggactatctaaggaaattgcctcctgattccctggactggaatgatgctaaaaaatcacttgaaattatatctacagcagcaagccattctaatagtgcaataaggaaaatggagaacctaaagaaactcttagagatttatgaaatgttgggagaagaagaagacattgtaaacccttcaaatgaactaataaaagaaggacagatcctcaaactagctgctcggaacacttcagcacaagaacgctaccttttcttattcaacaacatgttgctgtactgtgtgcccaaattcagcttggtaggctctaaattcacagttcgaaccagggttggcattgatggaatgaaaattgtagagactcaaaatgaagaatatccacatactttccaggtgtctgggaaagagagaacactggaactgcaggccagttctgcgcaagacaaagaagaatggatcaaggcccttcaagaaaccatcgatgcttttcatcaaaggcatgaaaccttcagaaatgcaattgcaaaggataatgacattcactcagaggtttctactgctgagctagggaaaagagccccaagatggatccgagataatgaagtgacaatgtgtatgaaatgtaaagaacctttcaatgcactgacacgaaggaggcatcattgtcgagcatgtggatatgtggtttgttggaaatgctccgactacaaagctcaacttgaatatgatggtggtaaattgagcaaagtttgtaaagactgttatcaaatcataagtggattcacagacagtgaagaaaagaaaagaaaaggaattttagagattgaatcagcagaagtatctggaaacagtgtggtgtgcagctttcttcagtatatggagaagtcaaaaccttggcagaaagcttggtgtgtgatccccaagcaagaccctcttgtgctgtacatgtatggtgccccccaggacgtcagagcccaggccaccattccacttctgggctatgtggtggatgaaatgccaaggagcgcagacctgccacacagtttcaaactgacccagtctaagtccgtgcacagctttgctgcagacagtgaggaactgaagcagaagtggctgaaagtcatccttttagctgtcacaggtgagacaccaggtggtccaaatgagcatccagccaccttggatgatcatcctgaacctaagaaaaaatcagaatgctgaactcctccaggaccagccatggtgtggaggtctcaggacttacagctcaagacattcccagctcttcttacacatctgctagcactttatgttgaaaaatataggcccataaatgcatcttttgaggactattttcctatgtttatgtactcttagtgaaattagtgtgcagagtcattctaccgataaagttttgaaataatgtgaaaactggagcattttttgagctattccttgaatatgtgcttttttgtcttgaagaaatggtgtatcaattgattctgtcaccgtcaggttagaatgagcacttccatttaagaaatcctttcatgtcttcttctctttcacatgtaggacctggaacagtttgaaagatatacctccatgttgccaaaatagatccatggtgaaaaatacagggacagttgaggctattgtattaacttatttaatttagtttataaatctctagctgcataaatgatgtctgttcttttaaaacaaaagaaaaaggacaaattgttggtgttcagatttccgatttataaagaaaagataacttgtttttgtagaaatactcctaagaatgtcttaagtatatagcaattatgtatatatagtattaaatatatatattatacatgcttttaggttcacattcatctctaatttattttttaaatataaagcatggtttatcgtggaattgagcaatgttctaaactgaagaaatgttttggtgatttatgttttgctgattggcatttgagggtattgatatttttataataagcggtaatttatgtggcatgggatatatttgtgaattccaacagtacttttaaagtaccattttttgtttctgtgcctatttaaaacagtgcctctcttagaaggtgctattaatataagatgagggttcagttaatgcttcagtcttgattattctaagattaaagtgcattttggtcactgggacagtcaaagtcatacaggttattttaccgtttacaatcctataattattgcagtagttaacatcagcatgtacaaacattttcaccaaaacccaaactttatgagacacctgaccttttacagaactaggatatgtggaaaccacatttatcgtaatgtttttcttttccgtaagataatcgagcatggttaaataaggtctctatataatgaacacttaagataactgtatgggccttttcctttgtcggaatgaaacaaaatccacatgtgataacctatgtttggggtgggggctggtcacatgattccttgtcatgaaggctgctcttcactcttttgtacttgtgattaaaatctcacactaagtttactatttaacttaatcctttttctcaaattaaacctttttttatactgtcataccccaaacattgtcactttttaatgtaccagtctgctagaaatctacaagaatgatcccactatctttagtatgtaaggattacaccttagatatagaatagaatttgagactgccacacatttattcaggccttgttactttaagaaatatcttattttttccaccccaaaggagcaagtgaaccaattattgctgacataataggttcccttcctccataaaaggattatcagccatgatcattaacattaaaccaaatagatggagccaaaaagagataaaagtagcttcttaggccctattaaatcagggaaagactagaagaaaatttacattgcttctcttttttaatggccagcggggtatgtgtgtgatgtatactcagagtggttttttggaaaattaaactgtagctatagatgatgctttggttttcttaatctcaagaaaagagaagcaatggaaatacagaatgattaactggggaagaggacttttgtaagtgtgactagaacaatggtaatgtatgggccaatgggaagatttataagtcagattatttttgaaaactatttttaaaagcaagaagactacactttccctaccaaaacagaagtaacatggacacacttaagttttggctcaataaatatcaatgttatttaacttagatcattgaaagaatactcatgtaaagataatgtttattatcatgctcttaacagtcattatctttaattttttaaatgagaagcattaatactagaagagaatttctggttatccggtcaccatattcactttccaccccacattcttcagctaaacgcaaagagaagcagtgaaacagccttacccgcttctctcttattaaagaatcactgatgtttttactcaatgaaaggtaaagtaatacccttagccatttattaaacaattcaaccaagagacctcaaagtgtgattgatgataagaataatcaatgccttttcccttccaacatacttgagcagtcatgacaacctaaaaatatcattggttgctttcccattaaaaccaacgttccctgtgggtcttaattctttattttcactcatttggtgctttccaagtcatcttttctttaaagtgcccttcctccaaactttaaaaagtacttccttgacaaaatttctattcattataaaacatttcaatattttaagcttaaattttgcttttgctgaaagcctaccatttggcgtgttaagtatgaaatatagtgcagacttttatcttggttttaagtggggctcaataaaaaacaccagccacttttgtaataatggcatcacagtgtcatcatgtatgcaagcaataaaactctttagggtatggttttatactgaaaatttaatatgaaggccccttcccacaagaatatagataattattaactttctagatgtgatacggtaattcgaattgcagagtataaggaagggaaatgggaaggggcatcattccttggattttaaataactatcaagaacatttttactttaacaaagaaaatggatagaaaaagcacattttgttttccctgaagtttaatttgacatcaggtttgtgtacttatcttcactaggtgacttaacttaccccaatttttttaaaaattattaaactttttacagaaactaaccttttaaatgtaccctttccccatatatatatacgcacacgtttggattttttttttttaagaacacttgttctagttataaatatataaagaaaacgataaagtttgtggtactgcagggttgttaaagattctttgatgccttctaaaaacttttgtcaaaaatacttttgagttcacaattctgttttacttttccttgtccttactttttggaaacagggtggttgcttttatttgttttctggttatattcaaagccttaagttcttaatctgagcatattgtctgtgataaatttctgatgatctttctggactagatacaacctgagtagcaagcaccaaccggagcaagtaaacttctagggaacaagcgtcttgggttttataggtatctttgctataatgcagaatagattaatgaagatttcctatatcatatgatatttgtgttagtgggtctaagattaagcacatgatatttataagctaaaattaactcaaaagtcaagaatgtcttaatgttttcattcttaaattttgtattctccaagaatgtattagtatatgaactgtggccaaccagttcctattcttcagactgtattgacatctgtagtggatcatgttgcttcttcattcttaccaattttattagaatcaaacttcttgttatttgcatactattatctactatagattctcagctttagaaaatgactatgatacataaagaccactaggtcaacttaaaaaaccctttctgtgaatttatacatgtatgtatatatgtaaaaacactgttgatttgcaattctgtctttccatagaaatgaactttttctatcgaaattgtttaacttaaatattttaacataaattatttacatggatctttatgtataattcatccttatatataccccttaatcacgtagtcatgagaagataactttgctttctttacagaaagggcagagaggaataagataagaaactgaaacaagcaagaatgaagagagatgtgggggagagactgctggtctccagaccacagcaatgtgttttaagataagatgaaatattttaactgcagaagggatataaaatctatgtaattacatgctgatgggatccattgcacccaggtttttgaccttggcctgtaaatgctagactatgatatcttgttattctttttctcctttgggcttttaaaaaataatttcattctcagatcattttctgtactgtttactgaggcaaaaaaaaaaaaaatctgaagtcaatcatggtcttctactttctggactgagcatttggcagaatgcagtatcttttcctgtattttgacatgaaatagcacatggcttctacaagatagttttaacttgttggggtcaccgggagttatatgatggtcaaccccttttcccaaaattcattgtggtagttttagtggaaaacgtaaatcaagaaatctcatatcatactttaataaataaataccaaatacatagtgacatataggtttgggaagaaactagtctgtggggaccattataagagaatcacattatatattacacagtatatggatattggaatgtatcacttgtggggggttctcttcattagcaaaacagtcatgtctgtctgtatataagacttttttttttttaaccaaactagcatttcattttgtgagtgacaattgacattttaaaataagcataggccgggcatagtggctcatgcctgtaatcccagcccttgggaggccgaggtgggcagatcacttcaggtcaggagtttgagaccagcctggccaacatggtgaaaccctgtctctactaaataaaaataaaacaaaataagtgtatctgggccaggcacggtagcccatgcctgtaatcccagcactttgggaggccgaggagttcgagaccagcctggccaacatggcaaaaccctgtctctacaaaaattagccaggtgtggtggcacatgcctgtaatcccagctactcgggaggttgaggcaggagaattgcttgaacccgggagacagaggttgcagtgagccgagattgcaccactgcactccggcctgggtgacagagcaagacttcgactcaaaaaataaaataagcgtatctggatttttcttttgaattcttgactgataagtttgagaatgtatgtttttggaattttacagttgactcaagtgtgaaagtatacacaagtaatttttcttttctagctatgtgaatgtaaaatacttgcagataatgtatatattgtgtaatatatgtatatttggtcataaaagcagataattggaaacattgtaaaattaagcactttaattcctattaaatattaaacatttgtatcttgtaaataaacacatccttaaattaa

SEQ ID NO: 7386 - DNA, 559 bp, Homo sapiens
  source 1..559: mol_type = unassigned DNA; mol_type = unassigned DNA
ttatccttgctgggctgggaagtggggaaagcaggggagcctgtgctgggtgagattatctgcaatggaccgggttaatgggaggcttgctttggctcgctggaagaacaaatgaagggagttttacttcaaccatttgtgacttctggccaagaggaataaattcagcttttataaggcagcagtacctgtccaaagatcgctttagttccaccttgctccacaagcagcacaaccacactggttggtgagaatgtatctgaagaagaggctcagggaataaatgggaacaggccagcaaaacactcagctgcaagtccaaagccacaagtgcctccaaagccattacacctgcagaattcaccttcgtccaatatacaccaaacccccaggcataaagctttacctagtgcaaaaccaaggatggaggaaattaaacctgcctctgcttcttgtgtctcaaaagaaaaacccagtaaggtatcagatctcatcagtcgctttgaaggaggcagaggatctgttgaggatctttccaccagggaatccagagactgat

SEQ ID NO: 7387 - DNA, 2691 bp, Homo sapiens
  source 1..2691: mol_type = unassigned DNA; mol_type = unassigned DNA
ctgggctgggaagtggggaaagcaggggagcctgtgctgggtgagattatctgcaatggaccgggttaatgggaggcttgctttggctcgctggaagaacaaatgaagggagttttacttcaaccatttgtgacttctggccaagaggaataaattcagcttttataaggcagcagtacctgtccaaagatcgctttagttccaccttgctccacaagcagcacaaccacactggttggtgagaatgtatctgaagaagaggctcagggaataaatgggaacaggccagcaaaacactcagctgcaagtccaaagccacaagtgcctccaaagccattacacctgcagaattcaccttcgtccaatatacaccaaacccccaggcataaagctttacctagtgcaaaaccaaggatggaggaaattaaacctgcctctgcttcttgtgtctcaaaagaaaaacccagtaaggtatcagatctcatcagtcgctttgaaggaggcagctcattatcaaattatagtgatttgaagaaagagtctgctgtgaacctaaatgctcctagaaccccaggaaggcatggattgacaaccacacctcaacaaaaactcctctcccagcacttgccacagaggcagggaaatgatacagataagactcagggtgcacagacttgtgtggccaacggtgtaatggcagcacaaaaccagatggaatgtgaggaggagaaagctgccactcttagctcagatacttctattcaagcttctgaacccttgcttgatacgcacatagtgaatggagaaagagatgaaactgccacagctcctgcatcacccacaacagacagctgtgatggaaatgcttctgacagtagctacaggactccaggcataggcccagtgctccccctagaagaaagaggggcagaaacagaaaccaaggtacaagagagggaaaatggggaaagccctctggaactggagcagctggaccagcaccatgagatgaaggagactaatgagcaaaaacttcacaaaatagccaatgaacttttgcttactgaaagagcttatgtcaaccgacttgacctcttagatcagaaaatagagtggaggtgaatttagaaaattaacaaccatctggacattatgaaggaatagacctccttctgcctacatgtaacagaatggcaattaagaggtattttattgcaaactgttggaagaagcaaaccgaggctcgtttccagcagagatggtgaataaaatcttttctaatatttcatcaataaatgccttccatagtaaattcctcttgccagagctggagaaacgaatgcaagaatgggaaactactcctagaattggagacatccttcagaaattggcaccattccttaagatgtatggagaatatgtgaaaggatttgataatgcaatggaattggttaaaaacatgacagaacgtattccccagttcaaatcagtggttgaagaaattcagaaacagaaaatctgtgggagcttaactttgcagcatcacatgctagaacctgttcagcggattccccggtatgagatgctccttaaggactatctaaggaaattgcctcctgattccctggactggaatgatgctaaaaaatcacttgaaattatatctacagcagcaagccattctaatagtgcaataaggaaaatggagaacctaaagaaactcttagagatttatgaaatgttgggagaagaagaagacattgtaaacccttcaaatgaactaataaaagaaggacagatcctcaaactagctgctcggaacacttcagcacaagaacgctaccttttcttattcaacaacatgttgctgtactgtgtgcccaaattcagcttggtaggctctaaattcacagttcgaaccagggttggcattgatggaatgaaaattgtagagactcaaaatgaagaatatccacatactttccaggtgtctgggaaagagagaacactggaactgcaggccagttctgcgcaagacaaagaagaatggatcaaggcccttcaagaaaccatcgatgcttttcatcaaaggcatgaaaccttcagaaatgcaattgcaaaggataatgacattcactcagaggtttctactgctgagctagggaaaagagccccaagatggatccgagataatgaagtgacaatgtgtatgaaatgtaaagaacctttcaatgcactgacacgaaggaggcatcattgtcgagcatgtggatatgtggtttgttggaaatgctccgactacaaagctcaacttgaatatgatggtggtaaattgagcaaagtttgtaaagactgttatcaaatcataagtggattcacagacagtgaagaaaagaaaagaaaaggaattttagagattgaatcagcagaagtatctggaaacagtgtggtgtgcagctttcttcagtatatggagaagtcaaaaccttggcagaaagcttggtgtgtgatccccaagcaagaccctcttgtgctgtacatgtatggtgccccccaggtatctaaaccacatctgtctgaagggacagatgcccttgggggcaaggggaagcgagtggacagcggactcaaaatctgtagaacaagagttcaggcagtttcactgtttcattaaaattgaaaaataatgag

SEQ ID NO: 7388 - DNA, 535 bp, Homo sapiens
  source 1..535: mol_type = unassigned DNA; mol_type = unassigned DNA
gaagtggggaaagcaggggagcctgtgctgggtgagattatctgcaatggaccgggttaatgggaggcttgctttggctcgctggaagaacaaatgaagggagttttacttcaaccatttgtgacttctggccaagaggaataaattcagcttttataagtgagatgagcatgaagcggtgcaaaacttagattgaacaagagagcaaagggaagcaaccatgaaaaagacagtctacagccataccacccggaatgtgctcaatctcatctaatctcagaaaaagacaaatttccacgaagagcagcagtacctgtccaaagatcgctttagttccaccttgctccacaagcagcacaaccacactggttggtgagaatgtatctgaagaagaggctcagggaataaatgggaacaggccagcaaaacactcagctgcaagtccaaagccacaagtgcctccaaagccattacacctgcagaattcaccttcgtccaatatacaccaaacccccaggcataaagctttacctag

SEQ ID NO: 7389 - DNA, 3503 bp, Homo sapiens
  source 1..3503: mol_type = unassigned DNA; mol_type = unassigned DNA
ggggaaagcaggggagcctgtgctgggtgagattatctgcaatggaccgggttaatgggaggcttgctttggctcgctggaagaacaaatgaagggagttttacttcaaccatttgtgacttctggccaagaggaataaattcagcttttataaggcagcagtacctgtccaaagatcgctttagttccaccttgctccacaagcagcacaaccacactggttggtgagaatgtatctgaagaagaggctcagggaataaatgggaacaggccagcaaaacactcagctgcaagtccaaagccacaagctcattatcaaattatagtgatttgaagaaagagtctgctgtgaacctaaatgctcctagaaccccaggaaggcatggattgacaaccacacctcaacaaaaactcctctcccagcacttgccacagaggcagggaaatgatacagataagactcagggtgcacagacttgtgtggccaacggtgtaatggcagcacaaaaccagatggaatgtgaggaggagaaagctgccactcttagctcagatacttctattcaagcttctgaacccttgcttgatacgcacatagtgaatggagaaagagatgaaactgccacagctcctgcatcacccacaacagacagctgtgatggaaatgcttctgacagtagctacaggactccaggcataggcccagtgctccccctagaagaaagaggggcagaaacagaaaccaaggtacaagagagggaaaatggggaaagccctctggaactggagcagctggaccagcaccatgagatgaaggagactaatgagcaaaaacttcacaaaatagccaatgaacttttgcttactgaaagagcttatgtcaaccgacttgacctcttagatcaggtattttattgcaaactgttggaagaagcaaaccgaggctcgtttccagcagagatggtgaataaaatcttttctaatatttcatcaataaatgccttccatagtaaattcctcttgccagagctggagaaacgaatgcaagaatgggaaactactcctagaattggagacatccttcagaaattggcaccattccttaagatgtatggagaatatgtgaaaggatttgataatgcaatggaattggttaaaaacatgacagaacgtattccccagttcaaatcagtggttgaagaaattcagaaacagaaaatctgtgggagcttaactttgcagcatcacatgctagaacctgttcagcggattccccggtatgagatgctccttaaggactatctaaggaaattgcctcctgattccctggactggaatgatgctaaaaaatcacttgaaattatatctacagcagcaagccattctaatagtgcaataaggaaaatggagaacctaaagaaactcttagagatttatgaaatgttgggagaagaagaagacattgtaaacccttcaaatgaactaataaaagaaggacagatcctcaaactagctgctcggaacacttcagcacaagaacgctaccttttcttattcaacaacatgttgctgtactgtgtgcccaaattcagcttggtaggctctaaattcacagttcgaaccagggttggcattgatggaatgaaaattgtagagactcaaaatgaagaatatccacatactttccaggtgtctgggaaagagagaacactggaactgcaggccagttctgcgcaagacaaagaagaatggatcaaggcccttcaagaaaccatcgatgcttttcatcaaaggcatgaaaccttcagaaatgcaattgcaaaggataatgacattcactcagaggtttctactgctgagctagggaaaagagccccaagatggatccgagataatgaagtgacaatgtgtatgaaatgtaaagaacctttcaatgcactgacacgaaggaggcatcattgtcgagcatgtggatatgtggtttgttggaaatgctccgactacaaagctcaacttgaatatgatggtggtaaattgagcaaagtttgtaaagactgttatcaaatcataagtggattcacagacagtgaagaaaagaaaagaaaaggaattttagagattgaatcagcagaagtatctggaaacagtgtggtgtgcagctttcttcagtatatggagaagtcaaaaccttggcagaaagcttggtgtgtgatccccaagcaagaccctcttgtgctgtacatgtatggtgccccccaggacgtcagagcccaggccaccattccacttctgggctatgtggtggatgaaatgccaaggagcgcagacctgccacacagtttcaaactgacccagtctaagtccgtgcacagctttgctgcagacagtgaggaactgaagcagaagtggctgaaagtcatccttttagctgtcacaggtgagacaccaggtggtccaaatgagcatccagccaccttggatgatcatcctgaacctaagaaaaaatcagaatgctgaactcctccaggaccagccatggtgtggaggtctcaggacttacagctcaagacattcccagctcttcttacacatctgctagcactttatgttgaaaaatataggcccataaatgcatcttttgaggactattttcctatgtttatgtactcttagtgaaattagtgtgcagagtcattctaccgataaagttttgaaataatgtgaaaactggagcattttttgagctattccttgaatatgtgcttttttgtcttgaagaaatggtgtatcaattgattctgtcaccgtcaggttagaatgagcacttccatttaagaaatcctttcatgtcttcttctctttcacatgtaggacctggaacagtttgaaagatatacctccatgttgccaaaatagatccatggtgaaaaatacagggacagttgaggctattgtattaacttatttaatttagtttataaatctctagctgcataaatgatgtctgttcttttaaaacaaaagaaaaaggacaaattgttggtgttcagatttccgatttataaagaaaagataacttgtttttgtagaaatactcctaagaatgtcttaagtatatagcaattatgtatatatagtattaaatatatatattatacatgcttttaggttcacattcatctctaatttattttttaaatataaagcatggtttatcgtggaattgagcaatgttctaaactgaagaaatgttttggtgatttatgttttgctgattggcatttgagggtattgatatttttataataagcggtaatttatgtggcatgggatatatttgtgaattccaacagtacttttaaagtaccattttttgtttctgtgcctatttaaaacagtgcctctcttagaaggtgctattaatataagatgagggttcagttaatgcttcagtcttgattattctaagattaaagtgcattttggtcactgggacagtcaaa

SEQ ID NO: 7390 - DNA, 580 bp, Homo sapiens
  source 1..580: mol_type = unassigned DNA; mol_type = unassigned DNA
tatctgcaatggaccgggttaatgggaggcttgctttggctcgctggaagaacaaatgaagggagttttacttcaaccatttgtgacttctggccaagaggaataaattcagcttttataagatggagtctcactctgtcacctaggctggtgtgcagtggcacagtcttggctcactgcaacctccgcctcccggattcaagcaattctcccacctcagtctcctgagtagctgagattacaggcagcagtacctgtccaaagatcgctttagttccaccttgctccacaagcagcacaaccacactggttggtgagaatgtatctgaagaagaggctcagggaataaatgggaacaggccagcaaaacactcagctgcaagtccaaagccacaagtgcctccaaagccattacacctgcagaattcaccttcgtccaatatacaccaaacccccaggcataaagctttacctagtgcaaaaccaaggatggaggaaattaaacctgcctctgcttcttgtgtctcaaaagaaaaacccagtaaggtatcagatctcatcagtcgctttgaaggaggca

SEQ ID NO: 7391 - DNA, 2925 bp, Homo sapiens
  source 1..2925: mol_type = unassigned DNA; mol_type = unassigned DNA
agtgcattggtctgagctcctggcagatcctgtgtaatcttcagcctccctgaagctttacagccaggagtgagattttatcacatgaactttaaaagagtaaagccaaatatctttttattaaaccagagtagattaattatcagtatatgtgaaatcatgtccactgatcaaggcagcagtacctgtccaaagatcgctttagttccaccttgctccacaagcagcacaaccacactggttggtgagaatgtatctgaagaagaggctcagggaataaatgggaacaggccagcaaaacactcagctgcaagtccaaagccacaagtgcctccaaagccattacacctgcagaattcaccttcgtccaatatacaccaaacccccaggcataaagctttacctagtgcaaaaccaaggatggaggaaattaaacctgcctctgcttcttgtgtctcaaaagaaaaacccagtaaggtatcagatctcatcagtcgctttgaaggaggcagctcattatcaaattatagtgatttgaagaaagagtctgctgtgaacctaaatgctcctagaaccccaggaaggcatggattgacaaccacacctcaacaaaaactcctctcccagcacttgccacagaggcagggaaatgatacagataagactcagggtgcacagacttgtgtggccaacggtgtaatggcagcacaaaaccagatggaatgtgaggaggagaaagctgccactcttagctcagatacttctattcaagcttctgaacccttgcttgatacgcacatagtgaatggagaaagagatgaaactgccacagctcctgcatcacccacaacagacagctgtgatggaaatgcttctgacagtagctacaggactccaggcataggcccagtgctccccctagaagaaagaggggcagaaacagaaaccaaggtacaagagagggaaaatggggaaagccctctggaactggagcagctggaccagcaccatgagatgaaggagactaatgagcaaaaacttcacaaaatagccaatgaacttttgcttactgaaagagcttatgtcaaccgacttgacctcttagatcaggtattttattgcaaactgttggaagaagcaaaccgaggctcgtttccagcagagatggtgaataaaatcttttctaatatttcatcaataaatgccttccatagtaaattcctcttgccagagctggagaaacgaatgcaagaatgggaaactactcctagaattggagacatccttcagaaattggcaccattccttaagatgtatggagaatatgtgaaaggatttgataatgcaatggaattggttaaaaacatgacagaacgtattccccagttcaaatcagtggttgaagaaattcagaaacagaaaatctgtgggagcttaactttgcagcatcacatgctagaacctgttcagcggattccccggtatgagatgctccttaaggactatctaaggaaattgcctcctgattccctggactggaatgatgctaaaaaatcacttgaaattatatctacagcagcaagccattctaatagtgcaataaggaaaatggagaacctaaagaaactcttagagatttatgaaatgttgggagaagaagaagacattgtaaacccttcaaatgaactaataaaagaaggacagatcctcaaactagctgctcggaacacttcagcacaagaacgctaccttttcttattcaacaacatgttgctgtactgtgtgcccaaattcagcttggtaggctctaaattcacagttcgaaccagggttggcattgatggaatgaaaattgtagagactcaaaatgaagaatatccacatactttccaggtgtctgggaaagagagaacactggaactgcaggccagttctgcgcaagacaaagaagaatggatcaaggcccttcaagaaaccatcgatgcttttcatcaaaggcatgaaaccttcagaaatgcaattgcaaaggataatgacattcactcagaggtttctactgctgagctagggaaaagagccccaagatggatccgagataatgaagtgacaatgtgtatgaaatgtaaagaacctttcaatgcactgacacgaaggaggcatcattgtcgagcatgtggatatgtggtttgttggaaatgctccgactacaaagctcaacttgaatatgatggtggtaaattgagcaaagtttgtaaagactgttatcaaatcataagtggattcacagacagtgaagaaaagaaaagaaaaggaattttagagattgaatcagcagaagtatctggaaacagtgtggtgtgcagctttcttcagtatatggagaagtcaaaaccttggcagaaagcttggtgtgtgatccccaagcaagaccctcttgtgctgtacatgtatggtgccccccaggacgtcagagcccaggccaccattccacttctgggctatgtggtggatgaaatgccaaggagcgcagacctgccacacagtttcaaactgacccagtctaagtccgtgcacagctttgctgcagacagtgaggaactgaagcagaagtggctgaaagtcatccttttagctgtcacaggtgagacaccaggtggtccaaatgagcatccagccaccttggatgatcatcctgaacctaagaaaaaatcagaatgctgaactcctccaggaccagccatggtgtggaggtctcaggacttacagctcaagacattcccagctcttcttacacatctgctagcactttatgttgaaaaatataggcccataaatgcatcttttgaggactattttcctatgtttatgtactcttagtgaaattagtgtgcagagtcattctaccgataaagttttgaaataatg

SEQ ID NO: 7392 - DNA, 2349 bp, Homo sapiens
  source 1..2349: mol_type = unassigned DNA; mol_type = unassigned DNA
gggcagaaacagaaaccaaggtacaagagagggaaaatggggaaagccctctggaactggagcagctggaccagcaccatgagatgaaggagactaatgagcaaaaacttcacaaaatagccaatgaacttttgcttactgaaagagcttatgtcaaccgacttgacctcttagatcagaaaatagagtggaggtgaatttagaaaattaacaaccatctggacattatgaaggaatagacctccttctgcctacatgtaacagaatggcaattaagaggtattttattgcaaactgttggaagaagcaaaccgaggctcgtttccagcagagatggtgaataaaatcttttctaatatttcatcaataaatgccttccatagtaaattcctcttgccagagctggagaaacgaatgcaagaatgggaaactactcctagaattggagacatccttcagaaattggcaccattccttaagatgtatggagaatatgtgaaaggatttgataatgcaatggaattggttaaaaacatgacagaacgtattccccagttcaaatcagtggttgaagaaattcagaaacagaaaatctgtgggagcttaactttgcagcatcacatgctagaacctgttcagcggattccccggtatgagatgctccttaaggactatctaaggaaattgcctcctgattccctggactggaatgatgctaaaaaatcacttgaaattatatctacagcagcaagccattctaatagtgcaataaggaaaatggagaacctaaagaaactcttagagatttatgaaatgttgggagaagaagaagacattgtaaacccttcaaatgaactaataaaagaaggacagatcctcaaactagctgctcggaacacttcagcacaagaacgctaccttttcttattcaacaacatgttgctgtactgtgtgcccaaattcagcttggtaggctctaaattcacagttcgaaccagggttggcattgatggaatgaaaattgtagagactcaaaatgaagaatatccacatactttccaggtgtctgggaaagagagaacactggaactgcaggccagttctgcgcaagacaaagaagaatggatcaagagacgaggttttgccatgctgcccaggctgatctcgaactcctgagctcaagcgatctgcctgcctcggtctcccaaagtgctgggattacaggcccttcaagaaaccatcgatgcttttcatcaaaggcatgaaaccttcagaaatgcaattgcaaaggataatgacattcactcagaggtttctactgctgagctagggaaaagagccccaagatggatccgagataatgaagtgacaatgtgtatgaaatgtaaagaacctttcaatgcactgacacgaaggaggcatcattgtcgagcatgtggatatgtggtttgttggaaatgctccgactacaaagctcaacttgaatatgatggtggtaaattgagcaaagtttgtaaagactgttatcaaatcataagtggattcacagacagtgaagaaaagaaaagaaaaggaattttagagttccgcatggctggggaggcctcagaaaacgtacaatcatggcagaaggggaagaggcacatcttacatggtggcaagcgagagtgagcaagtgtatgaaggaagaactgtcagacacttacaaaaccatcagatctcatgagaactcacgatcacgagaacagcatgggggacactgcccccatgatccagttacctcctatcagattgaatcagcagaagtatctggaaacagtgtggtgtgcagctttcttcagtatatggagaagtcaaaaccttggcagaaagcttggtgtgtgatccccaagcaagaccctcttgtgctgtacatgtatggtgccccccaggacgtcagagcccaggccaccattccacttctgggctatgtggtggatgaaatgccaaggagcgcagacctgccacacagtttcaaactgacccagtctaagtccgtgcacagctttgctgcagacagtgaggaactgaagcagaagtggctgaaagtcatccttttagctgtcacagctaaacgcaaagagaagcagtgaaacagccttacccgcttctctcttattaaagaatcactgatgtttttactcaatgaaagaaagggcagagaggaataagataagaaactgaaacaagcaagaatgaagagagatgtgggggagagactgctggtctccagaccacagcaatgtgttttaagataagatgaaatattttaactgcagaagggatataaaatctatgtaattacatgct

SEQ ID NO: 7393 - DNA, 9288 bp, Homo sapiens
  source 1..9288: mol_type = unassigned DNA; mol_type = unassigned DNA
agtgctcgcccgcccgaccccggcggctcgcgcccgggagcgccgcagggtcgctagagtcggccgcgtcctttgtgtggcgctcaggctgcgccgcggggcggcgggacggaatgtgggcgctgcgggggcttttctctcctacccgaactgtgggaacaatggactgaaaggggaagatggattgaggggccgagcggggaagcgagctgcaccggggaatcatgacttctgcagccgagataaagaagccaccagtggcccccaagcccaagtttgttgtggcaaataataagccagccccacctcctattgcacctaaacccgacattgtgatttctagtgttccacagtcgacaaagaaaatgaaaccagcaatagccccaaaaccaaaagtcctgaagacctcacctgttcgagagattgggcagtcgccatcaaggaaaatcatgttgaacctggaagggcataaacaggaattagctgaaagcactgacaactttaattgtaaatatgaaggcaatcagagcaatgattatatttcaccaatgtgttcctgcagttctgagtgtatccataagctgggccatagagagaatttgtgtgtaaagcagcttgttttagagcccctggaaatgaatgaaaatttagaaaacagtaaaattgatgagactttgactataaaaactaggagtaaatgtgatttgtatggtgaaaaagccaagaaccagggtggggttgttttaaaggcaagcgttttagaagaggagctcaaagatgccttaatacaccaaatgccaccttttatttctgcacagaagcacaggcccacagacagcccagaaatgaatggtggctgtaattcaaatggacaattcagaattgaatttgcggatttgtcaccttccccatccagctttgaaaaagttcctgatcatcacagttgccacttacagcttcctagtgatgaatgtgaacattttgaaacttgccaggatgacagtgaaaaaagcaataattgctttcagtcatctgaactagaggctctggaaaatgggaaaaggagtactttaatatcttcagatggagttagtaagaaatcagaagtcaaagaccttggtcccttagaaattcatttagtaccatataccccaaaatttccaactcccaagcccagaaagacacgaactgctcgtctgttacgccaaaagtgtgtagatactcctagtgaaagcactgaagaaccggggaattcagacagtagctcttcctgtcttactgaaaatagtttgaaaatcaataaaatcagtgttctgcatcagaatgttttgtgtaagcaggaacaggtggataaaatgaagctaggaaataaaagtgaattgaatatggaatccaacagtgatgcacaggacttagtcaattcacagaaagccatgtgtaatgaaacaacttcctttgaaaaaatggcaccttcttttgataaagactctaatttgagttctgacagcacaactgtagatggttctagtatgtcgcttgctgtggacgaagggaccggttttataagatgtactgtatctatgagcctgcctaagcagctcaaattaacttgcaatgaacatttgcaatctgggagaaacctgggagtttctgcccctcaaatgcaaaaggaatctgttataaaagaggaaaattctctacgaattgtccccaaaaaacctcaaagacatagcttgcctgctacaggagtgcttaaaaaggctgcctccgaggagcttttggaaaaaagttcttatccttcaagtgaagaaaaaagttcagagaagagtctagaaagaaatcaccttcagcatttgtgtgcccaaaaccgtggtgtgtcatcctcctttgatatgcctaaacgggcttcagaaaagccagtgtggaagttacctcatcctattttacccttttcagggaacccagaattcttaaagtctgtcaccgtatcgtcaaacagtgagccttcaacagccctaaccaagcccagagcaaaatcgttatctgctatggatgtggaaaagtgcactaagccttgcaaagactctacaaagaaaaactcttttaaaaagttgctcagcatgaaactgtccatctgtttcatgaagagtgactttcaaaaattttggtccaagagtagccaactcggagacaccaccacaggccacctctccagtggggagcagaaggggattgaaagtgattggcaaggcttgttggtaggagaggagaagagaagtaaacccatcaaggcatattccacagaaaactatagcctggaatctcaaaagaagaggaagaagtctcggggccagaccagtgcagctaatggtctgagagctgagtctttggatgaccaaatgctctcccgggagtcatcatctcaggcaccttacaagtctgttacaagcctctgtgcaccggagtatgaaaatatacgccattatgaggaaataccagagtacgagaacttgccatttattatggctatacggaaaactcaagagttggaatggcagaattccagcagcatggaggacgctgatgcaaatgtgtatgaggtagaagagccgtatgaagctccagatggccagctgcagcttggacccagacatcagcattccagttcaggagcatcccaggaggaacagaatgatcttggtcttggtgaccttccctctgatgaggaggaaatcatcaacagttctgatgaagatgatgtcagctctgagtcaagtaaaggagagcctgacccactggaagataaacaggatgaagataatggaatgaaaagtaaagttcatcatattgccaaggagatcatgagctcagagaaagtgtttgtggatgtgttaaaacttttgcatattgatttccgggatgcagtagctcatgcttccaggcaacttgggaaaccagtgattgaggaccggattctaaatcagatcctatactacttgcctcagctgtatgagctcaaccgggatctcttgaaggaactggaggaaagaatgttgcactggactgaacaacaaagaattgctgatatctttgtaaagaagggaccatatctaaaaatgtattccacatacatcaaagaatttgataagaatatagccttgctggatgaacagtgcaagaaaaatccaggttttgctgctgttgttagagaatttgagatgagccctcgctgtgctaatctggccctcaagcactacctgctcaagccggttcagaggatcccccagtacaggctgttgctgacagattatttgaagaatctcatagaagatgctggagattacagagacactcaagatgcccttgctgttgttatagaggtagccaaccacgccaatgacaccatgaagcaaggagacaactttcagaaacttatgcaaattcagtacagcttaaatggacaccatgaaattgtgcagcctggtcgggtttttctcaaagaaggaattctgatgaagctgtctcggaaagtgatgcaacctcgaatgtttttcctgtttaatgatgccctgctgtatacaacaccagtgcagtctgggatgtataaactgaacaacatgctctcactggctggaatgaaggtcagaaaacctacccaagaagcctatcagaatgaattaaagattgaaagtgtagaacgttccttcattctctcagccagttctgccacagaaagggatgaatggctagaagcgatttccagggcaatagaagagtatgccaagaaaagaatcaccttctgtcctagtaggagtcttgatgaggcagactcagaaaataaagaagaagttagtcctcttggatcgaaggctcccatctggattcctgataccagagccacaatgtgtatgatctgcacaagcgaattcactctcacctggagacgacaccactgccgggcctgtggaaagattgtatgccaagcttgttcgtctaataagtatggcttagattacctgaaaaatcaaccagcaagagtatgtgaacattgtttccaagaactgcagaaattagatcaccagcactcccctaggattggatctcctggaaatcacaaatctccttcaagtgccttatcatcagtcttacatagcattccatcagggaggaaacagaaaaaaatcccagctgctctcaaagaagtatcagcaaacacagaggattcttctatgagtggctacttgtacagatcaaagggcaataaaaaaccctggaaacacttttggtttgtcataaaaaataaagtactatatacatatgctgcaagtgaggacgtggccgctttggagagtcagcctttattaggattcactgttattcaagttaaagatgagaattccgagtctaaagtatttcagttactgcacaaaaacatgttattttatgtattcaaagcagaggatgctcattcggctcagaagtggatagaagcatttcaggaaggcacaatattgtagcagtattggtttcatctcttctgtgattccaaagaggtggaatttcatcagaatggagtaaatgcaattcaaaaattgtataaaaatgaacactgccaagataaagccaaccagacccttcatcaaagaaattgttttgttaggtataagcaatttttaaaaggtgtttgttttttcatttatgttatttattaaaattttgatgtttacttaatggtcagaattatttctgagacacactgaattctaaagtaccatttctttagagaccagaaaaactatcttaatactgtatactgtattaactattcgtgacatagttcacactgttttcttaccttacattgtaacaatcttactggtggaaagtctttgtaaggaaaaaacacatagcaaggagcaaatttccacaaagtgcttggtttaggaattgtgattattataaaactgctgatgaaaaaaatgcatgtctttgaatcaataaacttgggtgaatatttgtatcttttagtggaaaaacatggccagcttctacctcagtaactgtgaactgaaatttcagtaaattatctaaagtatttctgttgttaggtacctctttggcaggagttaatattacatcatcaaagaattatagcaaagagatagaatctgaattttttaaaactgtgagtaggaatgaagatgtttttatttgcagaataccacaaataaccaactcttccggcttttaagtccaatcttttaaaaaatctaccacttcgaaacaaacataaatgtatcattttttaaaatagcaaaatatagcaagcattatgtcacataatattccctgctattataagagttctgagcccaagtcaatgatgatatttgtatctataagtaatgttacatttccaaaaatattgtgcattacaaatggaactggaattactatatcagaaaagcataattataagccagtaataactgaaattctatagtattcattttcaaaaggtctttttctgccagtttgtgatatcctccctcctaattaaaaaaaaaaacaacaaatcctttctctataagcagctatcagcacacctccttaggaaagatttagattcataattctggtgcacttactgtttaacatatgaactaccttgcacatacaattgttgattagcagaagaaaatgaaataacactgtgataaaagccatccctgatgttcacaatacacaatttattaactaagtttaaactataaattatcttaactgccatgagcggtggctcacacctacaatctcagcattttgggaggccgaggccgttggaccacctgaggtcaggagatcgagaccagcctggccaatatggtgaaaccccatctctattaaaaatacaagaattagccggtcgtggtggtacatggctgtagtcctagctattcagcaggctgaggcaggagcatcgcttgaacccaggaggcagaggttgcagtgagccgagatggtgccactgcactccagcctgggatgacagagcgagactccatctcaaaaaaaaaaaaaaaaaaaaaattgaacagcaaggttatccatataatatttctttaaagggtacaagaattttcctttctgcctctaaataaaggatttcctaattcagtgtgatccttaacagcaaccatgaggattactgagtgcctttctggggccttttgaatgctgtttggtacagcaccagagtccctactagatctagagttggctgctatagttttttgtggcgattttttgccatggagtcatttgaacctcatacacaatcctaacatgccatcccctttctgtcatagcaggtacactaaaatttctttgtagctcaattttatataatcaagatcacataaataaggcttccatgttagaatcgttgcagtttttagtgtattcctttttggaggctaaagttgtaccttataaactgtttctgcgtctggcatttagcaagacaagttatttgggttttctttccctcctcttgagctctcagccttctgactacaaggtttggcttaagccttataatctaaaaaatatcagccaggctattctatcttctaagacctggctgaatcatgagccagttctaaatctaaagagagtgagagagggaagaaatctggcacaaacttacagtctctttaattacatgtaaaatgcatgtgactgtattacctattggcttagccccatggagggtttagaaaaatgtgtagtctttgtggaagctatccaattatccttctcccaaaaagatgttttaaatgtggaatagtattacattcccctgcccctttatgagtccttcataacttactaaagctgaccaattgttatttatgtaacctggctcattcattgtcaactaagaacctaattatatgcaatttattgtaaaaaaagctataaaaatatattttgctagtattttagaggaaaaatgatattgggcacagtctataaatggggagaaaagttaagtagtatctagattccaaggatactatatttattatacagatatgtgtgcctgtgcttccatcaaaccctttttcaggtatctccttttaattcataaggaggaaagagtagggcatttataaagctaagctaaaaatgatgctaagcataacgtagatgagacgccaggctgaaccaggggaaggctggcattgttagtgtccccaactagcagtccacctttatctgtggcagctataaatgtacaggacccatcagagtcctaagaaaatgagagtaattatctctggcatcatccacatttccgactctttccaatctcttttccctttttctgtaatgtacccagcatccccctattgtattttggttgcccaagattcttgattctttgagtgtgtagtagcatttcttaaaatgagatcatcagaccaacccttgattcacatgaaagctgtaatgacacaacaaagagaaggcgacagttttaaagtataattgtcagccaaatgtgtattttatatttggttcatagaatatatctagatgtggggaaagtctcctatttggtaatttagttaaaatgtaaatgttatatcacagcatatgttggtatgttttggagtgtgcttccattgtgctcagcttttgaaaagtttgaaatccactttagtcaaatgtagtcaatgggatttccagagatacatattgtttttcttagtgtaccacacactccttgaaggcagatactgtacttaatatatcactgtcttccataatactgccctaggtctttttagtttttaagagaccgggtctcgctatgtttcccatgctgaactcaaatgcctgggcttaagcaatcctcccacctcagcctctggagtagctgggactacaggggcatgcaccaccaggcctggcttcctaggagggtctttaaagagaaaatatttgttcaattgaaaacaggattcttgtcatctacaactccaacacagcctgaaaatatccacattataacctggaccttagacctactttctccactatcctgcaaagctacatctgtaactacctattggctatctatatgagtcctcaagcatctcagactttacatgaataaaactcaacttccttcccattcaaatctgtttattttcttctgtaagagaaagataccatttgagactccagaatctgcctctaactctcaacaagactctgcaattactcaagtatcctttccatcctcattgccctgctgttattacataggccctggttcaagtccttgttacttgttcccattattgcaataacttctaattccaatgccgttgtgtgatcccattttaaacacggccagagcagtcttccaacaacatagctctaatctagtttcatccccacttttacatgcctcagtggctttcccagtgacttggcatggaacacgtcctcagttgccatacattccagctaactcttacccaacctttctttgttcacacagtttccttttccttcctcattgacccatccgcatctctgtttatccaagacttctctgtgatagctgacccttagtctttctctcccctattcctccagactagatcctgtctccttcctgcagccccgacacagccttcagttcatatcttttgcatgatgcttagcaccttctatccctaaggacaacttactcatttgagatttctggcagggtaccttgcatgcagtggacactcagtatttgctgaattaaattccttcctatggatcccttctgattttttttaagtgcctctaatacacatatcattctagggctcatgccacttttaatgtcattttctaaaggaaaatcttatctatgatattttcccttataagagatagttgttttgagtagggttttttaaaagataaaggtagtaggaaattttttaaagcctaaatatcaaattcctttccctttggagttgggggaaggaatgaagggggagcaacttgctctttcatatgagttggtcatagcatgtaagaaccaatcttgaaatatcgttttttttttaatggcttataatgtatttctagaaatactttgtacttaaaatgataacagtttgtatctttttgtccatatatactttataaataaaaaaattagcattgtaaataatgttaatatgtatttatacaaaataaatttactataatata

SEQ ID NO: 7394 - DNA, 725 bp, Homo sapiens
  source 1..725: mol_type = unassigned DNA; mol_type = unassigned DNA
ctaataagtatggcttagattacctgaaaaatcaaccagcaagagtatgtgaacattgtttccaagaactgcagaaattagatcaccagcactcccctaggattggatctcctggaaatcacaaatctccttcaagtgccttatcatcagtcttacatagcattccatcagggaggaaacagaaaaaaatcccagctgctctcaaagaagtatcagcaaacacagaggattcttctatgagtggctacttgtacagatcaaagggcaataaaaaaccctggaaacacttttggtttgtcataaaaaataaagtactatatacatatgctgcaagtgaggtggatagaagcatttcaggaaggcacaatattgtagcagtattggtttcatctcttctgtgattccaaagaggtggaatttcatcagaatggagtaaatgcaattcaaaaattgtataaaaatgaacactgccaagataaagccaaccagacccttcatcaaagaaattgttttgttaggtataagcaatttttaaaaggtgtttgttttttcatttatgttatttattaaaattttgatgtttacttaatggtcagaattatttctgagacacactgaattctaaagtaccatttctttagagaccagaaaaactatcttaatactgtatactgtattaactattcgtgacatagttcacactgttttcttaccttacattgtaa

SEQ ID NO: 7395 - DNA, 2232 bp, Homo sapiens
  source 1..2232: mol_type = unassigned DNA; mol_type = unassigned DNA
gctctgcggggcggtgctagtgctcgcccgcccgaccccggcggctcgcgcccgggagcgccgcagggtcgctagagtcggccgcgtcctttgtgtggcgctcaggctgcgccgcggggcggcgggacggaatgtgggcgctgcgggggcttttctctcctacccgaactgtgggaacaatggactgaaaggggaagatggattgaggggccgagcggggaagcgagctgcaccggggaatcatgacttctgcagccgttcaggagcatcccaggaggaacagaatgatcttggtcttggtgaccttccctctgatgaggaggaaatcatcaacagttctgatgaagatgatgtcagctctgagtcaagtaaaggagagcctgacccactggaagataaacaggatgaagataatggaatgaaaagtaaagttcatcatattgccaaggagatcatgagctcagagaaagtgtttgtggatgtgttaaaacttttgcatattgatttccgggatgcagtagctcatgcttccaggcaacttgggaaaccagtgattgaggaccggattctaaatcagatcctatactacttgcctcagctgtatgagctcaaccgggatctcttgaaggaactggaggaaagaatgttgcactggactgaacaacaaagaattgctgatatctttgtaaagaagggaccatatctaaaaatgtattccacatacatcaaagaatttgataagaatatagccttgctggatgaacagtgcaagaaaaatccaggttttgctgctgttgttagagaatttgagatgagccctcgctgtgctaatctggccctcaagcactacctgctcaagccggttcagaggatcccccagtacaggctgttgctgacagattatttgaagaatctcatagaagatgctggagattacagagacactcaagatgcccttgctgttgttatagaggtagccaaccacgccaatgacaccatgaagcaaggagacaactttcagaaacttatgcaaattcagtacagcttaaatggacaccatgaaattgtgcagcctggtcgggtttttctcaaagaaggaattctgatgaagctgtctcggaaagtgatgcaacctcgaatgtttttcctgtttaatgatgccctgctgtatacaacaccagtgcagtctgggatgtataaactgaacaacatgctctcactggctggaatgaaggtcagaaaacctacccaagaagcctatcagaatgaattaaagattgaaagtgtagaacgttccttcattctctcagccagttctgccacagaaagggatgaatggctagaagcgatttccagggcaatagaagagtatgccaagaaaagaatcaccttctgtcctagtaggagtcttgatgaggcagactcagaaaataaagaagaagttagtcctcttggatcgaaggctcccatctggattcctgataccagagccacaatgtgtatgatctgcacaagcgaattcactctcacctggagacgacaccactgccgggcctgtggaaagattgtatgccaagcttgttcgtctaataagtatggcttagattacctgaaaaatcaaccagcaagagtatgtgaacattgtttccaagaactgcagaaattagatcaccagcactcccctaggattggatctcctggaaatcacaaatctccttcaagtgccttatcatcagtcttacatagcattccatcagggaggaaacagaaaaaaatcccagctgctctcaaagaagtatcagcaaacacagaggattcttctatgagtggctacttgtacagatcaaagggcaataaaaaaccctggaaacacttttggtttgtcataaaaaataaagtactatatacatatgctgcaagtgaggacgtggccgctttggagagtcagcctttattaggattcactgttattcaagttaaagatgagaattccgagtctaaagtatttcagttactgcacaaaaacatgttattttatgtattcaaagcagaggatgctcattcggctcagaagtggatagaagcatttcaggaaggcacaatattgtagcagtattggtttcatctcttctgtgattccaaagaggtggaatttcatcagaatggagtaaatgcaattcaaaaattgtataaaaatgaacactgccaagataaagccaaccagacccttca

SEQ ID NO: 7396 - DNA, 4568 bp, Homo sapiens
  source 1..4568: mol_type = unassigned DNA; mol_type = unassigned DNA
agtgctcgcccgcccgaccccggcggctcgcgcccgggagcgccgcagggtcgctagagtcggccgcgtcctttgtgtggcgctcaggctgcgccgcggggcggcgggacggaatgtgggcgctgcgggggcttttctctcctacccgaactgtgggaacaatggactgaaaggggaagatggattgaggggccgagcggggaagcgagctgcaccggggaatcatgacttctgcagccgagataaagaagccaccagtggcccccaagcccaagtttgttgtggcaaataataagccagccccacctcctattgcacctaaacccgacattgtgatttctagtgttccacagtcgacaaagaaaatgaaaccagcaatagccccaaaaccaaaagtcctgaagacctcacctgttcgagagattgggcagtcgccatcaaggaaaatcatgttgaacctggaagggcataaacaggaattagctgaaagcactgacaactttaattgtaaatatgaaggcaatcagagcaatgattatatttcaccaatgtgttcctgcagttctgagtgtatccataagctgggccatagagagaatttgtgtgtaaagcagcttgttttagagcccctggaaatgaatgaaaatttagaaaacagtaaaattgatgagactttgactataaaaactaggagtaaatgtgatttgtatggtgaaaaagccaagaaccagggtggggttgttttaaaggcaagcgttttagaagaggagctcaaagatgccttaatacaccaaatgccaccttttatttctgcacagaagcacaggcccacagacagcccagaaatgaatggtggctgtaattcaaatggacaattcagaattgaatttgcggatttgtcaccttccccatccagctttgaaaaagttcctgatcatcacagttgccacttacagcttcctagtgatgaatgtgaacattttgaaacttgccaggatgacagtgaaaaaagcaataattgctttcagtcatctgaactagaggctctggaaaatgggaaaaggagtactttaatatcttcagatggagttagtaagaaatcagaagtcaaagaccttggtcccttagaaattcatttagtaccatataccccaaaatttccaactcccaagcccagaaagacacgaactgctcgtctgttacgccaaaagtgtgtagatactcctagtgaaagcactgaagaaccggggaattcagacagtagctcttcctgtcttactgaaaatagtttgaaaatcaataaaatcagtgttctgcatcagaatgttttgtgtaagcaggaacaggtggataaaatgaagctaggaaataaaagtgaattgaatatggaatccaacagtgatgcacaggacttagtcaattcacagaaagccatgtgtaatgaaacaacttcctttgaaaaaatggcaccttcttttgataaagactctaatttgagttctgacagcacaactgtagatggttctagtatgtcgcttgctgtggacgaagggaccggttttataagatgtactgtatctatgagcctgcctaagcagctcaaattaacttgcaatgaacatttgcaatctgggagaaacctgggagtttctgcccctcaaatgcaaaaggaatctgttataaaagaggaaaattctctacgaattgtccccaaaaaacctcaaagacatagcttgcctgctacaggagtgcttaaaaaggctgcctccgaggagcttttggaaaaaagttcttatccttcaagtgaagaaaaaagttcagagaagagtctagaaagaaatcaccttcagcatttgtgtgcccaaaaccgtggtgtgtcatcctcctttgatatgcctaaacgggcttcagaaaagccagtgtggaagttacctcatcctattttacccttttcagggaacccagaattcttaaagtctgtcaccgtatcgtcaaacagtgagccttcaacagccctaaccaagcccagagcaaaatcgttatctgctatggatgtggaaaagtgcactaagccttgcaaagactctacaaagaaaaactcttttaaaaagttgctcagcatgaaactgtccatctgtttcatgaagagtgactttcaaaaattttggtccaagagtagccaactcggagacaccaccacaggccacctctccagtggggagcagaaggggattgaaagtgattggcaaggcttgttggtaggagaggagaagagaagtaaacccatcaaggcatattccacagaaaactatagcctggaatctcaaaagaagaggaagaagtctcggggccagaccagtgcagctaatggtctgagagctgagtctttggatgaccaaatgctctcccgggagtcatcatctcaggcaccttacaagtctgttacaagcctctgtgcaccggagtatgaaaatatacgccattatgaggaaataccagagtacgagaacttgccatttattatggctatacggaaaactcaagagttggaatggcagaattccagcagcatggaggacgctgatgcaaatgtgtatgaggtagaagagccgtatgaagctccagatggccagctgcagcttggacccagacatcagcattccagttcaggagcatcccaggaggaacagaatgatcttggtcttggtgaccttccctctgatgaggaggaaatcatcaacagttctgatgaagatgatgtcagctctgagtcaagtaaaggagagcctgacccactggaagataaacaggatgaagataatggaatgaaaagtaaagttcatcatattgccaaggagatcatgagctcagagaaagtgtttgtggatgtgttaaaacttttgcatattgatttccgggatgcagtagctcatgcttccaggcaacttgggaaaccagtgattgaggaccggattctaaatcagatcctatactacttgcctcagctgtatgagctcaaccgggatctcttgaaggaactggaggaaagaatgttgcactggactgaacaacaaagaattgctgatatctttgtaaagaagggaccatatctaaaaatgtattccacatacatcaaagaatttgataagaatatagccttgctggatgaacagtgcaagaaaaatccaggttttgctgctgttgttagagaatttgagatgagccctcgctgtgctaatctggccctcaagcactacctgctcaagccggttcagaggatcccccagtacaggctgttgctgacagattatttgaagaatctcatagaagatgctggagattacagagacactcaagatgcccttgctgttgttatagaggtagccaaccacgccaatgacaccatgaagcaaggagacaactttcagaaacttatgcaaattcagtacagcttaaatggacaccatgaaattgtgcagcctggtcgggtttttctcaaagaaggaattctgatgaagctgtctcggaaagtgatgcaacctcgaatgtttttcctgtttaatgatgccctgctgtatacaacaccagtgcagtctgggatgtataaactgaacaacatgctctcactggctggaatgaaggtcagaaaacctacccaagaagcctatcagaatgaattaaagattgaaagtgtagaacgttccttcattctctcagccagttctgccacagaaagggatgaatggctagaagcgatttccagggcaatagaagagtatgccaagaaaagaatcaccttctgtcctagtaggagtcttgatgaggcagactcagaaaataaagaagaagttagtcctcttggatcgaaggctcccatctggattcctgataccagagccacaatgtgtatgatctgcacaagcgaattcactctcacctggagacgacaccactgccgggcctgtggaaagattgtatgccaagcttgttcgtctaataagtatggcttagattacctgaaaaatcaaccagcaagagtatgtgaacattgtttccaagaactgcagaaattagatcaccagcactcccctaggattggatctcctggaaatcacaaatctccttcaagtgccttatcatcagtcttacatagcattccatcagggaggaaacagaaaaaaatcccagctgctctcaaagaagtatcagcaaacacagaggattcttctatgagtggctacttgtacagatcaaagggcaataaaaaaccctggaaacacttttggtttgtcataaaaaataaagtactatatacatatgctgcaagtgaggtaagatctgaaatctaaagatgagtaatttggggttttgtaatgccaactgcaagtaattacaatattttaaaaatccatttattttacataagattttttgctttgcttttggatgggggaggtgttgttgctgttatttttaatgtgaacagtgttcttgctttgtacctggagagctctttctcaaatgtgttaggaattttccatattattaaaatgcaatttttgtgtgtg

SEQ ID NO: 7397 - DNA, 904 bp, Homo sapiens
  source 1..904: mol_type = unassigned DNA; mol_type = unassigned DNA
agttactggggcagctactggtttcctgttcctcccatctgactcagggtgatcagtcacattcttatgctgcagttaaggccccaggtgattcttaactgtttaaggagatccaggccctgctctctttgccaagattatttgaagaatctcatagaagatgctggagattacagagacactcaagatgcccttgctgttgttatagaggtagccaaccacgccaatgacaccatgaagcaaggagacaactttcagaaacttatgcaaattcagtacagcttaaatggacaccatgaaattgtgcagcctggtcgggtttttctcaaagaaggaattctgatgaagctgtctcggaaagtgatgcaacctcgaatgtttttcctgtttaatgatgccctgctgtatacaacaccagtgcagtctgggatgtataaactgaacaacatgctctcactggctggaatgaaggtcagaaaacctacccaagaagcctatcagaatgaattaaagattgaaagtgtagaacgttccttcattctctcagccagttctgccacagaaagggatgaatggctagaagcgatttccagggcaatagaagagtatgccaagaaaagaatcaccttctgtcctagtaggagtcttgatgaggcagactcagaaaataaagaagaagttagtcctcttggatcgaaggctcccatctggattcctgataccagagccacaatgtgtatgatctgcacaagcgaattcactctcacctggagacgacaccactgccgggcctgtggaaagattgtatgccaagcttgttcgtctaataagtatggcttagattacctgaaaaatcaaccagcaagagtatgtgaacattgtttccaagaactgcagaaattag

SEQ ID NO: 7398 - DNA, 3757 bp, Homo sapiens
  source 1..3757: mol_type = unassigned DNA; mol_type = unassigned DNA
aggctgcgccgcggggcggcgggacggaatgtgggcgctgcgggggcttttctctcctacccgaactgtgggaacaatggactgaaaggggaagatggattgaggggccgagcggggaagcgagctgcaccggggaatcatgacttctgcagccgagataaagaagccaccagtggcccccaagcccaagtttgttgtggcaaataataagccagccccacctcctattgcacctaaacccgacattgtgatttctagtgttccacagtcgacaaagaaaatgaaaccagcaatagccccaaaaccaaaagtcctgaagacctcacctgttcgagagattgggcagtcgccatcaaggaaaatcatgttgaacctggaagggcataaacaggaattagctgaaagcactgacaactttaattgtaaatatgaaggcaatcagagcaatgattatatttcaccaatgtgttcctgcagttctgagtgtatccataagctgggccatagagagaatttgtgtgtaaagcagcttgttttagagcccctggaaatgaatgaaaatttagaaaacagtaaaattgatgagactttgactataaaaactaggagtaaatgtgatttgtatggtgaaaaagccaagaaccagggtggggttgttttaaaggcaagcgttttagaagaggagctcaaagatgccttaatacaccaaatgccaccttttatttctgcacagaagcacaggcccacagacagcccagaaatgaatggtggctgtaattcaaatggacaattcagaattgaatttgcggatttgtcaccttccccatccagctttgaaaaagttcctgatcatcacagttgccacttacagcttcctagtgatgaatgtgaacattttgaaacttgccaggatgacagtgaaaaaagcaataattgctttcagtcatctgaactagaggctctggaaaatgggaaaaggagtactttaatatcttcagatggagttagtaagaaatcagaagtcaaagaccttggtcccttagaaattcatttagtaccatataccccaaaatttccaactcccaagcccagaaagacacgaactgctcgtctgttacgccaaaagtgtgtagatactcctagtgaaagcactgaagaaccggggaattcagacagtagctcttcctgtcttactgaaaatagtttgaaaatcaataaaatcagtgttctgcatcagaatgttttgtgtaagcaggaacaggtggataaaatgaagctaggaaataaaagtgaattgaatatggaatccaacagtgatgcacaggacttagtcaattcacagaaagccatgtgtaatgaaacaacttcctttgaaaaaatggcaccttcttttgataaagactctaatttgagttctgacagcacaactgtagatggttctagtatgtcgcttgctgtggacgaagggaccggttttataagatgtactgtatctatgagcctgcctaagcagctcaaattaacttgcaatgaacatttgcaatctgggagaaacctgggagtttctgcccctcaaatgcaaaaggaatctgttataaaagaggaaaattctctacgaattgtccccaaaaaacctcaaagacatagcttgcctgctacaggagtgcttaaaaaggctgcctccgaggagcttttggaaaaaagttcttatccttcaagtgaagaaaaaagttcagagaagagtctagaaagaaatcaccttcagcatttgtgtgcccaaaaccgtggtgtgtcatcctcctttgatatgcctaaacgggcttcagaaaagccagtgtggaagttacctcatcctattttacccttttcagggaacccagaattcttaaagtctgtcaccgtatcgtcaaacagtgagccttcaacagccctaaccaagcccagagcaaaatcgttatctgctatggatgtggaaaagtgcactaagccttgcaaagactctacaaagaaaaactcttttaaaaagttgctcagcatgaaactgtccatctgtttcatgaagagtgactttcaaaaattttggtccaagagtagccaactcggagacaccaccacaggccacctctccagtggggagcagaaggggattgaaagtgattggcaaggcttgttggtaggagaggagaagagaagtaaacccatcaaggcatattccacagaaaactatagcctggaatctcaaaagaagaggaagaagtctcggggccagaccagtgcagctaatggtctgagagctgagtctttggatgaccaaatgctctcccgggagtcatcatctcaggcaccttacaagtctgttacaagcctctgtgcaccggagtatgaaaatatacgccattatgaggaaataccagagtacgagaacttgccatttattatggctatacggaaaactcaagagttggaatggcagaattccagcagcatggaggacgctgatgcaaatgtgtatgaggtagaagagccgtatgaagctccagatggccagctgcagcttggacccagacatcagcattccagttcaggagcatcccaggaggaacagaatgatcttggtcttggtgaccttccctctgatgaggaggaaatcatcaacagttctgatgaagatgatgtcagctctgagtcaagtaaaggagagcctgacccactggaagataaacaggatgaagataatggaatgaaaagtaaagttcatcatattgccaaggagatcatgagctcagagaaagtgtttgtggatgtgttaaaacttttgcatattgatttccgggatgcagtagctcatgcttccaggcaacttgggaaaccagtgattgaggaccggattctaaatcagatcctatactacttgcctcagctgtatgagctcaaccgggatctcttgaaggaactggaggaaagaatgttgcactggactgaacaacaaagaattgctgatatctttgtaaagaagggaccatatctaaaaatgtattccacatacatcaaagaatttgataagaatatagccttgctggatgaacagtgcaagaaaaatccaggttttgctgctgttgttagagaatttgagatgagccctcgctgtgctaatctggccctcaagcactacctgctcaagccggttcagaggatcccccagtacaggctgttgctgacagattatttgaagaatctcatagaagatgctggagattacagagacactcaagatgcccttgctgttgttatagaggtagccaaccacgccaatgacaccatgaagcaaggagacaactttcagaaacttatgcaaattcagtacagcttaaatggacaccatgaaattgtgcagcctggtcgggtttttctcaaagaaggaattctgatgaagctgtctcggaaagtgatgcaacctcgaatgtttttcctgtttaatgatgccctgctgtatacaacaccagtgcagtctgggatgtataaactgaacaacatgctctcactggctggaatgaaggtcagaaaacctacccaagaagcctatcagaatgaattaaagattgaaagtgtagaacgttccttcattctctcagccagttctgccacagaaagggatgaatggctagaagcgatttccagggcaatagaagagtatgccaagaaaagaatcaccttctgtcctagtaggagtcttgatgaggcagactcagaaaataaa

SEQ ID NO: 7399 - DNA, 479 bp, Homo sapiens
  source 1..479: mol_type = unassigned DNA; mol_type = unassigned DNA
atggcagaattccagcagcatggaggacgctgatgcaaatgtgtatgaggtagaagagccgtatgaagctccagatggccagctgcagcttggacccagacatcagcattccagggtctcgctctgtcaacccaggttggagtgcagtggcaagatcacagctcactgcagcctcaacctcccagacttagagatggggcttcaccatgttgccaaggctggtctcgaactctgggctcaagcgatcctccctcatcggcttcccaaagtgctgggattacagacgtgagccactgcacccagctagattgactcttgatagcagtgattctaagcagctttaattcttattgagccctcacagtgttaagaagcaaaaacattttttgtgtgctcttttgtactctacaaattaatgtcttctctgcctggtctttgaaatcttggccccagtaaatatctgtgctggctatgcagct

SEQ ID NO: 7400 - DNA, 19519 bp, Homo sapiens
  source 1..19519: mol_type = unassigned DNA; mol_type = unassigned DNA
gtgccgcgcccagagcagcagcaacagcgaagatgcgaggccattacctgtttgatccctgtcggaaacctggcacgggccaacttttcccgattatcacgccaagaagttgcaaggactagtcgaagactcggaggggccagggcgagggcgcgctcccccgcgcgctgcctcgtccctcctccgtccggccgcccgagctcccggcctctctcccgcccgcgctcactccctccgcccgcctccctcctctggcccccatcagaagggcaacagggcgagggggtccggcgaaattcggaccggagcagctggacatgcacggtgtccgccgggcgcaggggccgaccacacgcagtcgcgcagttcagcatccgcgtgccagtctcgcccgcgatcccgggcccggggctgtggcgtcgactccgacccaggcagccagcagcccgcgcgggagccggaccgccgccggaggagctcggacggcatgctgagccccctccttggctgaagcccgagtgcggagaagcccgggcaaacgcaggctaaggagaccaaagcggcgaagtcgcgagacagcggacaagcagcggaggagaaggaggaggaggcgaacccagagaggggcagcaaaagaagcggtggtggtgggcgtcgtggccatggcggcggctatcgccagctcgctcatccgtcagaagaggcaagcccgcgagcgcgagaaatccaacgcctgcaagtgtgtcagcagccccagcaaaggcaagaccagctgcgacaaaaacaagttaaatgtcttttcccgggtcaaactcttcggctccaagaagaggcgcagaagaagaccagagcctcagcttaagggtatagttaccaagctatacagccgacaaggctaccacttgcagctgcaggcggatggaaccattgatggcaccaaagatgaggacagcacttacactctgtttaacctcatccctgtgggtctgcgagtggtggctatccaaggagttcaaaccaagctgtacttggcaatgaacagtgagggatacttgtacacctcggaacttttcacacctgagtgcaaattcaaagaatcagtgtttgaaaattattatgtgacatattcatcaatgatataccgtcagcagcagtcaggccgagggtggtatctgggtctgaacaaagaaggagagatcatgaaaggcaaccatgtgaagaagaacaagcctgcagctcattttctgcctaaaccactgaaagtggccatgtacaaggagccatcactgcacgatctcacggagttctcccgatctggaagcgggaccccaaccaagagcagaagtgtctctggcgtgctgaacggaggcaaatccatgagccacaatgaatcaacgtagccagtgagggcaaaagaagggctctgtaacagaaccttacctccaggtgctgttgaattcttctagcagtccttcacccaaaagttcaaatttgtcagtgacatttaccaaacaaacaggcagagttcactattctatctgccattagaccttcttatcatccatactaaagccccattatttagattgagcttgtgcataagaatgccaagcattttagtgaactaaatctgagagaaggactgccaaattttctcatgatctcacctatactttggggatgataatccaaaagtatttcacagcactaatgctgatcaaaatttgctctcccaccaagaaaatgtaaaagaccacaattgttcttcaaaaacaaacaaaacaaaacaaaacaaaattaactgcttaaatgttttgtcggggcaaacaaaattatgtgaattgtgttgttttcttggcttgatgttttctatctacgcttgattcacatgtactcttttctttggcatagtgcaactttatgatttctgaaattcaatggttctattgactttttgcgtcacttaatccaaatcaaccaaattcagggttgaatctgaattggcttctcaggctcaaggtaacagtgttcttgtggtttgaccaattgtttttctttctttttttttttttttagatttgtggtattctggtcaagttattgtgctgtactttgtgcgtagaaattgagttgtattgtcaaccccagtcagtaaagagaacttcaaaaaattatcctcaagtgtagatttctcttaattccatttgtgtatcatgttaaactattgttgtggcttcttgtgtaaagacaggaactgtggaactgtgatgttgtcttttgtgttgttaaaataagaaatgtcttatctgtatatgtatgagtcttcctgtcattgtatttggcacatgaatattgtgtacaaggaattgttaagactggttttccctcaacaacatatattatacttgctactggaaaagtgtttaagacttagctaggtttccatttagatcttcatatctgttgcatggaagaaagttgggttcttggcatagagttgcatgatatgtaagattttgtgcattcataattgttaaaaatctgtgttccaaaagtggacatagcatgtacaggcagttttctgtcctgtgcacaaaaagtttaaaaaagttgtttaatatttgttgttgtatacccaaatacgcaccgaataaactctttatattcattcaaagaataatcttccaacatgtatttattgagcgtccattatgtgccagtaactgaagtagcaactggaagtaaacattgtataatgcagataaggtcactgtcctcagatagtctacagtctagagagtcatattaacatgaacactttaaagtgtgtttattttactagttactgtacttgcacttcagattggtacaaaggaattcacattcccgttcagtagtcaaattatacaaatgaggcgtttgtgctagtattttctctgccactcacagtgtcatttcccctctctgttgcttatttctctcctctctagagggaatacacaggactaaatagtgtcctttctacctttgagaactgaaggaaaatgtaaatttttttaaatgttgatgacttttctctagctccccaaagctgcattgtctggcaatgaacactttgagaacagtcaatacagatggtctctgacttacagtagttcaacttacattttttcgggggctttacagtggtacagaagcaataggcatttagtagaactcatactttaccatacaaccattttgctttttatttccagtacactattcaataaatgacatgagctattcaacactttttaattacaaaatttgctttgtagtacatgattttgtccaactgtaagctaatataagcgttctaagcacatttaaagtaggctaggctaagctatgatgtttgctaggttaggtgtattaaatgcattttcaacttaagatgggtttattggtatgtgacccccatcgtaagtgaaggatcatctgtatatggagggaagaattgtgaaatacataaaacgtagttgactagtgcttttcagagcatctgcaaataaaattactggggccccaaacagcctgcttttgcaaggaggggagactcctcatttctaagatgtttggaccagattcagcatgagctcctatccctgcccaccccagcccagtctaagtcaccttgtaatttcatgagataagtcctcctcatcctgcttcatcctgcctgagctctaaacacacctacatgaggtacgctcacctgcctagctatcttggatgcaggatcctttgtaccatgttttaaaaatcaggagatgctcactcaaccacctctccctattaactcttactaattttcaatcagtagggaaaagtagtgcattgtctccctctttctctaagaactttaaagtttggtcactgactacttcagttgctggtcttgctttttctgttgttcagaaatagtgtaggtctgctggtagtaagcaaattagcactatgtgggtctcagggatgcctgcgttaataggatggagtcaaaatgcccaggaagaatcctttacccccagcattctttttgagctgccttaaagttgctttaaacagacagtggtgttaaaataaattaataagtaaataaatagtcctcaaaccttcctacaagtgatgatatcaatactttcacacatcttcattacacacacacatacacacacaccctttcccaccccatcccctcatgcacatcctttagtagcattcctcctggcagaaaatactagtcctgccacataactgatgaaagaaaaaaagactctagtcaaatagttgtgggaaacacttcaaatactattgggtctcagatattagctcacatcagaatcacctggaaggcttgtaagactcagatcactggacttcaccttcagagtttctgattgagtgagtcttgtgtgggcccaaaacttggcatttctaacaagtttccaggtgatgctgaggctgttgatcctcgggactttgagaaccactggtattagttcattctcacgctgctataaagatactacctgagactgggtaatttataaaggaaagaggtttaattgactcacagttctgcatggctggggaggcctcaggaaacttaccatcatggcagaagatgaaggggaagcaaggaccttttccacgtggcagcaggagagagaatgggaaagcgccacttatcaaacagatttagtgagaacttcctcactatatgagacagcatggggaaaccgccccgaggatccaatcacctcccaccaggtccctccctcaacacattgggattacaactctaaatgagatttaggtggggacacagagccaaaccatatcacactggcatacactattcctttcttcaggattagcgtgcattagcaaattaatttctgaaaagtcttgtgttaaagaaatctgtttaacttttacaaatgctgagacaaacttattgggccacaaagccacattttcatggagcgtctattaacattgcagtagagtggtagtcctcaagctttttatgtgtacctgaatcacctgtggtgttttatatgcttcttttgttttaagcttggcctgggaatctcctgaatctgatacctactgttctatgccacagcacttaatgtcagtgttctatggcatggcacttaatgtcagttttccaccccatctgtgaacgtgtattcaatcattatactgtatttagcctgagaatgaatatggaaaagaaaacaacactttcttcaggctttttgcaactttttaaaagcaaaacaggctccaattccccctcccaggagttttgtttgtatccaaagagaggacatgctcattgccatggaatccttaaaggactgagagggaagtgatctgtggcactcctcccctccctaaccagtacatttgttccagttttaagccagtcaagctcaccgaagagtttttcaaagaccttagctacatggatttaactttaccaagcatccattgtccaaatgaacatatgagggaaaatgaatatctcttcatctacatcagctgaccataactatgctgtggataaggggtggtgggatcagaactgataaccattttcaacaaatttcatacgaatgtgtcttagaagcctcatttagatgcgatgtcattcatgggtaaaattgaaatgtgccttcactggcagagtctttaacaatctctgcaagacaatctacgcttttttctattgtttctgaaaatcctttcaacctctattcaaagccattttctcactttagaaattgattacagcagggctgtgattgtcagtacaaaaatctgtacagggatatggcagtggtataatagatgaccatttccaattataaaacaattagcaaagtatagctaggtcaggccactagtacccttcaaattcttaaccatatttacaaagacagcttttcataacttttattgctctgtccacaaagatgtggtctcatggtttcacacgattgagaatgctacaagtaatagtatactgaaaagaacatgtctctaattctggactgctctttatctccaagaaacagagagagagagaatgaaaaaaaatcccagcttagaggaattttggaagttactctttcatgaaccatcacattttctgggcctttgtaatctttaaacactgttactctttagaggttggtttgaatttgttgcacagagaacaataatctatgacaaattaatgaacccttttgctaatatcacatgagtacaagtatcttgtatttctcatcacatttaccgtaataaagaatgcagacaagtataatacatggcatcattttggggattttccaatttctatgtgggcatactggaagaagtttgtaacagttgcaattctgtcacaatgcaggaagtctttctagaacacacaatgtggatgattttcagttttagaattgtaaactaaccaaatgtcaattcagtttctcattttatattagtttttgttacaaacactgcctatttctcttttgtacaaacacttcacacacacacacacacacacgcgcacacacacacacacacacacacacacacaggcacacacacactagatgggcctccaaaagaactcagagctgctgtcttcctctgggaggttgatcatatgtctattcagttgggagaatggagcagtcaagttcaaaatccatgtggctctctggcttcagaagctatcctttcagctatgacacacacactaaatagtattgcccaggtttgccctacaacatgttagcatatctacatattttgtactgtaataatgtgtacgctcttaataatttgtttttaatgctgtgtaaagttagcaattagagtaagagaaacgtatgggataatgattgagtaaaatctcagctccttttgagtcaatcactcagcttgttggcacagtagatatttatgaccttaaatactgtcagcgcttcacagcacattactgaggcctggataaagcattcacacaaagataaatggattgaaactgtgtcaattttgtagaaaaagatattctggggtttagtaacagagaatttttctttccttactgcgattaataaagtggaactccaattgcaagtaactattcagttttatgttcttcacatatggaaacctctctgtcactaataccctgggacaaactggatgattaccatccaagtgttattttcttcctcgaaaatttcaaaaccagaatgaattagttctccaagtctggctatactatagttttcttcttaatgtaaaacagctgaataaaacagcttgaacaatatttgactttcatgggtcttaagaacgtttcaaaatacaccaccaatatatttaccaacatatttagtgccagatatacacagaacaaacactaccctattgtttctgtgtgcgtgtgtgtgtgtctgtgtctgtgtgtgtgtgtagcaggacactaaataaacaagtcatgttgctgttcttagggaagttttggtaaagagagcttcaaagttccttggagtcacctgcaaggctaactgtactaaaagcggaatttgcatgatctttctacaaactctcagtgtaaagtggtagatagacatgcaagcatcacacttagattgcaataaatgctgtgatgtaaaaaatacaatggaggaaaaatttttgattagggaaatttaaacattttcaaagaagagttaatgtttcagtggagtcttaaaagatgagtaggaattcaacagccagaagggaagtgtagacgctctgtgtcacataaaacaaaacagaacagaatagtataagtgaaggcatagagcttcacatgaaaggcacatgaaatagcactgggtatctctaaaatattaattagcctagtgtagctggacaatgaggggcagagcccctggtatgcaagtgatgtctgggaaaggagcaatctttctacagtgcctcattccatcatacctcattaccagaaaaacattatgagccacttaggcctgtattatttgagcatctctgaaatggagttgctctacatgttttgtagaaacctaatgagtaatttattctcatcagtagacaaaatgaaagaaagaaaatagactctgagcaaagtatgattcacaaccttgcctattaggctatagaagattgccctactaattcctccttttcgtctgttgaacaatctgtattttgcctgctcaaaaaggaattcctcaagttataggggcagtttgaccagtacaatcatatcagaaaaaaatcagcaaaattatgttctaacaacatcttcccatctaaagtgcacattttatttttttaaggtaacataattactacgaacaaccgaaatggtatataaaggtgaaaaattaaaataattttttttacagctccacgttacctcaccccctagaccctggtaaccaccattcaactctctgtttccattagttcaactttttaagattctttttatacaaaggatgtcatgtagcatttttttcttttttcatctggcttatttcacttagtttgcttatttcaacgtgctctgaagtttcatccatgtttatgtaaatggaaggagctccctctttatatggctaagatatatatatatattatattatatatatatatgtatatatatatattatatatatatatgtatatatatataattttctttcttcattcatctgtccgtgggcacttaggttgttccataacttatctattgtgaataatggtgcaatgggaatgaatgggagtgcagatgtctgtttggcatactgatttaatttcctttggatatataaccagaagtgggaatgctggatcatacagtagttctatttttacttttatgaggatctccatactgttttacataatggcttactaatttacattcccataaacagtgtacaagaatacctccttgccaacacattatcttttaagttttggataatattattcctattaataacatgtgtgatattacattgtggttttgatttgcatttcccttatgattaatgatgttaagtaccttttcagatatatgttggccatttgtatgtcttccttggagagatgtctattcagctccttggtccatttttcaaaatacagtttacttgtatttttgctattgacttgtatgagttccttatatattttggatattaaccccttatgagaaatatggtttgcaaatattttctcctattctgcaggttgccttttcgttttgtcgattatttcctttgctgggcagataatttttttattttattttttgaaacagtgtctcactctgtcacccaggctggagtgcagtggtgtgatcatgtctcaccacagccttgacctccccaggatcaggtgatcctcccacctcagtttttgtatttttagtagagatggagtttcaccctgttgcccaggctggtctaaaactcctgggctcaagccatcttgcccaccttgggacctcccaaagtgttaggattagaggcatgggccaccatgcctggctttgaaactttttaatttaatgtagtctgacttgtttatttttactttgttgcatgtgcttttggtgttacagccaaaaaagttattgccaagaccaatgccatagacattatttcttattctagtaattttacaattttaggtcttatgtttaagtttttaatcgattttgagttgatttttgtgtatggtataggataaaggtccaatttcattattttgtatttggatattcaatgtttaaaatacgatttattgaatggactatatttccccatgatgtgtttttagtgcctttgttgaagatttgttgatcatatatgtgtggatttgtttcttggctttctattctgttccattggtctatgtgtctgcttctatgccaataccatactgttttgattactatagctttacaatataatttgaaatcaggaaatgttctaaacttctttctcaagattgttttagatctttggggacttaggtggttccataaggttttaagaattttttttctatttctgtaaaaaattatattaagattttgatagtgcttgcattgactctgtagatcactttggttagtatcaacatttttgcaaaattaattcttccaaactatgaacacaggatactgttgcacttatttctcttcttcaattcctttcatcagtatcttatagtttttaatgtacagatttttcacctccttggttaaacttattcctaagtacattttcctttttgatgcaattgcaaatgggattgtttttctaatttattttattttgtttgtttgtttgtttgtttgtttttgagatggagtcttgctctgtcacccaggctggagtgcagtggtgtgatcttggctcaccacaacctctgcctcccgagttaaagggattctcttgcctcagcctcccgagtagctgggattataggcgcctaccaccatgcctggctaatttttgtatttttagtagatagagatggggtttcaccatgttggccaggctagtctcaaactcctgacctcaggtgatccaccttcctcggcctcccaaagcgctgggattacaggcgtgagccactgcacccagccactaatttattttttggatagttcattgttagtgtacagaaacaactgattttttatgttgattttgtatcaacattggtgaattccacccaacatttgaggaaaaactaataccaatccttctcaaaatcttccaaaaaaatgaagaggaaggagcacttccaaactcattttatgaagccagcattattctcataccattccagacaaggacactacaagaaaaaaaattacaggcccaaatccctgttgaacatagatgcaaaaatccacaacaaaatactagctaaaagaacttaacatcacatttaaaggatcattcaccataatcaagtgggatttcaccaatttcacttgggtagaattcaccaatgttgataaaaaaatcaacataaaaatcagttgtttcttcacacgaacaatgaactatccaaaaaataaagaacacaatcccatttgcaattgcaaaaaaatacttagaaataaatttagcaaaggaggtgaaagatctttatattaaaaactataaaatattgatgaaagtaattgaagaagacaaatggaacagatccctttgttcatagattggaagaattaatattacagaaatgttaatactaactaaagtgatctacagagtcaatgcaagccctatcaaaatcttaatcgaatcttttacagaaataaaaaaaaattctaaaattcatatggcaccacataagtccccaaaaatctttacaacttcactgaatttatttatcacttctaacatttttctgttggagtcattgggtttctgtattgaagagcatgtgatttgaaacagaccattttacttcttccgtcctgatttgcatgcattttatttctttttctcgacttattgctctaagcagaacttcaagtaccatgtggaatagaagtggcaagagtgagcattctcttcttcatcctgatttcagaagaaaagctttcagcatttcactactgactatcacgttagatgtgagtttgtcatatatatggcctttgttatatttagggatattccttctctacctaatgttttgaatgttttcatcatgaaagggtgttgattttttttcaaatgccttttctgtatctgttaaaatgatcatatgattattatccttcattgtcttattgttcatatttattgatttgagtatgttgagccatccttttatcccagggataactctcacttgattatggtgaatgatctttttaatgtgatgttaagttcttttagctagtattttgttgtggatttttgcatctatgttcaacagggatttgggactgtattccttttttttcttgtagtgtccttgcctggctttggtaggagaataatgctggtttcatagaaaaatgagtttagaagtgttcctcactcttcttttttttttggaagatttgagaaggattgatattagattttctttaaatgttgggtagaattcaccactgaagccatctggttctgggctttactttgttgggaagttcttttttaaaaaattgctgattcaatattctttttcattattgctctctacagattctctattcatgattcagtcttgctaggttgtggtatgtttctagaaatttatctgtttcttctagattacccaacttgtgtataattgttcataatagtctctaatgatcatttatatttctatggtatcagttgtaatgtcttctctttcatttctgattttatttgtttatgtcttttctctttcactctcagttactctagctaaaggcttgtctgttttttaatcttttcaaaaaacaactcagttttattgctcttttttatttttctagtttctatttcacttttttctgttctgatatttacttcattccttcttccgactttgggattagtttatggttcttttatagttccttgaggtgtaaagttaggtcgtttatttgattttttttttcttaatgtaggcatttatcactataaacttccttcttagaaatgccttttgctgcatcccatatattttggtatgttgtttttccacttttgtttgtctcaagttttttaaatttttcttttgatttgctctttgattctttggctatttaggagtgtattgtttaattttacagttttcctccctttactgatttccagtttcttagcattgtggtcagaaaagatatttggtatgatttcaatcttcttagttttgttaacacttgttttgtggcctaacagttgatgtatcttcaaaatgtacctgcgcaattacttgggacgaatgtacattctattgcttttggagggaatgttttgtatctgttaggtccatttggtctaaagtgtagttcaagtcaattccctattgattttctgtctgggtgatctgtccattgttgaaagctgggtatcaaagtcttctactactatactattacagtctatatttcctgttcatatctattaatacctgctttatatatttaggtgatccaatgttgggtgtgtatatattcaaaattgcatcttgttgatgaattgactcatttatttttatataatggcattctttgtctcttgttacagtttgtgactttaagtctgttttgtctgatatagtataggtgtctctgcttctttctggtttctatttacatgcaatatctttttaatctcttcactttcagtttatacgtgtccttgcagctaaagtgactatcttatagatagcaagtacttagttcttcctttttcatccattcagccactcactgtcttttgattagagaatttaatctacttacattaaaattaattatttataggtaaagacatactattgctactttgttaaatgtttttcagctgttttgtaagtttttttgtttctttcttcctctcttgctgtctttctttgtgattgatgattttcctgtagtactatggtttgatttctttttttttaataatttttatttttattttaagttccagggtacatgtgcaggatatgcaggtttgttacataggtaaacatgtgccatggtggtttgctgcaccttcaacccatcactgaggtgttcagccaagcatgcattagctatttttcctaatagtatctctccccacaccccaccccccttgacaggccccagtgtgtattgttcccctccctgtgtccatgtgttctcatgttcagctctcacttataagtgagaatacgcagtgtttggttttctgttcctgcaatagcttgctaagaataatggcttccagcgccatgtgtgtccctgaaaatgacatgatctcattcctttttatggctgcatagtatcccatggtgtatatgtgccacattttctttatccactgtatcattgatgggcatttgggttgattccacatctttgctcttttgaacagtgctgcagtgaacatatgcgtgcatgtatctttgtaatagaatgatttatattcctttgggtatatacctagtaatgggattgctgggtcaaatgttatttctggttctagatctcggagaaatcaccacactgtcttccacaatgtttgaactaatttactttcccaccagcagtgtaaaagtgttcctatttctctgcaaccttgccagcatctgtcattttttgactttttaataatcaccattgtgactggcatgagatggtatctccttgtggttctgatttgcatttctttaatgatcagtgatgttgaacttttttcatatgttcgttggcctcatgaatgtctttttttgagaagtgtctgttcatgtcctttgcccactttttgatgcggttttttttttcttgtatatttgcttaaattccttgtagattctggatattagaccgttgtcagatggatagattgcaaaaattttctcccactctgtaggttgcatgttcactgtgatagtttctgtctttctttctttttatattatacttgaagttctggggtacatgtgcagaatgtgcaggtttgttacataggtatgcacgtgccatggtggtttgctgcacccatcaacccgtcatctatattaagtgtttctcctaatgctttgacttcattatttctttcatttgattgagtatgctgtggatgttttctgttacttttttaattttattcattgtattcttcagcttcagaatttgtttgtttgtttgtttgtttgtttttcacagtttctatctctttgttgaacttattattttggtcatacattgttttcctgattctactgacttctttgtctgtgttctcatgtagcaacccaagcttatttaaaacaattatttttaatattttgtcaggaaatttgtagatctccatttttttttgttggcaactggaaaattactgagtttcttcggtggtattatttttgtgttgtttttggcaggtgttccttgaaatctcgtgttgccatgttcacatttgaagaagtagtctcctccttcagcctatactgactggcttcagaagagaaacagttataccagttagcctgactggggatactaagactcttgcacatcttttctgtagatgtgtcactcaagctctttttgagaaattttaagatcatctgtattttcttaatttcataaaaccaaaccaaattctgagagtttcccatttgttttctctaacgtggtgccctgaagtgctcaagtttttgtgccttctcccattcccacagagtcaagctgcctgcttctgcatgcacacaagttcacactcgctgtcagggtttgggccgtgtgcagggagcaagccaaggtagaggagagagggagacatgcaaagttttgggagcacccatgtgtcagcttcgggggtttacagttcaggcatcccaagccactagtgggtgggcctcctgatggagtctgtgaagttgttagtagtatatgtgtccttttgttgaatttccagtctctggttgctgtgagcccctaccgctgttccctgctcacagcctctcagtcactcagacatgatgatcccctcagtattctgagtggggatagaaagaagtaggcctcttggtcagtgtcccacgtggctaggaaagccaggcattcatttactacactctccctttcacccaatggagaaatcatgagtcaaagttgtatctcttggtgttgagttctgctagcttgagagacggttgacataagtagtgaaactattttctggttcttttcaatgtgcctattctcgtaattgttttgctccatctgtgagctggactaccagactcccacaaaggtactctcatacttgagtggttgtcaaaattgtagatagtggggaaatgacaggagaaaattcctgttctgccatcttgctgacatcaccccaatatctaaaatgcatattttaattatttttttccttgaataaagtttattttggaattgttgagttttacaaaataatttaaaatattctctctctctctctctctctctggggttgaggtctcactctgtcacccaggatggattacagtggcacaatcgcagctcactgcagcctcgaatttcttgggtcaagtgatcctcccacttcagcctcccaagtagctgggactacaaggcgtgtgccaccatgcccagctaatatttttacattttttgtagagatggggtctcactatgttgcccaggtgggtcttgaactcctggcatcatgtggtcctcccacctccacctcccaagtcctgaggataccaattgtgagtcactgtgcccagctatccccttctcactctctttttctctcacacacatgtgtgcatgcacagacacacacacctcatgttcattctctttaccatgatgatccttggttcttttacacagcttctttcagtttaccttacaatttagctcaacacaaattttaaaaaacttatagttacaatttaatttggcttggtccacacctctaacaaatttgatacaatctccaacttacggttgcaagttagttgattatattcacttccaagtatttcccccaacatttcattatgaaaatatatccatcaattaatgctcttatctataaaataattatttttttgcatttcaaaataagttacagacatcaatgcacttcatctttaaaccctttatcatgcatatcaggaagtagagtttaatatttctatatttcttgggggagaaatggagctaaaattatatactgtatcatatacaaacctgttaggtatatcaattcatgtgtattgacaaatgcgtgcaccatgtaacagaaactcctttcaagatatagaatattcctatcactacaaatattaatcaccaaaacaatggggagaatgtctctagggcatgtcagagaccttcactgcagcctctcccattataggccaggaggccttgaaggaaaaaaatggtttagtgggccaggcctcaggcacccccccttgctctttgcagccttgaaacatggtaccctgcgtccccagctgcttcagcttcagctgtggctaaaaggggccaacatacagctcaggccattgtttcagagagtgcaatccccaagctttggcagcttacacatggtgttgggcttgcaggagcacagaagtcaagaattgaggtttgggaacctctgcctagatttcagaggatgtatggaaatgcctggatgtccagacagaagtctgctgcaggggtagagctctcagggagaacctctgctagggcagtgcagaagggaaatgtggggttggagctcccccacagagtcttcactggggcactgtatagtggagctctgagaagagggccatagtcctccagaccccagaatggtagatccaccaatagcttgcaccatgcacctggaaaagccactggcactcaacaccagcccatgaaaagagctgtgagggtggctgcatcctgcaaagccacaggggaagagctgcccaaggctgtgggagcccaccccttgcatcattgtgacctggatagatgtgagacatggagcctaaggagatcattttggaactttaagctttaacgactgccctattggattttggacttgcatgggcctatagcccctttgttttggccaacttctcccatttggaatgggtatttttactcaattcctgtacccccattgtatcttggaaataactaacttgctttagattttacaggcttataggtggaagggacttgctttgtctcagatgagactttggacttggacttctgggttaatgtttgaatgagttaatactttgggggactattggaagggcatgattgtgttttgaaatgtgagaacatgagatttgggaggaactagggtcagaatgatatggtttggttttgtgttcccacccaaatctctccttgaattgtaataatccccatgtgtcaggggtgggaccaggtggaggactgaatcatgggggtggtttccctcatgctattctcatgatagtgatttataacagatccaatggttttataagcatctggcatttcccctgctggcactcattctctctcctgccaccctgtgaagaggggccttccaccatgattgtaagtctcctgaggcctccgaagccatgcggaactgtgagtcagttaaaactctttcctttataaattacctagtcttgggtatttctttatggaagcatgagaatgaactaatgcacagggtaaaaatttaaaaacaaacatacaaatgcaagtaaacaagccaatatttcaactgttcccattgcattatccttattctttatctatggtaccagaaaataatacatctgaaacaatttttttttcctgccatgatgtacactcaagtgggtccactggggtttctttcagtttcccaaatactagatatgactcttccctataccttatcttcatatgaagaaagctatgagaatatattaataactgaatatagtaacactactataggaataagcatgtgtatattccaactgatcttttaaaacttttattttgaaatatttatagattcaaaggaagatgcaaagagtatagggaagtgctatatgccctttatctagttcctctagtggtatcaacttacataactgcagtatcatatataaaccaagaaattggcatctgtataatccacagacattactcagacttctctagttttacatacactaatttgtatgtgtgtgtgtgtgtgcgtgcacgtttatgtgtgtaggtctatgcaattttaccacatgtgtatatttgggtaaccactacaatgatcaagatatggaactgttccgtcaccactaagatcccttgtgctattcctttataaacatctccctgtcatcctttttcacccataaaagctagtaaacactaatctgttcttcatccttataattttattatttcagaattgttatataaatgtcatcatacagtatataacacatagagattggcttttgtcactcagcacaattcccttgagatgcatccaaactgttgtgtatatcagtaatgcaatatgtttaatttctgtgtagtattccatggtagagatgtgccatagtttaactattcacctgttgaacaacatttgtgttctttctacttttgggctattacaaataaagttgctatgaacattcatgt

SEQ ID NO: 7401 - DNA, 1939 bp, Homo sapiens
  source 1..1939: mol_type = unassigned DNA; mol_type = unassigned DNA
aaactttctctgatctcctctctctctgtgtctgctccaaatgtagacagcaattgtctgggtaggaccagcttataaagaagcatggctttgttaaggaagtcgtattcagagcctcagcttaagggtatagttaccaagctatacagccgacaaggctaccacttgcagctgcaggcggatggaaccattgatggcaccaaagatgaggacagcacttacactctgtttaacctcatccctgtgggtctgcgagtggtggctatccaaggagttcaaaccaagctgtacttggcaatgaacagtgagggatacttgtacacctcggaacttttcacacctgagtgcaaattcaaagaatcagtgtttgaaaattattatgtgacatattcatcaatgatataccgtcagcagcagtcaggccgagggtggtatctgggtctgaacaaagaaggagagatcatgaaaggcaaccatgtgaagaagaacaagcctgcagctcattttctgcctaaaccactgaaagtggccatgtacaaggagccatcactgcacgatctcacggagttctcccgatctggaagcgggaccccaaccaagagcagaagtgtctctggcgtgctgaacggaggcaaatccatgagccacaatgaatcaacgtagccagtgagggcaaaagaagggctctgtaacagaaccttacctccaggtgctgttgaattcttctagcagtccttcacccaaaagttcaaatttgtcagtgacatttaccaaacaaacaggcagagttcactattctatctgccattagaccttcttatcatccatactaaagccccattatttagattgagcttgtgcataagaatgccaagcattttagtgaactaaatctgagagaaggactgccaaattttctcatgatctcacctatactttggggatgataatccaaaagtatttcacagcactaatgctgatcaaaatttgctctcccaccaagaaaatgtaaaagaccacaattgttcttcaaaaacaaacaaaacaaaacaaaacaaaattaactgcttaaatgttttgtcggggcaaacaaaattatgtgaattgtgttgttttcttggcttgatgttttctatctacgcttgattcacatgtactcttttctttggcatagtgcaactttatgatttctgaaattcaatggttctattgactttttgcgtcacttaatccaaatcaaccaaattcagggttgaatctgaattggcttctcaggctcaaggtaacagtgttcttgtggtttgaccaattgtttttctttctttttttttttttttagatttgtggtattctggtcaagttattgtgctgtactttgtgcgtagaaattgagttgtattgtcaaccccagtcagtaaagagaacttcaaaaaattatcctcaagtgtagatttctcttaattccatttgtgtatcatgttaaactattgttgtggcttcttgtgtaaagacaggaactgtggaactgtgatgttgtcttttgtgttgttaaaataagaaatgtcttatctgtatatgtatgagtcttcctgtcattgtatttggcacatgaatattgtgtacaaggaattgttaagactggttttccctcaacaacatatattatacttgctactggaaaagtgtttaagacttagctaggtttccatttagatcttcatatctgttgcatggaagaaagttgggttcttggcatagagttgcatgatatgtaagattttgtgcattcataattgttaaaaatctgtgttccaaaagtggacatagcatgtacaggcagttttctgtcctgtgcacaaaaagtttaaaaaagttgtttaatatttgttgttgtatacccaaatacgcaccgaataaactctttatattcattcaaaga

SEQ ID NO: 7402 - DNA, 1625 bp, Homo sapiens
  source 1..1625: mol_type = unassigned DNA; mol_type = unassigned DNA
gtaggcagcggcggcggcggcagcggtggggaaaagcggattccgccccgaaccacaccgaggggagctcgtggtcgagacttgccgccctaagcactctcccaagtccgacccgctcggcgaggacttccgtcttctgagcgaaccttgtcaagcaagctgggatctatgagtggaaaggtgaccaagcccaaagaggagaaagatgcttctaagggagtttctctgcacaagctctctgtttgcctgctgtcgtccacataagatgtgacttgctcctgcttgccttcctccatgattgtgaggcctccccagccacgtggaactttctggatgacgccccccctggcacacaggaatacattatgttacgacaagattccatccaatctgcggaattaaagaaaaaagagtccccctttcgtgctaagtgtcacgaaatcttctgctgcccgctgaagcaagtacaccacaaagagaacacagagccggaagagcctcagcttaagggtatagttaccaagctatacagccgacaaggctaccacttgcagctgcaggcggatggaaccattgatggcaccaaagatgaggacagcacttacactctgtttaacctcatccctgtgggtctgcgagtggtggctatccaaggagttcaaaccaagctgtacttggcaatgaacagtgagggatacttgtacacctcggaacttttcacacctgagtgcaaattcaaagaatcagtgtttgaaaattattatgtgacatattcatcaatgatataccgtcagcagcagtcaggccgagggtggtatctgggtctgaacaaagaaggagagatcatgaaaggcaaccatgtgaagaagaacaagcctgcagctcattttctgcctaaaccactgaaagtggccatgtacaaggagccatcactgcacgatctcacggagttctcccgatctggaagcgggaccccaaccaagagcagaagtgtctctggcgtgctgaacggaggcaaatccatgagccacaatgaatcaacgtagccagtgagggcaaaagaagggctctgtaacagaaccttacctccaggtgctgttgaattcttctagcagtccttcacccaaaagttcaaatttgtcagtgacatttaccaaacaaacaggcagagttcactattctatctgccattagaccttcttatcatccatactaaagccccattatttagattgagcttgtgcataagaatgccaagcattttagtgaactaaatctgagagaaggactgccaaattttctcatgatctcacctatactttggggatgataatccaaaagtatttcacagcactaatgctgatcaaaatttgctctcccaccaagaaaatgtaaaagaccacaattgttcttcaaaaacaaacaaaacaaaacaaaacaaaattaactgcttaaatgttttgtcggggcaaacaaaattatgtgaattgtgttgttttcttggcttgatgttttctatctacgcttgattcacatgtactcttttctttggcatagtgcaactttatgatttctgaaattcaatggttctattgactttttgcgtcacttaatccaaatcaacc

SEQ ID NO: 7403 - DNA, 1039 bp, Homo sapiens
  source 1..1039: mol_type = unassigned DNA; mol_type = unassigned DNA
gtggctctctaggaccggagagttctttggaaggagagcgcgagcgagggagcgggcgagctccgagggggtgtgggtgtagggagagagagaaagagagcaggcagcggcggcggcggcagcggtggggaaaagcggattccgccccgaaccacaccgaggggagctcgtggtcgagacttgccgccctaagcactctcccaagtccgacccgctcggcgaggacttccgtcttctgagcgaaccttgtcaagcaagctgggatctatgagtggaaaggtgaccaagcccaaagaggagaaagatgcttctaaggagcctcagcttaagggtatagttaccaagctatacagccgacaaggctaccacttgcagctgcaggcggatggaaccattgatggcaccaaagatgaggacagcacttacactctgtttaacctcatccctgtgggtctgcgagtggtggctatccaaggagttcaaaccaagctgtacttggcaatgaacagtgagggatacttgtacacctcggaacttttcacacctgagtgcaaattcaaagaatcagtgtttgaaaattattatgtgacatattcatcaatgatataccgtcagcagcagtcaggccgagggtggtatctgggtctgaacaaagaaggagagatcatgaaaggcaaccatgtgaagaagaacaagcctgcagctcattttctgcctaaaccactgaaagtggccatgtacaaggagccatcactgcacgatctcacggagttctcccgatctggaagcgggaccccaaccaagagcagaagtgtctctggcgtgctgaacggaggcaaatccatgagccacaatgaatcaacgtagccagtgagggcaaaagaagggctctgtaacagaaccttacctccaggtgctgttgaattcttctagcagtccttcacccaaaagttcaaatttgtcagtgacatttaccaaacaaacaggcagagttcactattctatctgccattagaccttcttatcatccatactaaag

SEQ ID NO: 7404 - DNA, 1165 bp, Homo sapiens
  source 1..1165: mol_type = unassigned DNA; mol_type = unassigned DNA
gagagttctttggaaggagagcgcgagcgagggagcgggcgagctccgagggggtgtgggtgtagggagagagagaaagagagcaggcagcggcggcggcggcagcggtggggaaaagcggattccgccccgaaccacaccgaggggagctcgtggtcgagacttgccgccctaagcactctcccaagtccgacccgctcggcgaggacttccgtcttctgagcgaaccttgtcaagcaagctgggatctatgagtggaaaggtgaccaagcccaaagaggagaaagatgcttctaaggttctggatgacgccccccctggcacacaggaatacattatgttacgacaagattccatccaatctgcggaattaaagaaaaaagagtccccctttcgtgctaagtgtcacgaaatcttctgctgcccgctgaagcaagtacaccacaaagagaacacagagccggaagagcctcagcttaagggtatagttaccaagctatacagccgacaaggctaccacttgcagctgcaggcggatggaaccattgatggcaccaaagatgaggacagcacttacactctgtttaacctcatccctgtgggtctgcgagtggtggctatccaaggagttcaaaccaagctgtacttggcaatgaacagtgagggatacttgtacacctcggaacttttcacacctgagtgcaaattcaaagaatcagtgtttgaaaattattatgtgacatattcatcaatgatataccgtcagcagcagtcaggccgagggtggtatctgggtctgaacaaagaaggagagatcatgaaaggcaaccatgtgaagaagaacaagcctgcagctcattttctgcctaaaccactgaaagtggccatgtacaaggagccatcactgcacgatctcacggagttctcccgatctggaagcgggaccccaaccaagagcagaagtgtctctggcgtgctgaacggaggcaaatccatgagccacaatgaatcaacgtagccagtgagggcaaaagaagggctctgtaacagaaccttacctccaggtgctgttgaattcttctagcagtccttcacccaaaagttcaaatttgtcagtgacatttaccaaacaaacaggcagagttcactattctatctgccatta

SEQ ID NO: 7405 - DNA, 687 bp, Homo sapiens
  source 1..687: mol_type = unassigned DNA; mol_type = unassigned DNA
gtgacttgctcctgcttgccttcctccatgattgtgaggcctccccagccacgtggaactaggtgtcatgaggacaagcatgaaaaaagtagggatgcatcatttgagttcttcaggaggaagctactacctaattctggatgacgccccccctggcacacaggaatacattatgttacgacaagattccatccaatctgcggaattaaagaaaaaagagtccccctttcgtgctaagtgtcacgaaatcttctgctgcccgctgaagcaagtacaccacaaagagaacacagagccggaagagcctcagcttaagggtatagttaccaagctatacagccgacaaggctaccacttgcagctgcaggcggatggaaccattgatggcaccaaagatgaggacagcacttacactctgtttaacctcatccctgtgggtctgcgagtggtggctatccaaggagttcaaaccaagctgtacttggcaatgaacagtgagggatacttgtacacctcggaacttttcacacctgagtgcaaattcaaagaatcagtgtttgaaaattattatgtgacatattcatcaatgatataccgtcagcagcagtcaggccgagggtggtatctgggtctgaacaaagaaggagagatcatgaaaggcaaccatgtgaagaagaacaagcctgc

SEQ ID NO: 7406 - DNA, 652 bp, Homo sapiens
  source 1..652: mol_type = unassigned DNA; mol_type = unassigned DNA
gtgctttggctcagatgcagactattgcaaaccgcagaaactcacagtgacgacatgaccaagaagcttcctacccctggcctgggagcaagtgaccgtgggcgctaataacaacagggccctttaagattttggtccatggtgggatcttgcttgtttctcaccaccaggcccattgcgtctccacttctaaggcagcggcggcggcggcagcggtggggaaaagcggattccgccccgaaccacaccgaggggagctcgtggtcgagacttgccgccctaagcactctcccaagtccgacccgctcggcgaggacttccgtcttctgagcgaaccttgtcaagcaagctgggatctatgagtggaaaggtgaccaagcccaaagaggagaaagatgcttctaaggttctggatgacgccccccctggcacacaggaatacattatgttacgacaagattccatccaatctgcggaattaaagaaaaaagagtccccctttcgtgctaagtgtcacgaaatcttctgctgcccgctgaagcaagtacaccacaaagagaacacagagccggaagagcctcagcttaagggtatagttaccaagctatacagccgacaaggctaccacttgcagctgcaggcggatggaacc

SEQ ID NO: 7407 - DNA, 352 bp, Homo sapiens
  source 1..352: mol_type = unassigned DNA; mol_type = unassigned DNA
acctccttccccccccccgccacccgacacctcctaatcctaaactccttatccaccccaaccctccgggaaggcaggagtttgcacccttcgacacgccgcgtgcaaagcagggggatctatcctccctggccacatgggcctttggctgatggaaaggctgggctttgaggaagctgcatagttctggatgacgccccccctggcacacaggaatacattatgttacgacaagattccatccaatctgcggaattaaagaaaaaagagtccccctttcgtgctaagtgtcacgaaatcttctgctgcccgctgaagcaagtacaccacaaagagaacacagagccggaag

SEQ ID NO: 7408 - DNA, 892 bp, Homo sapiens
  source 1..892: mol_type = unassigned DNA; mol_type = unassigned DNA
gagcacctcgcagctgtccggctgccgccccttccatgggcgccgcgctcgcctgcagccgccgccgccgcggggcgggcgcgatgccacgatgggcctaatctggctgctactgctcagcctgctggagcccggctggcccgcagcgggccctggggcgcggttgcggcgcgatgcgggcggccgtggcggcgtctacgagcaccttggcggggcgccccggcgccgcaagctctactgcgccacgaagtaccacctccagctgcacccgagcggccgcgtcaacggcagcctggagaacagcgcctacagtattttggagataacggcagtggaggtgggcattgtggccatcaggggtctcttctccgggcggtacctggccatgaacaagaggggacgactctatgcttcggagcactacagcgccgagtgcgagtttgtggagcggatccacgagctgggctataatacgtatgcctcccggctgtaccggacggtgtctagtacgcctggggcccgccggcagcccagcgccgagagactgtggtacgtgtctgtgaacggcaagggccggccccgcaggggcttcaagacccgccgcacacagaagtcctccctgttcctgccccgcgtgctggaccacagggaccacgagatggtgcggcagctacagagtgggctgcccagaccccctggtaagggggtccagccccgacggcggcggcagaagcagagcccggataacctggagccctctcacgttcaggcttcgagactgggctcccagctggaggccagtgcgcactagctgggcctggtggccaccgccagagctcctggcgacatcttggcgtggcagcctcttgactctgactctcctccttgagcc

SEQ ID NO: 7409 - DNA, 4555 bp, Homo sapiens
  source 1..4555: mol_type = unassigned DNA; mol_type = unassigned DNA
gcaggcgtgcacggagcagtgagatcactggcgttataaatatcccggtgccagcgcggagatccgctcgggtggcctctctcttcccctctccccttctcttccccgaggctatgtccacccggtgcggcgaggcgggcagagccagaggcacgcagccgcacaggggctacagagcccagaatcagccctacaagatgcacttaggacccccgcggctggaagaatgagcttgtccttcctcctcctcctcttcttcagccacctgatcctcagcgcctgggctcacggggagaagcgtctcgcccccaaagggcaacccggacccgctgccactgataggaaccctagaggctccagcagcagacagagcagcagtagcgctatgtcttcctcttctgcctcctcctcccccgcagcttctctgggcagccaaggaagtggcttggagcagagcagtttccagtggagcccctcggggcgccggaccggcagcctctactgcagagtgggcatcggtttccatctgcagatctacccggatggcaaagtcaatggatcccacgaagccaatatgttaagtgttttggaaatatttgctgtgtctcaggggattgtaggaatacgaggagttttcagcaacaaatttttagcgatgtcaaaaaaaggaaaactccatgcaagtgccaagttcacagatgactgcaagttcagggagcgttttcaagaaaatagctataatacctatgcctcagcaatacatagaactgaaaaaacagggcgggagtggtatgtggccctgaataaaagaggaaaagccaaacgagggtgcagcccccgggttaaaccccagcatatctctacccattttctgccaagattcaagcagtcggagcagccagaactttctttcacggttactgttcctgaaaagaaaaagccacctagccctatcaagccaaagattcccctttctgcacctcggaaaaataccaactcagtgaaatacagactcaagtttcgctttggataatattcctcttggccttgtgagaaaccattctttcccctcaggagtttctataggtgtcttcagagttctgaagaaaaattactggacacagcttcagctatacttacactgtattgaagtcacgtcatttgtttcaatgtgactgaaacaaaatgttttttgataggaaggaaactggaattctttgtactaatacagggagcacactccttcagttcagcaagacataaagccttttgctttatgcttgagggatatttagaactttgtattttcggaaagttaaataacagggactacgtatttttctgacttttacagattaacctgaaagaacatacatgatacatttttatttttggtttccaaagaatattttgatgcagataaaatattttgttaacttttgtttttttttgtttgttttcttaaaagtacctctgcattgagcatattttcttacttttattattttaattaatatgacataagcaatcattttatgctgtttatgaattataaatgtgtttatagctcatttgtaatatggaaatcttttacatttttcctattcactgcacttttttattgtttttatttctagccatacctcagataatatgtttagttttacattttaaaatgtttaaattctctttcacagcaccaaaggctcagcttggatttgtgtgtatgtgtatgtcaattcatgacattatgtggaatcctaaacctttggtggctgggatatgatgggttagaagcaaggagaaaatataaggactttttgatggaattaaatgtgggaggtaaggaaaaggatttagaggtaaaagtacactaagtttgcaacatttattgagatctaagtctgtcttgccttcatttctctttttatctcccccttgccctcattcttgaacagctggaggaatacattttattctgtccatgaagcatacactatgaaattcaagtgcttaaaaatacttctatgactctctgctatcccactgtatagatccacagggagcaaacacttagaaatgatagagaactgaaggagatcaatggtttaacagttatccatgccaagtcccattgtcagaaatattcttattactcagtcaaacactctttgagcttcccttcctaaaggtaaccaatccagtgaatagatgtgcccttttataaggaaacttctgatgtttattaaaaaaactggccttttgatagaggtaacttaatttgggaatttgttgtgttgaaatggcatttaatttcaacctaaatactgactgctggacataaatcacagaaaatttaacttaagaaaatttacaaaatttattctcaggtaatcattttaataaagttctgcaaaatacacgtttatcttacattcagaaatgtggcaaaaaaggcatagctaaaggctaaacatatggctttagtagtaacaaaagggttcatagaaacttcatggtttgcatttaaacatgtttaaagtgtacttataaactatttttttcttaaagcaaactatgatttattttggtgcacaaatacaaagtggaaacttaccaaaattgaactagctaccatataagcagattgctttaatttgatgggaaaatagtacacacatatatataacaaataatatattaaaaaacccatccatcaactaaaacattatatgtatacatcagtatagtgttttattataaagccaattatctgattaagcattctttccactgaatgcataatgtttaaatagcataaaatgaaatgctacaaaaattgaactaatttatactttaaagtatttctgggttaaatgaaacaatgaaattttttagtatgttcaactctcatccaaatggcatatgaccctgtttacacagcctaaagctaaaaatattactctagtttattctaatctattgttaagtattgtgcactgtataccaagttcttagggcacatgaaaaattttagctgccaaacaggaactagtaaacatatgttcctaataagtgaagggaaagataataatgatggtcaacaataagccacgtcaatgcataagttgtataggctaaatgttgcttgtaggctacattaaactcaaatgtaatagtttatcttatactcctggtttgatttgattagcatattaacgtgaaagtaggatagctactaaatatatattatgcaagtcaggaatcattaatttcaaaatttaaagccatgctaaaattaaaaagaaaatattaaattacacaattacacttgtctttactggccatacaaaatgattttttttttttttttgagacagagtcttgctctgtcaccaggctggagtgcagtggcatgatctcggctcactgcaacctccaactccctggtttaagggattctcctgcctcagcctcccaagtagctgggattacagactcatgccaccacgccagctaatttttgtatttttagtagagacggggtttcaccatgttggtcaggatggtctcaatcctggcctcttgatagtcctgacctcatgatctgcccacctcggcctccccaaagtgctgggattacaggtacaatgatgtataattaatgcttagtgaagcataaagttacctacatcaattaattaaatgaacttatgtacagaaaacatgtataaatataagtctatactaatgcttacaactttctaagagggttcttgcttatgtagctttttattattttaagtaactagaaccaccaaatatcaaataaaattatttggttatggttatgttcatctaaacacaacaataacttttatattaatatttaggagtctattttgtctataggtgacaaacatctccagactaacatgtcagttttatcaattatattatgtttaattatttaagatttctttatgtggaacatctatagagataaatagaaattttcaataagatgtagtaacactgtgatttatctttcaagagtctctcttcacttccttctaaagagactaatttgagagtacaggtgcatattaattttcttggttctttcagctgaattatattggtccagaagttcaaaatcatgtgacaataataagggatactgacagaagttatttccaagtttgtgtatatattataaaaattacatatataaaactaaggcttttatttctgttatttttaagcttttatttcttgtagctaaaaataaaacatcataaatctggtaggtaaatttcttattaaatcaatcttgaaatagaaaatgtaataactttcttaccattaacattttttacccttccatagaagggagggaataaatcatgacttatcccattttcaataacaaaacgaaactatggcactaaccaaaaacttgcattctggcataatttttacagttgcagagaattgtttctgggctcattaaaaaaagtagtattgcagacattgctgcaatgggaagcagaca

SEQ ID NO: 7410 - DNA, 5234 bp, Homo sapiens
  source 1..5234: mol_type = unassigned DNA; mol_type = unassigned DNA
tatcccggtgccagcgcggagatccgctcgggtggcctctctcttcccctctccccttctcttccccgaggctatgtccacccggtgcggcgaggcgggcagagccagaggcacgcagccgcacaggggctacagagcccagaatcagccctacaagatgcacttaggacccccgcggctggaagaatgagcttgtccttcctcctcctcctcttcttcagccacctgatcctcagcgcctgggctcacggggagaagcgtctcgcccccaaagggcaacccggacccgctgccactgataggaaccctagaggctccagcagcagacagagcagcagtagcgctatgtcttcctcttctgcctcctcctcccccgcagcttctctgggcagccaaggaagtggcttggagcagagcagtttccagtggagcccctcggggcgccggaccggcagcctctactgcagagtgggcatcggtttccatctgcagatctacccggatggcaaagtcaatggatcccacgaagccaatatgttaagccaagttcacagatgactgcaagttcagggagcgttttcaagaaaatagctataatacctatgcctcagcaatacatagaactgaaaaaacagggcgggagtggtatgtggccctgaataaaagaggaaaagccaaacgagggtgcagcccccgggttaaaccccagcatatctctacccattttctgccaagattcaagcagtcggagcagccagaactttctttcacggttactgttcctgaaaagaaaaagccacctagccctatcaagccaaagattcccctttctgcacctcggaaaaataccaactcagtgaaatacagactcaagtttcgctttggataatattcctcttggccttgtgagaaaccattctttcccctcaggagtttctataggtgtcttcagagttctgaagaaaaattactggacacagcttcagctatacttacactgtattgaagtcacgtcatttgtttcaatgtgactgaaacaaaatgttttttgataggaaggaaactggaattctttgtactaatacagggagcacactccttcagttcagcaagacataaagccttttgctttatgcttgagggatatttagaactttgtattttcggaaagttaaataacagggactacgtatttttctgacttttacagattaacctgaaagaacatacatgatacatttttatttttggtttccaaagaatattttgatgcagataaaatattttgttaacttttgtttttttttgtttgttttcttaaaagtacctctgcattgagcatattttcttacttttattattttaattaatatgacataagcaatcattttatgctgtttatgaattataaatgtgtttatagctcatttgtaatatggaaatcttttacatttttcctattcactgcacttttttattgtttttatttctagccatacctcagataatatgtttagttttacattttaaaatgtttaaattctctttcacagcaccaaaggctcagcttggatttgtgtgtatgtgtatgtcaattcatgacattatgtggaatcctaaacctttggtggctgggatatgatgggttagaagcaaggagaaaatataaggactttttgatggaattaaatgtgggaggtaaggaaaaggatttagaggtaaaagtacactaagtttgcaacatttattgagatctaagtctgtcttgccttcatttctctttttatctcccccttgccctcattcttgaacagctggaggaatacattttattctgtccatgaagcatacactatgaaattcaagtgcttaaaaatacttctatgactctctgctatcccactgtatagatccacagggagcaaacacttagaaatgatagagaactgaaggagatcaatggtttaacagttatccatgccaagtcccattgtcagaaatattcttattactcagtcaaacactctttgagcttcccttcctaaaggtaaccaatccagtgaatagatgtgcccttttataaggaaacttctgatgtttattaaaaaaactggccttttgatagaggtaacttaatttgggaatttgttgtgttgaaatggcatttaatttcaacctaaatactgactgctggacataaatcacagaaaatttaacttaagaaaatttacaaaatttattctcaggtaatcattttaataaagttctgcaaaatacacgtttatcttacattcagaaatgtggcaaaaaaggcatagctaaaggctaaacatatggctttagtagtaacaaaagggttcatagaaacttcatggtttgcatttaaacatgtttaaagtgtacttataaactatttttttcttaaagcaaactatgatttattttggtgcacaaatacaaagtggaaacttaccaaaattgaactagctaccatataagcagattgctttaatttgatgggaaaatagtacacacatatatataacaaataatatattaaaaaacccatccatcaactaaaacattatatgtatacatcagtatagtgttttattataaagccaattatctgattaagcattctttccactgaatgcataatgtttaaatagcataaaatgaaatgctacaaaaattgaactaatttatactttaaagtatttctgggttaaatgaaacaatgaaattttttagtatgttcaactctcatccaaatggcatatgaccctgtttacacagcctaaagctaaaaatattactctagtttattctaatctattgttaagtattgtgcactgtataccaagttcttagggcacatgaaaaattttagctgccaaacaggaactagtaaacatatgttcctaataagtgaagggaaagataataatgatggtcaacaataagccacgtcaatgcataagttgtataggctaaatgttgcttgtaggctacattaaactcaaatgtaatagtttatcttatactcctggtttgatttgattagcatattaacgtgaaagtaggatagctactaaatatatattatgcaagtcaggaatcattaatttcaaaatttaaagccatgctaaaattaaaaagaaaatattaaattacacaattacacttgtctttactggccatacaaaatgattttttttttttttttgagacagagtcttgctctgtcaccaggctggagtgcagtggcatgatctcggctcactgcaacctccaactccctggtttaagggattctcctgcctcagcctcccaagtagctgggattacagactcatgccaccacgccagctaatttttgtatttttagtagagacggggtttcaccatgttggtcaggatggtctcaatcctggcctcttgatagtcctgacctcatgatctgcccacctcggcctccccaaagtgctgggattacaggtacaatgatgtataattaatgcttagtgaagcataaagttacctacatcaattaattaaatgaacttatgtacagaaaacatgtataaatataagtctatactaatgcttacaactttctaagagggttcttgcttatgtagctttttattattttaagtaactagaaccaccaaatatcaaataaaattatttggttatggttatgttcatctaaacacaacaataacttttatattaatatttaggagtctattttgtctataggtgacaaacatctccagactaacatgtcagttttatcaattatattatgtttaattatttaagatttctttatgtggaacatctatagagataaatagaaattttcaataagatgtagtaacactgtgatttatctttcaagagtctctcttcacttccttctaaagagactaatttgagagtacaggtgcatattaattttcttggttctttcagctgaattatattggtccagaagttcaaaatcatgtgacaataataagggatactgacagaagttatttccaagtttgtgtatatattataaaaattacatatataaaactaaggcttttatttctgttatttttaagcttttatttcttgtagctaaaaataaaacatcataaatctggtaggtaaatttcttattaaatcaatcttgaaatagaaaatgtaataactttcttaccattaacattttttacccttccatagaagggagggaataaatcatgacttatcccattttcaataacaaaacgaaactatggcactaaccaaaaacttgcattctggcataatttttacagttgcagagaattgtttctgggctcattaaaaaaagtagtattgcagacattgctgcaatgggaagcagacaataacttcttaaaggaattctacacctcctttaagatttacttaattgctacatctaaattctgataatttaaaatccattttaggtgataaaattttttaaaagttttgaaggaaacctctggataaatggacaaggcctaatttttttttgtagtcaatccaactgtactggccaatttttgaaataagattatatgattaggtattagcagagacaaagagttacctcctccatcttactctgccctatttgaaagtctcaggggagaaaagggaacaagatgctgatccaacctgagtggagtcaggtgaggcatctttacatctaagaatttttttttaaattttattattattatacttcaagttctagggtacatgtccacaatgcacatgtctgtcacacatgcacacatgtgccatgctggtgtgctgcacccaccaacctgtcatccagcattaggtatatctcctaatgctatccctcccctctccacccaccccacagcaggccccggtatgtgatgttccccttcgtgtgtccatgtgttcttattgttcaattcccacctatgagtgagaatatgtggtgtttggtttttggtccttgcaatagtttgctgagaatgatggtttccagcttcatccatgtccctacaaagaacatgaactcatcattttttatggctgcatagtattccatggtgtatatgtgccacattttcttaatccagtctatcattgttggacatttgggttggttccaagtctttgctattgtgaatagtgctgcaataaacatatgtgtgcatgtgtcttta

SEQ ID NO: 7411 - DNA, 390 bp, Homo sapiens
  source 1..390: mol_type = unassigned DNA; mol_type = unassigned DNA
atgagcttgtccttcctcctcctcctcttcttcagccacctgatcctcagcgcctgggctcacggggagaagcgtctcgcccccaaagggcaacccggacccgctgccactgataggaaccctagaggctccagcagcagacagagcagcagtagcgctatgtcttcctcttctgcctcctcctcccccgcagcttctctgggcagccaaggaagtggcttggagcagagcagtttccagtggagcccctcggggcgccggaccggcagcctctactgcagagtgggcatcggtttccatctgcagatctacccggatggcaaagtcaatggatcccacgaagccaatatgttaagctccagaggagcgtggacaccaccggcggtctga

SEQ ID NO: 7412 - DNA, 658 bp, Homo sapiens
  source 1..658: mol_type = unassigned DNA; mol_type = unassigned DNA
aaccctagaggctccagcagcagacagagcagcagtagcgctatgtcttcctcttctgcctcctcctcccccgcagcttctctgggcagccaaggaagtggcttggagcagagcagtttccagtggagcccctcggggcgccggaccggcagcctctactgcagagtgggcatcggtttccatctgcagatctacccggatggcaaagtcaatggatcccacgaagccaatatgttaagtgttttggaaatatttgctgtgtctcaggggattgtaggaatacgaggagttttcagcaacaaatttttagcgatgtcaaaaaaaggaaaactccatgcaagtaacacactagaaacttaagtacaagcaaacttcagacccctttaaagggacgcttcggccgaggataccgcaatggatcaggaagaggggctgaaggccttggacaatattgtcactcaattcaacgcctatgaagatttcctggactcgcagatcactactgtggacttgtactacctggagccaatcccctccccagctacccccgctgcagggtggtgggggacagagtggagttcttgtcctgtgccacgggagaacccggacgcgcaggaattaacaagtcatcagtgctaggaagctgggaggcggacga

SEQ ID NO: 7413 - DNA, 3042 bp, Homo sapiens
  source 1..3042: mol_type = unassigned DNA; mol_type = unassigned DNA
ctcagtagggccagatcgctcttccagcgcgggttggtccaccaggcagagccccagccagggcctgtcaggtacccagggagaccggaaatgtagccaggagacagcagcgctcacagtcacctggtttcagtgtcagcctggttgctcctagatgttcctaacttgctccatctcagaccaaagactccacgggccattgggctccttcttacacaggctccagaggagcgtggacaccaccggcggtctgaagatttggcagccagcagtctccagaggggggtcggaggcgcgcaagtgggtgttttggaaatatttgctgtgtctcaggggattgtaggaatacgaggagttttcagcaacaaatttttagcgatgtcaaaaaaaggaaaactccatgcaagtgccaagttcacagatgactgcaagttcagggagcgttttcaagaaaatagctataatacctatgcctcagcaatacatagaactgaaaaaacagggcgggagtggtatgtggccctgaataaaagaggaaaagccaaacgagggtgcagcccccgggttaaaccccagcatatctctacccattttctgccaagattcaagcagtcggagcagccagaactttctttcacggttactgttcctgaaaagaaaaagccacctagccctatcaagccaaagattcccctttctgcacctcggaaaaataccaactcagtgaaatacagactcaagtttcgctttggataatattcctcttggccttgtgagaaaccattctttcccctcaggagtttctataggtgtcttcagagttctgaagaaaaattactggacacagcttcagctatacttacactgtattgaagtcacgtcatttgtttcaatgtgactgaaacaaaatgttttttgataggaaggaaactggaattctttgtactaatacagggagcacactccttcagttcagcaagacataaagccttttgctttatgcttgagggatatttagaactttgtattttcggaaagttaaataacagggactacgtatttttctgacttttacagattaacctgaaagaacatacatgatacatttttatttttggtttccaaagaatattttgatgcagataaaatattttgttaacttttgtttttttttgtttgttttcttaaaagtacctctgcattgagcatattttcttacttttattattttaattaatatgacataagcaatcattttatgctgtttatgaattataaatgtgtttatagctcatttgtaatatggaaatcttttacatttttcctattcactgcacttttttattgtttttatttctagccatacctcagataatatgtttagttttacattttaaaatgtttaaattctctttcacagcaccaaaggctcagcttggatttgtgtgtatgtgtatgtcaattcatgacattatgtggaatcctaaacctttggtggctgggatatgatgggttagaagcaaggagaaaatataaggactttttgatggaattaaatgtgggaggtaaggaaaaggatttagaggtaaaagtacactaagtttgcaacatttattgagatctaagtctgtcttgccttcatttctctttttatctcccccttgccctcattcttgaacagctggaggaatacattttattctgtccatgaagcatacactatgaaattcaagtgcttaaaaatacttctatgactctctgctatcccactgtatagatccacagggagcaaacacttagaaatgatagagaactgaaggagatcaatggtttaacagttatccatgccaagtcccattgtcagaaatattcttattactcagtcaaacactctttgagcttcccttcctaaaggtaaccaatccagtgaatagatgtgcccttttataaggaaacttctgatgtttattaaaaaaactggccttttgatagaggtaacttaatttgggaatttgttgtgttgaaatggcatttaatttcaacctaaatactgactgctggacataaatcacagaaaatttaacttaagaaaatttacaaaatttattctcaggtaatcattttaataaagttctgcaaaatacacgtttatcttacattcagaaatgtggcaaaaaaggcatagctaaaggctaaacatatggctttagtagtaacaaaagggttcatagaaacttcatggtttgcatttaaacatgtttaaagtgtacttataaactatttttttcttaaagcaaactatgatttattttggtgcacaaatacaaagtggaaacttaccaaaattgaactagctaccatataagcagattgctttaatttgatgggaaaatagtacacacatatatataacaaataatatattaaaaaacccatccatcaactaaaacattatatgtatacatcagtatagtgttttattataaagccaattatctgattaagcattctttccactgaatgcataatgtttaaatagcataaaatgaaatgctacaaaaattgaactaatttatactttaaagtatttctgggttaaatgaaacaatgaaattttttagtatgttcaactctcatccaaatggcatatgaccctgtttacacagcctaaagctaaaaatattactctagtttattctaatctattgttaagtattgtgcactgtataccaagttcttagggcacatgaaaaattttagctgccaaacaggaactagtaaacatatgttcctaataagtgaagggaaagataataatgatggtcaacaataagccacgtcaatgcataagttgtataggctaaatgttgcttgtaggctacattaaactcaaatgtaatagtttatcttatactcctggtttgatttgattagcatattaacgtgaaagtaggatagctactaaatatatattatgcaagtcaggaatcattaatttcaaaatttaaagccatgctaaaattaaaaagaaaatattaaatt

SEQ ID NO: 7414 - DNA, 2545 bp, Homo sapiens
  source 1..2545: mol_type = unassigned DNA; mol_type = unassigned DNA
cacagggagccggctaaaacagactactcccccgtgcagtcgttccctctaccctaataaggctttggcgcctctcccagaactcggtcctggggaatgctctttgcctggtccagccccgacaaacgtggtctgagaacagcggagcgcggaaaccgcggagcatgactcctccgaagctgcgagcgtcgctgtcgccgtcgctgctgctgctgctgagtggttgcctcctcgcggctgctcggagggagaaaggggcggctagcaacgtggcggagccggtccccgggcccactggcggctcctcgggtcgcttcctcagccccgagcagcacgcgtgcagctggcagctcctgctgcccgccccggaggccgcagcgggcagcgagctggcgctgcgctgccagagcccggacggggcgcgccaccagtgcgcctaccgcgggcatccggagcgctgcgcagcctacgccgctcgccgcgcgcacttctggaagcaggtgctgggagggctgcgcaagaagcggaggccctgtcacgaccccgcgccgctccaggcccgcttgtgcgcgggcaagaagggccacggcgccgagctgcggctagtgccccgcgcgtccccgcccgcacgccccaccgtcgcgggattcgcgggggagtccaagccccgggcccggaaccgggggcggacccgggagcgtgcgtccggcccagccgctgggaccccgcctccccaaagcgcaccgcccaaagaaaacccctcagagaggaagaccaacgagggcaagaggaaggcggccttggtccccaacgaggagcgacccatggggaccgggcccgaccccgacgggctggacgggaacgcggagctcacggagacctactgcgctgagaagtggcactccctctgcaacttctttgtcaatttctggaacggctgagactgcctgccggcttagggagggttgatgggggaggcgtggggaagggaaagctaagggcgtcttagaccggggggtactgtgatagagattggggagaagtccaggttctcgaatgggggtgggggcaagggtaagggtgagatgcttgggatgagagtgtaaggggtatggagaatctctgggatagcagagaagttaaaaattttgaaaagtctcagtcctgattaagagcaggaaaaataatggaaacagaaataggcgtactttaaatgtgcaaaaactggagactggggagagaaatcgatgcagagggaggctgagaataagggggagatagagtgactaaagtgatgtgagtcccatgtggggagggggatgcaatgtttattgtttaacatttctattaaatgcagccatgagcaattgccaacctgagccaggttgaatcaatgtcttctcacttaatcagctaacaagactgcagactttttttccgtttctgaattggtataaacttggatgcggcgtggtgggtgtcatagataacctctatagggacagaagcctcacaggtcaaaactggctccaaggaaagttttgcagaatgatttcctttccattcttttagaagagctacctttttttttttttttccctgacagggtctggcttgcccaggctggagtgcggtggctagtcacaggtgtaataataggcactgcagtctccaactcctggcctcaagggatcctcacatcttagcctccagaatagctaggagtaggagtagctgggactacaagcatgcacagctgcacttggcttagaagtgctactttatttttatttttgagacagggtcttgtgtcatccagactggagcagtggtgcaattatggctcactgcggcctcgacattccagtctcaagtgatcctctgcctcagcctccggagtagccaggactacaggggtgtgccactagaagtgctactttttaacgaaatggtgactaatgttctggaactttcccattaaccttctgcatttagaaggaattatagatgttgagtgctccagtaaacagtgattctctttatatctgatttttttttttaaacagctaaaatgtaagtatgtatctcagagtcattttgaccattatggaagttgtatctctctgtttcatgtaactaattattaatatatttcatttttagtgtgatgtaatgagagactgtgtgtgtatgttaggtgctcaataaaaactgtatggttagatttaaagaagtggcaaggcaatggaaattctacctgcatttgatctacttccaagtacaccttgaattaagttcttaaacacatcttgaattgctgggaaaagacagaaactaagaagttgacataaagcaagagtcacaaactggcagccacctggccttatcattgttctatttgatttgcaccctggttctctttctttttcccttcctccccaccttcctcccatccattgttgaatctgtggatgcagagcccacggatgtggaggggcaactatatatatgtttttccattatatatataaatgtgtgtgtgtgt

SEQ ID NO: 7415 - DNA, 5702 bp, Homo sapiens
  source 1..5702: mol_type = unassigned DNA; mol_type = unassigned DNA
gccggcgcatagcgctcggagcgctcttgcggccacaggcgcggcgtcctcggcggcgggcggcagctagcgggagccgggacgccggtgcagccgcagcgcgcggaggaacccgggtgtgccgggagctgggcggccacgtccggacgggaccgagacccctcgtagcgcattgcggcgacctcgccttccccggccgcgagcgcgccgctgcttgaaaagccgcggaacccaaggacttttctccggtccgagctcggggcgccccgcagggcgcacggtacccgtgctgcagtcgggcacgccgcggcgccggggcctccgcagggcgatggagcccggtctgcaaggaaagtgaggcgccgccgctgcgttctggaggaggggggcacaaggtctggagaccccgggtggcggacgggagccctccccccgccccgcctccggggcaccagctccggctccattgttcccgcccgggctggaggcgccgagcaccgagcgccgccgggagtcgagcgccggccgcggagctcttgcgaccccgccaggacccgaacagagcccgggggcggcgggccggagccggggacgcgggcacacgcccgctcgcacaagccacggcggactctcccgaggcggaacctccacgccgagcgagggtcagtttgaaaaggaggatcgagctcactgtggagtatccatggagatgtggagccttgtcaccaacctctaactgcagaactgggatgtggagctggaagtgcctcctcttctgggctgtgctggtcacagccacactctgcaccgctaggccgtccccgaccttgcctgaacaagcccagccctggggagcccctgtggaagtggagtccttcctggtccaccccggtgacctgctgcagcttcgctgtcggctgcgggacgatgtgcagagcatcaactggctgcgggacggggtgcagctggcggaaagcaaccgcacccgcatcacaggggaggaggtggaggtgcaggactccgtgcccgcagactccggcctctatgcttgcgtaaccagcagcccctcgggcagtgacaccacctacttctccgtcaatgtttcagatgctctcccctcctcggaggatgatgatgatgatgatgactcctcttcagaggagaaagaaacagataacaccaaaccaaaccccgtagctccatattggacatccccagaaaagatggaaaagaaattgcatgcagtgccggctgccaagacagtgaagttcaaatgcccttccagtgggaccccaaaccccacactgcgctggttgaaaaatggcaaagaattcaaacctgaccacagaattggaggctacaaggtccgttatgccacctggagcatcataatggactctgtggtgccctctgacaagggcaactacacctgcattgtggagaatgagtacggcagcatcaaccacacataccagctggatgtcgtggagcggtcccctcaccggcccatcctgcaagcagggttgcccgccaacaaaacagtggccctgggtagcaacgtggagttcatgtgtaaggtgtacagtgacccgcagccgcacatccagtggctaaagcacatcgaggtgaatgggagcaagattggcccagacaacctgccttatgtccagatcttgaagactgctggagttaataccaccgacaaagagatggaggtgcttcacttaagaaatgtctcctttgaggacgcaggggagtatacgtgcttggcgggtaactctatcggactctcccatcactctgcatggttgaccgttctggaagccctggaagagaggccggcagtgatgacctcgcccctgtacctggagatcatcatctattgcacaggggccttcctcatctcctgcatggtggggtcggtcatcgtctacaagatgaagagtggtaccaagaagagtgacttccacagccagatggctgtgcacaagctggccaagagcatccctctgcgcagacaggtaacagtgtctgctgactccagtgcatccatgaactctggggttcttctggttcggccatcacggctctcctccagtgggactcccatgctagcaggggtctctgagtatgagcttcccgaagaccctcgctgggagctgcctcgggacagactggtcttaggcaaacccctgggagagggctgctttgggcaggtggtgttggcagaggctatcgggctggacaaggacaaacccaaccgtgtgaccaaagtggctgtgaagatgttgaagtcggacgcaacagagaaagacttgtcagacctgatctcagaaatggagatgatgaagatgatcgggaagcataagaatatcatcaacctgctgggggcctgcacgcaggatggtcccttgtatgtcatcgtggagtatgcctccaagggcaacctgcgggagtacctgcaggcccggaggcccccagggctggaatactgctacaaccccagccacaacccagaggagcagctctcctccaaggacctggtgtcctgcgcctaccaggtggcccgaggcatggagtatctggcctccaagaagtgcatacaccgagacctggcagccaggaatgtcctggtgacagaggacaatgtgatgaagatagcagactttggcctcgcacgggacattcaccacatcgactactataaaaagacaaccaacggccgactgcctgtgaagtggatggcacccgaggcattatttgaccggatctacacccaccagagtgatgtgtggtctttcggggtgctcctgtgggagatcttcactctgggcggctccccataccccggtgtgcctgtggaggaacttttcaagctgctgaaggagggtcaccgcatggacaagcccagtaactgcaccaacgagctgtacatgatgatgcgggactgctggcatgcagtgccctcacagagacccaccttcaagcagctggtggaagacctggaccgcatcgtggccttgacctccaaccaggagtacctggacctgtccatgcccctggaccagtactcccccagctttcccgacacccggagctctacgtgctcctcaggggaggattccgtcttctctcatgagccgctgcccgaggagccctgcctgccccgacacccagcccagcttgccaatggcggactcaaacgccgctgactgccacccacacgccctccccagactccaccgtcagctgtaaccctcacccacagcccctgctgggcccaccacctgtccgtccctgtcccctttcctgctggcaggagccggctgcctaccaggggccttcctgtgtggcctgccttcaccccactcagctcacctctccctccacctcctctccacctgctggtgagaggtgcaaagaggcagatctttgctgccagccacttcatcccctcccagatgttggaccaacacccctccctgccaccaggcactgcctggagggcagggagtgggagccaatgaacaggcatgcaagtgagagcttcctgagctttctcctgtcggtttggtctgttttgccttcacccataagcccctcgcactctggtggcaggtgccttgtcctcagggctacagcagtagggaggtcagtgcttcgtgcctcgattgaaggtgacctctgccccagataggtggtgccagtggcttattaattccgatactagtttgctttgctgaccaaatgcctggtaccagaggatggtgaggcgaaggccaggttgggggcagtgttgtggccctggggcccagccccaaactgggggctctgtatatagctatgaagaaaacacaaagtgtataaatctgagtatatatttacatgtctttttaaaagggtcgttaccagagatttacccatcgggtaagatgctcctggtggctgggaggcatcagttgctatatattaaaaacaaaaaagaaaaaaaaggaaaatgtttttaaaaaggtcatatattttttgctacttttgctgttttatttttttaaattatgttctaaacctattttcagtttaggtccctcaataaaaattgctgctgcttcatttatctatgggctgtatgaaaagggtgggaatgtccactggaaagaagggacacccacgggccctggggctaggtctgtcccgagggcaccgcatgctcccggcgcaggttccttgtaacctcttcttcctaggtcctgcacccagacctcacgacgcacctcctgcctctccgctgcttttggaaagtcagaaaaagaagatgtctgcttcgagggcaggaaccccatccatgcagtagaggcgctgggcagagagtcaaggcccagcagccatcgaccatggatggtttcctccaaggaaaccggtggggttgggctggggagggggcacctacctaggaatagccacggggtagagctacagtgattaagaggaaagcaagggcgcggttgctcacgcctgtaatcccagcactttgggacaccgaggtgggcagatcacttcaggtcaggagtttgagaccagcctggccaacttagtgaaaccccatctctactaaaaatgcaaaaattatccaggcatggtggcacacgcctgtaatcccagctccacaggaggctgaggcagaatcccttgaagctgggaggcggaggttgcagtgagccgagattgcgccattgcactccagcctgggcaacagagaaaacaaaaaggaaaacaaatgatgaaggtctgcagaaactgaaacccagacatgtgtctgccccctctatgtgggcatggttttgccagtgcttctaagtgcaggagaacatgtcacctgaggctagttttgcattcaggtccctggcttcgtttcttgttggtatgcctccccagatcgtccttcctgtatccatgtgaccagactgtatttgttgggactgtcgcagatcttggcttcttacagttcttcctgtccaaactccatcctgtccctcaggaacggggggaaaattctccgaatgtttttggttttttggctgcttggaatttacttctgccacctgctggtcatcactgtcctcactaagtggattctggctcccccgtacctcatggctcaaactaccactcctcagtcgctatattaaagcttatattttgctggattactgctaaatacaaaagaaagttcaatatgttttcatttctgtagggaaaatgggattgctgctttaaatttctgagctagggattttttggcagctgcagtgttggcgactattgtaaaattctctttgtttctctctgtaaatagcacctgctaacattacaatttgtatttatgtttaaagaaggcatcatttggtgaacagaactaggaaatgaatttttagctcttaaaagcatttgctttgagaccgcacaggagtgtctttccttgtaaaacagtgatgataatttctgccttggccctaccttgaagcaatgttgtgtgaagggatgaagaatctaaaagtcttcataagtccttgggagaggtgctagaaaaatataaggcactatcataattacagtgatgtccttgctgttactactcaaatcacccacaaatttccccaaagactgcgctagctgtcaaataaaagacagtgaaattgacctga

SEQ ID NO: 7416 - DNA, 5590 bp, Homo sapiens
  source 1..5590: mol_type = unassigned DNA
agcgctcttgcggccacaggcgcggcgtcctcggcggcgggcggcagctagcgggagccgggacgccggtgcagccgcagcgcgcggaggaacccgggtgtgccgggagctgggcggccacgtccggacgggaccgagacccctcgtagcgcattgcggcgacctcgccttccccggccgcgagcgcgccgctgcttgaaaagccgcggaacccaaggacttttctccggtccgagctcggggcgccccgcagggcgcacggtacccgtgctgcagtcgggcacgccgcggcgccggggcctccgcagggcgatggagcccggtctgcaaggaaagtgaggcgccgccgctgcgttctggaggaggggggcacaaggtctggagaccccgggtggcggacgggagccctccccccgccccgcctccggggcaccagctccggctccattgttcccgcccgggctggaggcgccgagcaccgagcgccgccgggagtcgagcgccggccgcggagctcttgcgaccccgccaggacccgaacagagcccgggggcggcgggccggagccggggacgcgggcacacgcccgctcgcacaagccacggcggactctcccgaggcggaacctccacgccgagcgagggtcagtttgaaaaggaggatcgagctcactgtggagtatccatggagatgtggagccttgtcaccaacctctaactgcagaactgggatgtggagctggaagtgcctcctcttctgggctgtgctggtcacagccacactctgcaccgctaggccgtccccgaccttgcctgaacaagcccagccctggggagcccctgtggaagtggagtccttcctggtccaccccggtgacctgctgcagcttcgctgtcggctgcgggacgatgtgcagagcatcaactggctgcgggacggggtgcagctggcggaaagcaaccgcacccgcatcacaggggaggaggtggaggtgcaggactccgtgcccgcagactccggcctctatgcttgcgtaaccagcagcccctcgggcagtgacaccacctacttctccgtcaatgtttcagatgctctcccctcctcggaggatgatgatgatgatgatgactcctcttcagaggagaaagaaacagataacaccaaaccaaaccgtatgcccgtagctccatattggacatccccagaaaagatggaaaagaaattgcatgcagtgccggctgccaagacagtgaagttcaaatgcccttccagtgggaccccaaaccccacactgcgctggttgaaaaatggcaaagaattcaaacctgaccacagaattggaggctacaaggtccgttatgccacctggagcatcataatggactctgtggtgccctctgacaagggcaactacacctgcattgtggagaatgagtacggcagcatcaaccacacataccagctggatgtcgtggagcggtcccctcaccggcccatcctgcaagcagggttgcccgccaacaaaacagtggccctgggtagcaacgtggagttcatgtgtaaggtgtacagtgacccgcagccgcacatccagtggctaaagcacatcgaggtgaatgggagcaagattggcccagacaacctgccttatgtccagatcttgaagactgctggagttaataccaccgacaaagagatggaggtgcttcacttaagaaatgtctcctttgaggacgcaggggagtatacgtgcttggcgggtaactctatcggactctcccatcactctgcatggttgaccgttctggaagccctggaagagaggccggcagtgatgacctcgcccctgtacctggagatcatcatctattgcacaggggccttcctcatctcctgcatggtggggtcggtcatcgtctacaagatgaagagtggtaccaagaagagtgacttccacagccagatggctgtgcacaagctggccaagagcatccctctgcgcagacaggtgtctgctgactccagtgcatccatgaactctggggttcttctggttcggccatcacggctctcctccagtgggactcccatgctagcaggggtctctgagtatgagcttcccgaagaccctcgctgggagctgcctcgggacagactggtcttaggcaaacccctgggagagggctgctttgggcaggtggtgttggcagaggctatcgggctggacaaggacaaacccaaccgtgtgaccaaagtggctgtgaagatgttgaagtcggacgcaacagagaaagacttgtcagacctgatctcagaaatggagatgatgaagatgatcgggaagcataagaatatcatcaacctgctgggggcctgcacgcaggatggtcccttgtatgtcatcgtggagtatgcctccaagggcaacctgcgggagtacctgcaggcccggaggcccccagggctggaatactgctacaaccccagccacaacccagaggagcagctctcctccaaggacctggtgtcctgcgcctaccaggtggcccgaggcatggagtatctggcctccaagaagtgcatacaccgagacctggcagccaggaatgtcctggtgacagaggacaatgtgatgaagatagcagactttggcctcgcacgggacattcaccacatcgactactataaaaagacaaccaacggccgactgcctgtgaagtggatggcacccgaggcattatttgaccggatctacacccaccagagtgatgtgtggtctttcggggtgctcctgtgggagatcttcactctgggcggctccccataccccggtgtgcctgtggaggaacttttcaagctgctgaaggagggtcaccgcatggacaagcccagtaactgcaccaacgagctgtacatgatgatgcgggactgctggcatgcagtgccctcacagagacccaccttcaagcagctggtggaagacctggaccgcatcgtggccttgacctccaaccaggagtacctggacctgtccatgcccctggaccagtactcccccagctttcccgacacccggagctctacgtgctcctcaggggaggattccgtcttctctcatgagccgctgcccgaggagccctgcctgccccgacacccagcccagcttgccaatggcggactcaaacgccgctgactgccacccacacgccctccccagactccaccgtcagctgtaaccctcacccacagcccctgctgggcccaccacctgtccgtccctgtcccctttcctgctggcaggagccggctgcctaccaggggccttcctgtgtggcctgccttcaccccactcagctcacctctccctccacctcctctccacctgctggtgagaggtgcaaagaggcagatctttgctgccagccacttcatcccctcccagatgttggaccaacacccctccctgccaccaggcactgcctggagggcagggagtgggagccaatgaacaggcatgcaagtgagagcttcctgagctttctcctgtcggtttggtctgttttgccttcacccataagcccctcgcactctggtggcaggtgccttgtcctcagggctacagcagtagggaggtcagtgcttcgtgcctcgattgaaggtgacctctgccccagataggtggtgccagtggcttattaattccgatactagtttgctttgctgaccaaatgcctggtaccagaggatggtgaggcgaaggccaggttgggggcagtgttgtggccctggggcccagccccaaactgggggctctgtatatagctatgaagaaaacacaaagtgtataaatctgagtatatatttacatgtctttttaaaagggtcgttaccagagatttacccatcgggtaagatgctcctggtggctgggaggcatcagttgctatatattaaaaacaaaaaagaaaaaaaaggaaaatgtttttaaaaaggtcatatattttttgctacttttgctgttttatttttttaaattatgttctaaacctattttcagtttaggtccctcaataaaaattgctgctgcttcatttatctatgggctgtatgaaaagggtgggaatgtccactggaaagaagggacacccacgggccctggggctaggtctgtcccgagggcaccgcatgctcccggcgcaggttccttgtaacctcttcttcctaggtcctgcacccagacctcacgacgcacctcctgcctctccgctgcttttggaaagtcagaaaaagaagatgtctgcttcgagggcaggaaccccatccatgcagtagaggcgctgggcagagagtcaaggcccagcagccatcgaccatggatggtttcctccaaggaaaccggtggggttgggctggggagggggcacctacctaggaatagccacggggtagagctacagtgattaagaggaaagcaagggcgcggttgctcacgcctgtaatcccagcactttgggacaccgaggtgggcagatcacttcaggtcaggagtttgagaccagcctggccaacttagtgaaaccccatctctactaaaaatgcaaaaattatccaggcatggtggcacacgcctgtaatcccagctccacaggaggctgaggcagaatcccttgaagctgggaggcggaggttgcagtgagccgagattgcgccattgcactccagcctgggcaacagagaaaacaaaaaggaaaacaaatgatgaaggtctgcagaaactgaaacccagacatgtgtctgccccctctatgtgggcatggttttgccagtgcttctaagtgcaggagaacatgtcacctgaggctagttttgcattcaggtccctggcttcgtttcttgttggtatgcctccccagatcgtccttcctgtatccatgtgaccagactgtatttgttgggactgtcgcagatcttggcttcttacagttcttcctgtccaaactccatcctgtccctcaggaacggggggaaaattctccgaatgtttttggttttttggctgcttggaatttacttctgccacctgctggtcatcactgtcctcactaagtggattctggctcccccgtacctcatggctcaaactaccactcctcagtcgctatattaaagcttatattttgctggattactgctaaatacaaaagaaagttcaatatgttttcatttctgtagggaaaatgggattgctgctttaaatttctgagctagggattttttggcagctgcagtgttggcgactattgtaaaattctctttgtttctctctgtaaatagcacctgctaacattacaatttgtatttatgtttaaagaaggcatcatttggtgaacagaactaggaaatgaatttttagctcttaaaagcatttgctttgagaccgcacaggagtgtctttccttgtaaaacagtgatgataatttctgccttggccctaccttgaagcaatgttgtgtgaagggatgaagaatctaaaagtcttcataagtccttgggagaggtgctagaaaaatataaggcactatcataatta

SEQ ID NO: 7417 - DNA, 570 bp, Homo sapiens
  source 1..570: mol_type = unassigned DNA; mol_type = unassigned DNA
ccaccttcaagcagctggtggaagacctggaccgcatcgtggccttgacctccaaccaggtcctgcacccagacctcacgacgcacctcctgcctctccgctgcttttggaaagtcagaaaaagaagatgtctgcttcgagggcaggaaccccatccatgcagtagaggcgctgggcagagagtcaaggcccagcagccatcgaccatggatggtttcctccaaggaaaccggtggggttgggctggggagggggcacctacctaggaatagccacggggtagagctacagtgattaagaggaaagcaagggcgcggttgctcacgcctgtaatcccagcactttgggacaccgaggtgggcagatcacttcaggtcaggagtttgagaccagcctggccaacttagtgaaaccccatctctactaaaaatgcaaaaattatccaggcatggtggcacacgcctgtaatcccagctccacaggaggctgaggcagaatcccttgaagctgggaggcggaggttgcagtgagccgagattgcgccattgcactccagcctgggcaacagag

SEQ ID NO: 7418 - DNA, 3680 bp, Homo sapiens
  source 1..3680: mol_type = unassigned DNA
gctttgcccgccgcagcccagccggggccggcgcctccctccgctcgccgcccgcccctttcacctcctggctccctcccgggcgatccgcgccccttgggtctcccctcccttccctccgtccgcgtctcctgcgccccctccctgcgctcgtcccgccgctcttcccgccgcccaacttttcctccaactcgcgctcgggagctggcgaggcggcggcggctcctcaggtcagtttgaaaaggaggatcgagctcactgtggagtatccatggagatgtggagccttgtcaccaacctctaactgcagaactgggatgtggagctggaagtgcctcctcttctgggctgtgctggtcacagccacactctgcaccgctaggccgtccccgaccttgcctgaacaagcccagccctggggagcccctgtggaagtggagtccttcctggtccaccccggtgacctgctgcagcttcgctgtcggctgcgggacgatgtgcagagcatcaactggctgcgggacggggtgcagctggcggaaagcaaccgcacccgcatcacaggggaggaggtggaggtgcaggactccgtgcccgcagactccggcctctatgcttgcgtaaccagcagcccctcgggcagtgacaccacctacttctccgtcaatgtttcagatgctctcccctcctcggaggatgatgatgatgatgatgactcctcttcagaggagaaagaaacagataacaccaaaccaaaccccgtagctccatattggacatccccagaaaagatggaaaagaaattgcatgcagtgccggctgccaagacagtgaagttcaaatgcccttccagtgggaccccaaaccccacactgcgctggttgaaaaatggcaaagaattcaaacctgaccacagaattggaggctacaaggtccgttatgccacctggagcatcataatggactctgtggtgccctctgacaagggcaactacacctgcattgtggagaatgagtacggcagcatcaaccacacataccagctggatgtcgtggagcggtcccctcaccggcccatcctgcaagcagggttgcccgccaacaaaacagtggccctgggtagcaacgtggagttcatgtgtaaggtgtacagtgacccgcagccgcacatccagtggctaaagcacatcgaggtgaatgggagcaagattggcccagacaacctgccttatgtccagatcttgaagactgctggagttaataccaccgacaaagagatggaggtgcttcacttaagaaatgtctcctttgaggacgcaggggagtatacgtgcttggcgggtaactctatcggactctcccatcactctgcatggttgaccgttctggaagccctggaagagaggccggcagtgatgacctcgcccctgtacctggagatcatcatctattgcacaggggccttcctcatctcctgcatggtggggtcggtcatcgtctacaagatgaagagtggtaccaagaagagtgacttccacagccagatggctgtgcacaagctggccaagagcatccctctgcgcagacaggtaacagtgtctgctgactccagtgcatccatgaactctggggttcttctggttcggccatcacggctctcctccagtgggactcccatgctagcaggggtctctgagtatgagcttcccgaagaccctcgctgggagctgcctcgggacagactggtcttaggcaaacccctgggagagggctgctttgggcaggtggtgttggcagaggctatcgggctggacaaggacaaacccaaccgtgtgaccaaagtggctgtgaagatgttgaagtcggacgcaacagagaaagacttgtcagacctgatctcagaaatggagatgatgaagatgatcgggaagcataagaatatcatcaacctgctgggggcctgcacgcaggatggtcccttgtatgtcatcgtggagtatgcctccaagggcaacctgcgggagtacctgcaggcccggaggcccccagggctggaatactgctacaaccccagccacaacccagaggagcagctctcctccaaggacctggtgtcctgcgcctaccaggtggcccgaggcatggagtatctggcctccaagaagtgcatacaccgagacctggcagccaggaatgtcctggtgacagaggacaatgtgatgaagatagcagactttggcctcgcacgggacattcaccacatcgactactataaaaagacaaccaacggccgactgcctgtgaagtggatggcacccgaggcattatttgaccggatctacacccaccagagtgatgtgtggtctttcggggtgctcctgtgggagatcttcactctgggcggctccccataccccggtgtgcctgtggaggaacttttcaagctgctgaaggagggtcaccgcatggacaagcccagtaactgcaccaacgagctgtacatgatgatgcgggactgctggcatgcagtgccctcacagagacccaccttcaagcagctggtggaagacctggaccgcatcgtggccttgacctccaaccaggagtacctggacctgtccatgcccctggaccagtactcccccagctttcccgacacccggagctctacgtgctcctcaggggaggattccgtcttctctcatgagccgctgcccgaggagccctgcctgccccgacacccagcccagcttgccaatggcggactcaaacgccgctgactgccacccacacgccctccccagactccaccgtcagctgtaaccctcacccacagcccctgctgggcccaccacctgtccgtccctgtcccctttcctgctggcaggagccggctgcctaccaggggccttcctgtgtggcctgccttcaccccactcagctcacctctccctccacctcctctccacctgctggtgagaggtgcaaagaggcagatctttgctgccagccacttcatcccctcccagatgttggaccaacacccctccctgccaccaggcactgcctggagggcagggagtgggagccaatgaacaggcatgcaagtgagagcttcctgagctttctcctgtcggtttggtctgttttgccttcacccataagcccctcgcactctggtggcaggtgccttgtcctcagggctacagcagtagggaggtcagtgcttcgtgcctcgattgaaggtgacctctgccccagataggtggtgccagtggcttattaattccgatactagtttgctttgctgaccaaatgcctggtaccagaggatggtgaggcgaaggccaggttgggggcagtgttgtggccctggggcccagccccaaactgggggctctgtatatagctatgaagaaaacacaaagtgtataaatctgagtatatatttacatgtctttttaaaagggtcgttaccagagatttacccatcgggtaagatgctcctggtggctgggaggcatcagttgctatatattaaaaacaaaaaagaaaaaaaaggaaaatgtttttaaaaaggtcatatattttttgctacttttgctgttttatttttttaaattatgttctaaacctattttcagtttaggtccctcaataaaaattgctgctgcttcatt

SEQ ID NO: 7419 - DNA, 3824 bp, Homo sapiens
  source 1..3824: mol_type = unassigned DNA
cttgcggccacaggcgcggcgtcctcggcggcgggcggcagctagcgggagccgggacgccggtgcagccgcagcgcgcggaggaacccgggtgtgccgggagctgggcggccacgtccggacgggaccgagacccctcgtagcgcattgcggcgacctcgccttccccggccgcgagcgcgccgctgcttgaaaagccgcggaacccaaggacttttctccggtccgagctcggggcgccccgcagggcgcacggtacccgtgctgcagtcgggcacgccgcggcgccggggcctccgcagggcgatggagcccggtctgcaaggaaagtgaggcgccgccgctgcgttctggaggaggggggcacaaggtctggagaccccgggtggcggacgggagccctccccccgccccgcctccggggcaccagctccggctccattgttcccgcccgggctggaggcgccgagcaccgagcgccgccgggagtcgagcgccggccgcggagctcttgcgaccccgccaggacccgaacagagcccgggggcggcgggccggagccggggacgcgggcacacgcccgctcgcacaagccacggcggactctcccgaggcggaacctccacgccgagcgagggtcagtttgaaaaggaggatcgagctcactgtggagtatccatggagatgtggagccttgtcaccaacctctaactgcagaactgggatgtggagctggaagtgcctcctcttctgggctgtgctggtcacagccacactctgcaccgctaggccgtccccgaccttgcctgaacaagatgctctcccctcctcggaggatgatgatgatgatgatgactcctcttcagaggagaaagaaacagataacaccaaaccaaaccgtatgcccgtagctccatattggacatccccagaaaagatggaaaagaaattgcatgcagtgccggctgccaagacagtgaagttcaaatgcccttccagtgggaccccaaaccccacactgcgctggttgaaaaatggcaaagaattcaaacctgaccacagaattggaggctacaaggtccgttatgccacctggagcatcataatggactctgtggtgccctctgacaagggcaactacacctgcattgtggagaatgagtacggcagcatcaaccacacataccagctggatgtcgtggagcggtcccctcaccggcccatcctgcaagcagggttgcccgccaacaaaacagtggccctgggtagcaacgtggagttcatgtgtaaggtgtacagtgacccgcagccgcacatccagtggctaaagcacatcgaggtgaatgggagcaagattggcccagacaacctgccttatgtccagatcttgaagactgctggagttaataccaccgacaaagagatggaggtgcttcacttaagaaatgtctcctttgaggacgcaggggagtatacgtgcttggcgggtaactctatcggactctcccatcactctgcatggttgaccgttctggaagccctggaagagaggccggcagtgatgacctcgcccctgtacctggagatcatcatctattgcacaggggccttcctcatctcctgcatggtggggtcggtcatcgtctacaagatgaagagtggtaccaagaagagtgacttccacagccagatggctgtgcacaagctggccaagagcatccctctgcgcagacaggtaacagtgtctgctgactccagtgcatccatgaactctggggttcttctggttcggccatcacggctctcctccagtgggactcccatgctagcaggggtctctgagtatgagcttcccgaagaccctcgctgggagctgcctcgggacagactggtcttaggcaaacccctgggagagggctgctttgggcaggtggtgttggcagaggctatcgggctggacaaggacaaacccaaccgtgtgaccaaagtggctgtgaagatgttgaagtcggacgcaacagagaaagacttgtcagacctgatctcagaaatggagatgatgaagatgatcgggaagcataagaatatcatcaacctgctgggggcctgcacgcaggatggtcccttgtatgtcatcgtggagtatgcctccaagggcaacctgcgggagtacctgcaggcccggaggcccccagggctggaatactgctacaaccccagccacaacccagaggagcagctctcctccaaggacctggtgtcctgcgcctaccaggtggcccgaggcatggagtatctggcctccaagaagtgcatacaccgagacctggcagccaggaatgtcctggtgacagaggacaatgtgatgaagatagcagactttggcctcgcacgggacattcaccacatcgactactataaaaagacaaccaacggccgactgcctgtgaagtggatggcacccgaggcattatttgaccggatctacacccaccagagtgatgtgtggtctttcggggtgctcctgtgggagatcttcactctgggcggctccccataccccggtgtgcctgtggaggaacttttcaagctgctgaaggagggtcaccgcatggacaagcccagtaactgcaccaacgagctgtacatgatgatgcgggactgctggcatgcagtgccctcacagagacccaccttcaagcagctggtggaagacctggaccgcatcgtggccttgacctccaaccaggagtacctggacctgtccatgcccctggaccagtactcccccagctttcccgacacccggagctctacgtgctcctcaggggaggattccgtcttctctcatgagccgctgcccgaggagccctgcctgccccgacacccagcccagcttgccaatggcggactcaaacgccgctgactgccacccacacgccctccccagactccaccgtcagctgtaaccctcacccacagcccctgctgggcccaccacctgtccgtccctgtcccctttcctgctggcaggagccggctgcctaccaggggccttcctgtgtggcctgccttcaccccactcagctcacctctccctccacctcctctccacctgctggtgagaggtgcaaagaggcagatctttgctgccagccacttcatcccctcccagatgttggaccaacacccctccctgccaccaggcactgcctggagggcagggagtgggagccaatgaacaggcatgcaagtgagagcttcctgagctttctcctgtcggtttggtctgttttgccttcacccataagcccctcgcactctggtggcaggtgccttgtcctcagggctacagcagtagggaggtcagtgcttcgtgcctcgattgaaggtgacctctgccccagataggtggtgccagtggcttattaattccgatactagtttgctttgctgaccaaatgcctggtaccagaggatggtgaggcgaaggccaggttgggggcagtgttgtggccctggggcccagccccaaactgggggctctgtatatagctatgaagaaaacacaaagtgtataaatctgagtatatatttacatgtctttttaaaagggtcgttaccagagatttacccatcgggtaagatgctcctggtggctgggaggcatcagttgctatatattaaaaacaaaaaagaaaaaaaaggaaaatgtttttaaaaaggtcatatattttttgctacttttgctgttttatttttttaaattatgttctaaacctattttcagtttaggtccctcaataaaaattgctgctgcttca

SEQ ID NO: 7420 - DNA, 4157 bp, Homo sapiens
  source 1..4157: mol_type = unassigned DNA
gcgctcttgcggccacaggcgcggcgtcctcggcggcgggcggcagctagcgggagccgggacgccggtgcagccgcagcgcgcggaggaacccgggtgtgccgggagctgggcggccacgtccggacgggaccgagacccctcgtagcgcattgcggcgacctcgccttccccggccgcgagcgcgccgctgcttgaaaagccgcggaacccaaggacttttctccggtccgagctcggggcgccccgcagggcgcacggtacccgtgctgcagtcgggcacgccgcggcgccggggcctccgcagggcgatggagcccggtctgcaaggaaagtgaggcgccgccgctgcgttctggaggaggggggcacaaggtctggagaccccgggtggcggacgggagccctccccccgccccgcctccggggcaccagctccggctccattgttcccgcccgggctggaggcgccgagcaccgagcgccgccgggagtcgagcgccggccgcggagctcttgcgaccccgccaggacccgaacagagcccgggggcggcgggccggagccggggacgcgggcacacgcccgctcgcacaagccacggcggactctcccgaggcggaacctccacgccgagcgagggtcagtttgaaaaggaggatcgagctcactgtggagtatccatggagatgtggagccttgtcaccaacctctaactgcagaactgggatgtggagctggaagtgcctcctcttctgggctgtgctggtcacagccacactctgcaccgctaggccgtccccgaccttgcctgaacaaggatggcagctgtgacccgggatttcggtgagatgcttctgcactctggccgggtcctgccagccgaagcccagccctggggagcccctgtggaagtggagtccttcctggtccaccccggtgacctgctgcagcttcgctgtcggctgcgggacgatgtgcagagcatcaactggctgcgggacggggtgcagctggcggaaagcaaccgcacccgcatcacaggggaggaggtggaggtgcaggactccgtgcccgcagactccggcctctatgcttgcgtaaccagcagcccctcgggcagtgacaccacctacttctccgtcaatgtttcagatgctctcccctcctcggaggatgatgatgatgatgatgactcctcttcagaggagaaagaaacagataacaccaaaccaaaccgtatgcccgtagctccatattggacatccccagaaaagatggaaaagaaattgcatgcagtgccggctgccaagacagtgaagttcaaatgcccttccagtgggaccccaaaccccacactgcgctggttgaaaaatggcaaagaattcaaacctgaccacagaattggaggctacaaggtccgttatgccacctggagcatcataatggactctgtggtgccctctgacaagggcaactacacctgcattgtggagaatgagtacggcagcatcaaccacacataccagctggatgtcgtggagcggtcccctcaccggcccatcctgcaagcagggttgcccgccaacaaaacagtggccctgggtagcaacgtggagttcatgtgtaaggtgtacagtgacccgcagccgcacatccagtggctaaagcacatcgaggtgaatgggagcaagattggcccagacaacctgccttatgtccagatcttgaagactgctggagttaataccaccgacaaagagatggaggtgcttcacttaagaaatgtctcctttgaggacgcaggggagtatacgtgcttggcgggtaactctatcggactctcccatcactctgcatggttgaccgttctggaagccctggaagagaggccggcagtgatgacctcgcccctgtacctggagatcatcatctattgcacaggggccttcctcatctcctgcatggtggggtcggtcatcgtctacaagatgaagagtggtaccaagaagagtgacttccacagccagatggctgtgcacaagctggccaagagcatccctctgcgcagacaggtgtctgctgactccagtgcatccatgaactctggggttcttctggttcggccatcacggctctcctccagtgggactcccatgctagcaggggtctctgagtatgagcttcccgaagaccctcgctgggagctgcctcgggacagactggtcttaggcaaacccctgggagagggctgctttgggcaggtggtgttggcagaggctatcgggctggacaaggacaaacccaaccgtgtgaccaaagtggctgtgaagatgttgaagtcggacgcaacagagaaagacttgtcagacctgatctcagaaatggagatgatgaagatgatcgggaagcataagaatatcatcaacctgctgggggcctgcacgcaggatggtcccttgtatgtcatcgtggagtatgcctccaagggcaacctgcgggagtacctgcaggcccggaggcccccagggctggaatactgctacaaccccagccacaacccagaggagcagctctcctccaaggacctggtgtcctgcgcctaccaggtggcccgaggcatggagtatctggcctccaagaagtgcatacaccgagacctggcagccaggaatgtcctggtgacagaggacaatgtgatgaagatagcagactttggcctcgcacgggacattcaccacatcgactactataaaaagacaaccaacggccgactgcctgtgaagtggatggcacccgaggcattatttgaccggatctacacccaccagagtgatgtgtggtctttcggggtgctcctgtgggagatcttcactctgggcggctccccataccccggtgtgcctgtggaggaacttttcaagctgctgaaggagggtcaccgcatggacaagcccagtaactgcaccaacgagctgtacatgatgatgcgggactgctggcatgcagtgccctcacagagacccaccttcaagcagctggtggaagacctggaccgcatcgtggccttgacctccaaccaggagtacctggacctgtccatgcccctggaccagtactcccccagctttcccgacacccggagctctacgtgctcctcaggggaggattccgtcttctctcatgagccgctgcccgaggagccctgcctgccccgacacccagcccagcttgccaatggcggactcaaacgccgctgactgccacccacacgccctccccagactccaccgtcagctgtaaccctcacccacagcccctgctgggcccaccacctgtccgtccctgtcccctttcctgctggcaggagccggctgcctaccaggggccttcctgtgtggcctgccttcaccccactcagctcacctctccctccacctcctctccacctgctggtgagaggtgcaaagaggcagatctttgctgccagccacttcatcccctcccagatgttggaccaacacccctccctgccaccaggcactgcctggagggcagggagtgggagccaatgaacaggcatgcaagtgagagcttcctgagctttctcctgtcggtttggtctgttttgccttcacccataagcccctcgcactctggtggcaggtgccttgtcctcagggctacagcagtagggaggtcagtgcttcgtgcctcgattgaaggtgacctctgccccagataggtggtgccagtggcttattaattccgatactagtttgctttgctgaccaaatgcctggtaccagaggatggtgaggcgaaggccaggttgggggcagtgttgtggccctggggcccagccccaaactgggggctctgtatatagctatgaagaaaacacaaagtgtataaatctgagtatatatttacatgtctttttaaaagggtcgttaccagagatttacccatcgggtaagatgctcctggtggctgggaggcatcagttgctatatattaaaaacaaaaaagaaaaaaaaggaaaatgtttttaaaaaggtcatatattttttgctacttttgctgttttatttttttaaattatgttctaaacctattttcagtttaggtccctcaataaaaattgctgctgcttc

SEQ ID NO: 7421 - DNA, 3816 bp, Homo sapiens
  source 1..3816: mol_type = unassigned DNA
cttgcggccacaggcgcggcgtcctcggcggcgggcggcagctagcgggagccgggacgccggtgcagccgcagcgcgcggaggaacccgggtgtgccgggagctgggcggccacgtccggacgggaccgagacccctcgtagcgcattgcggcgacctcgccttccccggccgcgagcgcgccgctgcttgaaaagccgcggaacccaaggacttttctccggtccgagctcggggcgccccgcagggcgcacggtacccgtgctgcagtcgggcacgccgcggcgccggggcctccgcagggcgatggagcccggtctgcaaggaaagtgaggcgccgccgctgcgttctggaggaggggggcacaaggtctggagaccccgggtggcggacgggagccctccccccgccccgcctccggggcaccagctccggctccattgttcccgcccgggctggaggcgccgagcaccgagcgccgccgggagtcgagcgccggccgcggagctcttgcgaccccgccaggacccgaacagagcccgggggcggcgggccggagccggggacgcgggcacacgcccgctcgcacaagccacggcggactctcccgaggcggaacctccacgccgagcgagggtcagtttgaaaaggaggatcgagctcactgtggagtatccatggagatgtggagccttgtcaccaacctctaactgcagaactgggatgtggagctggaagtgcctcctcttctgggctgtgctggtcacagccacactctgcaccgctaggccgtccccgaccttgcctgaacaagatgctctcccctcctcggaggatgatgatgatgatgatgactcctcttcagaggagaaagaaacagataacaccaaaccaaaccccgtagctccatattggacatccccagaaaagatggaaaagaaattgcatgcagtgccggctgccaagacagtgaagttcaaatgcccttccagtgggaccccaaaccccacactgcgctggttgaaaaatggcaaagaattcaaacctgaccacagaattggaggctacaaggtccgttatgccacctggagcatcataatggactctgtggtgccctctgacaagggcaactacacctgcattgtggagaatgagtacggcagcatcaaccacacataccagctggatgtcgtggagcggtcccctcaccggcccatcctgcaagcagggttgcccgccaacaaaacagtggccctgggtagcaacgtggagttcatgtgtaaggtgtacagtgacccgcagccgcacatccagtggctaaagcacatcgaggtgaatgggagcaagattggcccagacaacctgccttatgtccagatcttgaagactgctggagttaataccaccgacaaagagatggaggtgcttcacttaagaaatgtctcctttgaggacgcaggggagtatacgtgcttggcgggtaactctatcggactctcccatcactctgcatggttgaccgttctggaagccctggaagagaggccggcagtgatgacctcgcccctgtacctggagatcatcatctattgcacaggggccttcctcatctcctgcatggtggggtcggtcatcgtctacaagatgaagagtggtaccaagaagagtgacttccacagccagatggctgtgcacaagctggccaagagcatccctctgcgcagacaggtaacagtgtctgctgactccagtgcatccatgaactctggggttcttctggttcggccatcacggctctcctccagtgggactcccatgctagcaggggtctctgagtatgagcttcccgaagaccctcgctgggagctgcctcgggacagactggtcttaggcaaacccctgggagagggctgctttgggcaggtggtgttggcagaggctatcgggctggacaaggacaaacccaaccgtgtgaccaaagtggctgtgaagatgttgaagtcggacgcaacagagaaagacttgtcagacctgatctcagaaatggagatgatgaagatgatcgggaagcataagaatatcatcaacctgctgggggcctgcacgcaggatggtcccttgtatgtcatcgtggagtatgcctccaagggcaacctgcgggagtacctgcaggcccggaggcccccagggctggaatactgctacaaccccagccacaacccagaggagcagctctcctccaaggacctggtgtcctgcgcctaccaggtggcccgaggcatggagtatctggcctccaagaagtgcatacaccgagacctggcagccaggaatgtcctggtgacagaggacaatgtgatgaagatagcagactttggcctcgcacgggacattcaccacatcgactactataaaaagacaaccaacggccgactgcctgtgaagtggatggcacccgaggcattatttgaccggatctacacccaccagagtgatgtgtggtctttcggggtgctcctgtgggagatcttcactctgggcggctccccataccccggtgtgcctgtggaggaacttttcaagctgctgaaggagggtcaccgcatggacaagcccagtaactgcaccaacgagctgtacatgatgatgcgggactgctggcatgcagtgccctcacagagacccaccttcaagcagctggtggaagacctggaccgcatcgtggccttgacctccaaccaggagtacctggacctgtccatgcccctggaccagtactcccccagctttcccgacacccggagctctacgtgctcctcaggggaggattccgtcttctctcatgagccgctgcccgaggagccctgcctgccccgacacccagcccagcttgccaatggcggactcaaacgccgctgactgccacccacacgccctccccagactccaccgtcagctgtaaccctcacccacagcccctgctgggcccaccacctgtccgtccctgtcccctttcctgctggcaggagccggctgcctaccaggggccttcctgtgtggcctgccttcaccccactcagctcacctctccctccacctcctctccacctgctggtgagaggtgcaaagaggcagatctttgctgccagccacttcatcccctcccagatgttggaccaacacccctccctgccaccaggcactgcctggagggcagggagtgggagccaatgaacaggcatgcaagtgagagcttcctgagctttctcctgtcggtttggtctgttttgccttcacccataagcccctcgcactctggtggcaggtgccttgtcctcagggctacagcagtagggaggtcagtgcttcgtgcctcgattgaaggtgacctctgccccagataggtggtgccagtggcttattaattccgatactagtttgctttgctgaccaaatgcctggtaccagaggatggtgaggcgaaggccaggttgggggcagtgttgtggccctggggcccagccccaaactgggggctctgtatatagctatgaagaaaacacaaagtgtataaatctgagtatatatttacatgtctttttaaaagggtcgttaccagagatttacccatcgggtaagatgctcctggtggctgggaggcatcagttgctatatattaaaaacaaaaaagaaaaaaaaggaaaatgtttttaaaaaggtcatatattttttgctacttttgctgttttatttttttaaattatgttctaaacctattttcagtttaggtccctcaataaaaattgctgctgctt

SEQ ID NO: 7422 - DNA, 5528 bp, Homo sapiens
  source 1..5528: mol_type = unassigned DNA
tgcagacaccccggtgggtccagtgctcccacccagggacagagaaggatggggcacggggagggagagtggatggtggggggcctgagggtgtgcccagtcagagggctgaggagaaaggacctttgtgtgcgacagctcctgctgccagagcaagtgtgggttttatggcagctgtggcctcccgtcctaatatagtcaacagctccaaatcccctgccctgacacctgttagcgagaggttccctgagctgacctctccttgggctgcccccccagcatgtgcatctgacgcgtcgagggccagacccccaccctctccgaatcacacgcatcctggtcagcccccagttgacaaattgccttctctcgacttgggcaggggctgctggggttttgaggggcggggtttgttcagctgttgctagggaagggtgaggctgagctatcccaaaggaaatggggtgttcctctggcaagtggcaatcttggcaaagaactgagcatctggggagggggcaactccggacacaaagaagtcctggggagggccgacctttccccttaggatgggggaaatgaaatgcgcttaatgctgctacagctgcttcctaactttgcctctttcttcctttgacttttggaggagtggggtggaaaagagatgggggttcccaggcagccagctgttttccccactgacccatgctccaattcccactgccctggctcagtagcctccagtaagtgatgcccaggatggtgcggctccgtgtggccagcgtaattccctttgtctctcccctcctcccctctccctgtcttcctctctcgccccttggcttcccttcccggccccgtggtggctgcagcccagccctggggagcccctgtggaagtggagtccttcctggtccaccccggtgacctgctgcagcttcgctgtcggctgcgggacgatgtgcagagcatcaactggctgcgggacggggtgcagctggcggaaagcaaccgcacccgcatcacaggggaggaggtggaggtgcaggactccgtgcccgcagactccggcctctatgcttgcgtaaccagcagcccctcgggcagtgacaccacctacttctccgtcaatgtttcaggttggtagccaagccctgcccttgcccctccctagacccaccccctccagccctctctgccagtttcagaggaaggtgaacctcctccccctccgtgatctgcccccactctgcttcagaaactgctgcccactaacattgctccctgcctgccgcgtggcttggctctcagagaggtgactaggtggggtgggccccagggccggagatctggggcttccaggacacacctcggaggtgattgccagggctcttgggatgttaagaccctgtgatttttttccaccacagcttgcccagatctccaggaggctaagtggtgctcggccagcttccactccatcactcccttgccatttggacttggtactcggcttagtgattagaggccctgaacaggtggtggtatccctgctctgctggagaggaacccaggtgcaccgcaagggagctgtgcgagggcagccagggagccctggagctctgtgaacttgggaacttgccactcttagaatgtgactttcacaaaactaggagttgaggaagtggagctgaaattttctttatgccatttatgcacctcagggtgtggacttggcagcagatccccaaaggtgataggaaggactggagaaagatctggcatgaaccctgatgggtgaccacatgtgtatcaagcgtgttcttacaagaaataaatacttattggggagaggtgttggcagctgctggggtggtgggtgccctatctgctctgattaaggagggcagcccccaaaccttagtagacacatgctagaaaaattctgactgtggggtgtttagcccatcctttggaaatagcatctagccacagtgtgtctagacctgcctgggtttccctatagtcagccgtccaaagaagaatacaggttgcctggctccagcacacccaggtggcaccacaagttgagaaagcgcctttgaatgtaggacggaattaagttaaataggaacagctgaccctgatggaaccacccagtgtgaaggcttccaggcagtgggggcagtgcttcggggaaggaagcaaacacgcacaggaactgttcttaaacagtttccatcccaccaagagatcatcactaagggagcagtgggactgggatccccatggggagggtgtccgtgttcatctggaactgcactagccttggtgaaatctaggggtccctaggaggaacctcagtgccccttcttcttcccatagatgctctcccctcctcggaggatgatgatgatgatgatgactcctcttcagaggagaaagaaacagataacaccaaaccaaaccgtatgcgtgagacactgtttcctatcttactgccctttgggtctgggcattgggtttaagaggggaggggaaggctgaaaggggaggaagaggagggcacatggggtcacggtgcctgttctgctaagtgccaggcactgctcacaggtgttgggcagatgggcaagacacctccaggtcctggcctgggccctgctcctgagcctgaccagctgctcctctccaccctgcctgtctctcttggctttccccgggcagccgtagctccatattggacatccccagaaaagatggaaaagaaattgcatgcagtgccggctgccaagacagtgaagttcaaatgcccttccagtgggaccccaaaccccacactgcgctggttgaaaaatggcaaagaattcaaacctgaccacagaattggaggctacaaggtccgttatgccacctggagcatcataatggactctgtggtgccctctgacaagggcaactacacctgcattgtggagaatgagtacggcagcatcaaccacacataccagctggatgtcgtggagcggtcccctcaccggcccatcctgcaagcagggttgcccgccaacaaaacagtggccctgggtagcaacgtggagttcatgtgtaaggtgtacagtgacccgcagccgcacatccagtggctaaagcacatcgaggtgaatgggagcaagattggcccagacaacctgccttatgtccagatcttgaagactgctggagttaataccaccgacaaagagatggaggtgcttcacttaagaaatgtctcctttgaggacgcaggggagtatacgtgcttggcgggtaactctatcggactctcccatcactctgcatggttgaccgttctggaagccctggaagagaggccggcagtgatgacctcgcccctgtacctggagatcatcatctattgcacaggggccttcctcatctcctgcatggtggggtcggtcatcgtctacaagatgaagagtggtaccaagaagagtgacttccacagccagatggctgtgcacaagctggccaagagcatccctctgcgcagacaggtaacagtgtctgctgactccagtgcatccatgaactctggggttcttctggttcggccatcacggctctcctccagtgggactcccatgctagcaggggtctctgagtatgagcttcccgaagaccctcgctgggagctgcctcgggacagactggtcttaggcaaacccctgggagagggctgctttgggcaggtggtgttggcagaggctatcgggctggacaaggacaaacccaaccgtgtgaccaaagtggctgtgaagatgttgaagtcggacgcaacagagaaagacttgtcagacctgatctcagaaatggagatgatgaagatgatcgggaagcataagaatatcatcaacctgctgggggcctgcacgcaggatggtcccttgtatgtcatcgtggagtatgcctccaagggcaacctgcgggagtacctgcaggcccggaggcccccagggctggaatactgctacaaccccagccacaacccagaggagcagctctcctccaaggacctggtgtcctgcgcctaccaggtggcccgaggcatggagtatctggcctccaagaagtgcatacaccgagacctggcagccaggaatgtcctggtgacagaggacaatgtgatgaagatagcagactttggcctcgcacgggacattcaccacatcgactactataaaaagacaaccaacggccgactgcctgtgaagtggatggcacccgaggcattatttgaccggatctacacccaccagagtgatgtgtggtctttcggggtgctcctgtgggagatcttcactctgggcggctccccataccccggtgtgcctgtggaggaacttttcaagctgctgaaggagggtcaccgcatggacaagcccagtaactgcaccaacgagctgtacatgatgatgcgggactgctggcatgcagtgccctcacagagacccaccttcaagcagctggtggaagacctggaccgcatcgtggccttgacctccaaccaggagtacctggacctgtccatgcccctggaccagtactcccccagctttcccgacacccggagctctacgtgctcctcaggggaggattccgtcttctctcatgagccgctgcccgaggagccctgcctgccccgacacccagcccagcttgccaatggcggactcaaacgccgctgactgccacccacacgccctccccagactccaccgtcagctgtaaccctcacccacagcccctgctgggcccaccacctgtccgtccctgtcccctttcctgctggcaggagccggctgcctaccaggggccttcctgtgtggcctgccttcaccccactcagctcacctctccctccacctcctctccacctgctggtgagaggtgcaaagaggcagatctttgctgccagccacttcatcccctcccagatgttggaccaacacccctccctgccaccaggcactgcctggagggcagggagtgggagccaatgaacaggcatgcaagtgagagcttcctgagctttctcctgtcggtttggtctgttttgccttcacccataagcccctcgcactctggtggcaggtgccttgtcctcagggctacagcagtagggaggtcagtgcttcgtgcctcgattgaaggtgacctctgccccagataggtggtgccagtggcttattaattccgatactagtttgctttgctgaccaaatgcctggtaccagaggatggtgaggcgaaggccaggttgggggcagtgttgtggccctggggcccagccccaaactgggggctctgtatatagctatgaagaaaacacaaagtgtataaatctgagtatatatttacatgtctttttaaaagggtcgttaccagagatttacccatcgggtaagatgctcctggtggctgggaggcatcagttgctatatattaaaaacaaaaaagaaaaaaaa

SEQ ID NO: 7423 - DNA, 2953 bp, Homo sapiens
  source 1..2953: mol_type = unassigned DNA
gtggagtatccatggagatgtggagccttgtcaccaacctctaactgcagaactgggatgtggagctggaagtgcctcctcttctgggctgtgctggtcacagccacactctgcaccgctaggccgtccccgaccttgcctgaacaagatgctctcccctcctcggaggatgatgatgatgatgatgactcctcttcagaggagaaagaaacagataacaccaaaccaaaccccgtagctccatattggacatccccagaaaagatggaaaagaaattgcatgcagtgccggctgccaagacagtgaagttcaaatgcccttccagtgggaccccaaaccccacactgcgctggttgaaaaatggcaaagaattcaaacctgaccacagaattggaggctacaaggtccgttatgccacctggagcatcataatggactctgtggtgccctctgacaagggcaactacacctgcattgtggagaatgagtacggcagcatcaaccacacataccagctggatgtcgtggagcggtcccctcaccggcccatcctgcaagcagggttgcccgccaacaaaacagtggccctgggtagcaacgtggagttcatgtgtaaggtgtacagtgacccgcagccgcacatccagtggctaaagcacatcgaggtgaatgggagcaagattggcccagacaacctgccttatgtccagatcttgaagcattcggggattaatagctcggatgcggaggtgctgaccctgttcaatgtgacagaggcccagagcggggagtatgtgtgtaaggtttccaattatattggtgaagctaaccagtctgcgtggctcactgtcaccagacctgtggcaaaagccctggaagagaggccggcagtgatgacctcgcccctgtacctggagatcatcatctattgcacaggggccttcctcatctcctgcatggtggggtcggtcatcgtctacaagatgaagagtggtaccaagaagagtgacttccacagccagatggctgtgcacaagctggccaagagcatccctctgcgcagacaggtaacagtgtctgctgactccagtgcatccatgaactctggggttcttctggttcggccatcacggctctcctccagtgggactcccatgctagcaggggtctctgagtatgagcttcccgaagaccctcgctgggagctgcctcgggacagactggtcttaggcaaacccctgggagagggctgctttgggcaggtggtgttggcagaggctatcgggctggacaaggacaaacccaaccgtgtgaccaaagtggctgtgaagatgttgaagtcggacgcaacagagaaagacttgtcagacctgatctcagaaatggagatgatgaagatgatcgggaagcataagaatatcatcaacctgctgggggcctgcacgcaggatggtcccttgtatgtcatcgtggagtatgcctccaagggcaacctgcgggagtacctgcaggcccggaggcccccagggctggaatactgctacaaccccagccacaacccagaggagcagctctcctccaaggacctggtgtcctgcgcctaccaggtggcccgaggcatggagtatctggcctccaagaagtgcatacaccgagacctggcagccaggaatgtcctggtgacagaggacaatgtgatgaagatagcagactttggcctcgcacgggacattcaccacatcgactactataaaaagacaaccaacggccgactgcctgtgaagtggatggcacccgaggcattatttgaccggatctacacccaccagagtgatgtgtggtctttcggggtgctcctgtgggagatcttcactctgggcggctccccataccccggtgtgcctgtggaggaacttttcaagctgctgaaggagggtcaccgcatggacaagcccagtaactgcaccaacgagctgtacatgatgatgcgggactgctggcatgcagtgccctcacagagacccaccttcaagcagctggtggaagacctggaccgcatcgtggccttgacctccaaccaggagtacctggacctgtccatgcccctggaccagtactcccccagctttcccgacacccggagctctacgtgctcctcaggggaggattccgtcttctctcatgagccgctgcccgaggagccctgcctgccccgacacccagcccagcttgccaatggcggactcaaacgccgctgactgccacccacacgccctccccagactccaccgtcagctgtaaccctcacccacagcccctgctgggcccaccacctgtccgtccctgtcccctttcctgctggcaggagccggctgcctaccaggggccttcctgtgtggcctgccttcaccccactcagctcacctctccctccacctcctctccacctgctggtgagaggtgcaaagaggcagatctttgctgccagccacttcatcccctcccagatgttggaccaacacccctccctgccaccaggcactgcctggagggcagggagtgggagccaatgaacaggcatgcaagtgagagcttcctgagctttctcctgtcggtttggtctgttttgccttcacccataagcccctcgcactctggtggcaggtgccttgtcctcagggctacagcagtagggaggtcagtgcttcgtgcctcgattgaaggtgacctctgccccagataggtggtgccagtggcttattaattccgatactagtttgctttgctgaccaaatgcctggtaccagaggatggtgaggcgaaggccaggttgggggcagtgttgtggccctggggcccagccccaaactgggggctctgtatatagctatgaagaaaacacaaagtgtataaatctgagtatatatttacatgtctttttaaaagggtcgt

SEQ ID NO: 7424 - DNA, 842 bp, Homo sapiens
  source 1..842: mol_type = unassigned DNA
gtgtcctgcgcctaccaggtggcccgaggcatggagtatctggcctccaagaagtgcatacaccgagacctggcagccaggaatgtcctggtgacagaggacaatgtgatgaagatagcagactttggcctcgcacgggacattcaccacatcgactactataaaaagacaaccaacggccgactgcctgtgaagtggatggcacccgaggcattatttgaccggatctacacccaccagagtgatgtgtggtctttcggggtgctcctgtgggagatcttcactctgggcggctccccataccccggtgtgcctgtggaggaacttttcaagctgctgaaggagggtcaccgcatggacaagcccagtaactgcaccaacgagcttcctgccgcaggtacatgatgatgcgggactgctggcatgcagtgccctcacagagacccaccttcaagcagctggtggaagacctggaccgcatcgtggccttgacctccaaccaggagtacctggacctgtccatgcccctggaccagtactcccccagctttcccgacacccggagctctacgtgctcctcaggggaggattccgtcttctctcatgagccgctgcccgaggagccctgcctgccccgacacccagcccagcttgccaatggcggactcaaacgccgctgactgccacccacacgccctccccagactccaccgtcagctgtaaccctcacccacagcccctgctgggcccaccacctgtccgtccctgtcccctttcctgctggcaggagccggctgcctaccaggggccttcctgtgtggcctgccttcaccccactcagc

SEQ ID NO: 7425 - DNA, 2870 bp, Homo sapiens
  source 1..2870: mol_type = unassigned DNA
aacttttcctccaactcgcgctcgggagctggcgaggcggcggcggctcctcaaagtgggagagcttcaaggtcacgtggtccgtccagcccctgctatctcaccagacactgtccaccctgtatgttggatcagtactccagtgagaagacagcaggcactttcacccatgcagcccattcagtcttcataaccacctgtgatggaggcaagggtcagtttgaaaaggaggatcgagctcactgtggagtatccatggagatgtggagccttgtcaccaacctctaactgcagaactgggatgtggagctggaagtgcctcctcttctgggctgtgctggtcacagccacactctgcaccgctaggccgtccccgaccttgcctgaacaagcccagccctggggagcccctgtggaagtggagtccttcctggtccaccccggtgacctgctgcagcttcgctgtcggctgcgggacgatgtgcagagcatcaactggctgcgggacggggtgcagctggcggaaagcaaccgcacccgcatcacaggggaggaggtggaggtgcaggactccgtgcccgcagactccggcctctatgcttgcgtaaccagcagcccctcgggcagtgacaccacctacttctccgtcaatgtttcagatgctctcccctcctcggaggatgatgatgatgatgatgactcctcttcagaggagaaagaaacagataacaccaaaccaaaccccgtagctccatattggacatccccagaaaagatggaaaagaaattgcatgcagtgccggctgccaagacagtgaagttcaaatgcccttccagtgggaccccaaaccccacactgcgctggttgaaaaatggcaaagaattcaaacctgaccacagaattggaggctacaaggtccgttatgccacctggagcatcataatggactctgtggtgccctctgacaagggcaactacacctgcattgtggagaatgagtacggcagcatcaaccacacataccagctggatgtcgtggagcggtcccctcaccggcccatcctgcaagcagggttgcccgccaacaaaacagtggccctgggtagcaacgtggagttcatgtgtaaggtgtacagtgacccgcagccgcacatccagtggctaaagcacatcgaggtgaatgggagcaagattggcccagacaacctgccttatgtccagatcttgaagactgctggagttaataccaccgacaaagagatggaggtgcttcacttaagaaatgtctcctttgaggacgcaggggagtatacgtgcttggcgggtaactctatcggactctcccatcactctgcatggttgaccgttctggaagccctggaagagaggccggcagtgatgacctcgcccctgtacctggagatcatcatctattgcacaggggccttcctcatctcctgcatggtggggtcggtcatcgtctacaagatgaagagtggtaccaagaagagtgacttccacagccagatggctgtgcacaagctggccaagagcatccctctgcgcagacaggtaacagtgtctgctgactccagtgcatccatgaactctggggttcttctggttcggccatcacggctctcctccagtgggactcccatgctagcaggggtctctgagtatgagcttcccgaagaccctcgctgggagctgcctcgggacagactggtcttaggcaaacccctgggagagggctgctttgggcaggtggtgttggcagaggctatcgggctggacaaggacaaacccaaccgtgtgaccaaagtggctgtgaagatgttgaagtcggacgcaacagagaaagacttgtcagacctgatctcagaaatggagatgatgaagatgatcgggaagcataagaatatcatcaacctgctgggggcctgcacgcaggatggtcccttgtatgtcatcgtggagtatgcctccaagggcaacctgcgggagtacctgcaggcccggaggcccccagggctggaatactgctacaaccccagccacaacccagaggagcagctctcctccaaggacctggtgtcctgcgcctaccaggtggcccgaggcatggagtatctggcctccaagaagtgcatacaccgagacctggcagccaggaatgtcctggtgacagaggacaatgtgatgaagatagcagactttggcctcgcacgggacattcaccacatcgactactataaaaagacaaccaacggccgactgcctgtgaagtggatggcacccgaggcattatttgaccggatctacacccaccagagtgatgtgtggtctttcggggtgctcctgtgggagatcttcactctgggcggctccccataccccggtgtgcctgtggaggaacttttcaagctgctgaaggagggtcaccgcatggacaagcccagtaactgcaccaacgagctgtacatgatgatgcgggactgctggcatgcagtgccctcacagagacccaccttcaagcagctggtggaagacctggaccgcatcgtggccttgacctccaaccaggagtacctggacctgtccatgcccctggaccagtactcccccagctttcccgacacccggagctctacgtgctcctcaggggaggattccgtcttctctcatgagccgctgcccgaggagccctgcctgccccgacacccagcccagcttgccaatggcggactcaaacgccgctgactgccacccacacgccctccccagactccaccgtcagctgtaaccctcacccacagcccctgctgggcccaccacctgtccgtccctgtcccctttcctgctggca

SEQ ID NO: 7426 - DNA, 540 bp, Homo sapiens
  source 1..540: mol_type = unassigned DNA
cagggaaaagcagcccctcgacacataccccactcccttagcctttatcctgccctcctcccttcccaagtaaatgagtctcaacgtgttctttaaagcggacgcaacagagaaagacttgtcagacctgatctcagaaatggagatgatgaagatgatcgggaagcataagaatatcatcaacctgctgggggcctgcacgcaggatggtcccttgtatgtcatcgtggagtatgcctccaagggcaacctgcgggagtacctgcaggcccggaggcccccagggctggaatactgctacaaccccagccacaacccagaggagcagctctcctccaaggacctggtgtcctgcgcctaccaggtggcccgaggcatggagtatctggcctccaagaagtgcatacaccgagacctggcagccaggaatgtcctggtgacagaggacaatgtgatgaagatagcagactttggcctcgcacgggacattcaccacatcgactactataaaaagacaaccaacggccgactgcctgtgaa

SEQ ID NO: 7427 - DNA, 1499 bp, Homo sapiens
  source 1..1499: mol_type = unassigned DNA
cacagacccaaagtgggacattgagcaaggcacaggctggttcccctcctgtcctctgtcctcattctgtgagtgccaccatcaccaggtactgtggcctgcagaaataaacgaggcaccaaccctgccctcagggaccccgtgtcttcttagggacagaggactcagaaacatctgtgtccccgcatgttaagtgcatgcacacagtgctgaggctttgcagagaagggccatggctccctgaggagaccaagaaaggcacatagaagtgacttctcagctggcccttgcaggatccctgggtgcctgtacctctccagtccagctgagcaaggaggctcaggaattaatgaagatggggcttgtgtagcacgatggttctaggccatcccttttccatggctcaagtccattgaaggcagcctccaaaatcagggggttgcctgatcctcctagtgccacaatcccagtcctagctagaacttgccatggttcttctccctaaaagttcccaggggacaggagacaggtgttgcttttctaatggagcgggacctcgcatggacggggccctccaagcctgctaacaccctgttcgcactgactcagccctggaagagaggccggcagtgatgacctcgcccctgtacctggagatcatcatctattgcacaggggccttcctcatctcctgcatggtggggtcggtcatcgtctacaagatgaagagtggtaccaagaagagtgacttccacagccagatggctgtgcacaagctggccaagagcatccctctgcgcagacaggtgtctgctgactccagtgcatccatgaactctggggttcttctggttcggccatcacggctctcctccagtgggactcccatgctagcaggggtctctgagtatgagcttcccgaagaccctcgctgggagctgcctcgggacagactggtcttaggcaaacccctgggagagggctgctttgggcaggtggtgttggcagaggctatcgggctggacaaggacaaacccaaccgtgtgaccaaagtggctgtgaagatgttgaagtcggacgcaacagagaaagacttgtcagacctgatctcagaaatggagatgatgaagatgatcgggaagcataagaatatcatcaacctgctgggggcctgcacgcaggatggtcccttgtatgtcatcgtggagtatgcctccaagggcaacctgcgggagtacctgcaggcccggaggcccccagggctggaatactgctacaaccccagccacaacccagaggagcagctctcctccaaggacctggtgtcctgcgcctaccaggtggcccgaggcatggagtatctggcctccaagaagtgcatacaccgagacctggcagccaggaatgtcctggtgacagaggacaatgtgatgaagatagcagactttggcctcgcacgggacattcaccacatcgactactataaaaagacaaccaac

SEQ ID NO: 7428 - DNA, 1608 bp, Homo sapiens
  source 1..1608: mol_type = unassigned DNA
atgtggagctggaagtgcctcctcttctgggctgtgctggtcacagccacactctgcaccgctaggccgtccccgaccttgcctgaacaagcttgcccagatctccaggaggctaagtggtgctcggccagcttccactccatcactcccttgccatttggacttggtactcggcttagtgattagaggccctgaacaggtggtggtatccctgctctgctggagaggaacccagatgctctcccctcctcggaggatgatgatgatgatgatgactcctcttcagaggagaaagaaacagataacaccaaaccaaaccgtatgcccgtagctccatattggacatccccagaaaagatggaaaagaaattgcatgcagtgccggctgccaagacagtgaagttcaaatgcccttccagtgggaccccaaaccccacactgcgctggttgaaaaatggcaaagaattcaaacctgaccacagaattggaggctacaaggtccgttatgccacctggagcatcataatggactctgtggtgccctctgacaagggcaactacacctgcattgtggagaatgagtacggcagcatcaaccacacataccagctggatgtcgtggagcggtcccctcaccggcccatcctgcaagcagggttgcccgccaacaaaacagtggccctgggtagcaacgtggagttcatgtgtaaggtgtacagtgacccgcagccgcacatccagtggctaaagcacatcgaggtgaatgggagcaagattggcccagacaacctgccttatgtccagatcttgaagactgctggagttaataccaccgacaaagagatggaggtgcttcacttaagaaatgtctcctttgaggacgcaggggagtatacgtgcttggcgggtaactctatcggactctcccatcactctgcatggttgaccgttctggaagccctggaagagaggccggcagtgatgacctcgcccctgtacctggagatcatcatctattgcacaggggccttcctcatctcctgcatggtggggtcggtcatcgtctacaagatgaagagtggtaccaagaagagtgacttccacagccagatggctgtgcacaagctggccaagagcatccctctgcgcagacaggtaacagtgtctgctgactccagtgcatccatgaactctggggttcttctggttcggccatcacggctctcctccagtgggactcccatgctagcaggggtctctgagtatgagcttcccgaagaccctcgctgggagctgcctcgggacagactggtcttaggcaaacccctgggagagggctgctttgggcaggtggtgttggcagaggctatcgggctggacaaggacaaacccaaccgtgtgaccaaagtggctgtgaagatgttgaagtcggacgcaacagagaaagacttgtcagacctgatctcagaaatggagatgatgaagatgatcgggaagcataagaatatcatcaacctgctgggggcctgcacgcaggatggtcccttgtatgtcatcgtggagtatgcctccaagggcaacctgcgggagtacctgcaggcccggagg

SEQ ID NO: 7429 - DNA, 823 bp, Homo sapiens
  source 1..823: mol_type = unassigned DNA
tcttcctctagtcccccttctttctgtctccttcccttgctctgcgtctcttagaggtctcatgtcctgtgcttgtccattttgcttccgttgtctcttctagactgctggagttaataccaccgacaaagagatggaggtgcttcacttaagaaatgtctcctttgaggacgcaggggagtatacgtgcttggcgggtaactctatcggactctcccatcactctgcatggttgaccgttctggaagccctggaagagaggccggcagtgatgacctcgcccctgtacctggagatcatcatctattgcacaggggccttcctcatctcctgcatggtggggtcggtcatcgtctacaagatgaagagtggtaccaagaagagtgacttccacagccagatggctgtgcacaagctggccaagagcatccctctgcgcagacaggtaacagtgtctgctgactccagtgcatccatgaactctggggttcttctggttcggccatcacggctctcctccagtgggactcccatgctagcaggggtctctgagtatgagcttcccgaagaccctcgctgggagctgcctcgggacagactggtcttaggcaaacccctgggagagggctgctttgggcaggtggtgttggcagaggctatcgggctggacaaggacaaacccaaccgtgtgaccaaagtggctgtgaagatgttgaagtcggacgcaacagagaaagacttgtcagacctgatctcagaaatggagatgatgaagatgatcgggaagcataagaatatcatcaacctgctgggggcctgcacg

SEQ ID NO: 7430 - DNA, 790 bp, Homo sapiens
  source 1..790: mol_type = unassigned DNA
gggtgcctgtacctctccagtccagctgagcaaggaggctcaggaattaatgaagatggggcttgtgtagcacgatggttctaggccatcccttttccatggctcaagtccattgaaggcagcctccaaaatcagggggttgcctgatcctcctagtgccacaatcccagtcctagctagaacttgccatggttcttctccctaaaagttcccaggggacaggagacaggtgttgcttttctaatggagcgggacctcgcatggacggggccctccaagcctgctaacaccctgttcgcactgactcagccctggaagagaggccggcagtgatgacctcgcccctgtacctggagatcatcatctattgcacaggggccttcctcatctcctgcatggtggggtcggtcatcgtctacaagatgaagagtggtaccaagaagagtgacttccacagccagatggctgtgcacaagctggccaagagcatccctctgcgcagacaggtaacagtgtctgctgactccagtgcatccatgaactctggggttcttctggttcggccatcacggctctcctccagtgggactcccatgctagcaggggtctctgagtatgagcttcccgaagaccctcgctgggagctgcctcgggacagactggtcttaggcaaacccctgggagagggctgctttgggcaggtggtgttggcagaggctatcgggctggacaaggacaaacccaaccgtgtgaccaaagtggctgtgaagatgttgaagtcggacgcaac

SEQ ID NO: 7431 - DNA, 486 bp, Homo sapiens
  source 1..486: mol_type = unassigned DNA
ggagaacagagttgttactgcaatgatcagttataaaatgtcaagctggaagaggtgcatttggtctgcttattttaaaggtgagtgaagtccagaaaggccagcttgtggcagaaataggtcagtcctagaagttgggcctcctggcctaccatggtctttggaccactctgtgttgaggaaagaacatcagatacacagacatgtgcctctgccattgttgggaagccctgactaagaatgggaaggagtcaccccgtcccccctccttgctctagggtgaccccactcttccttgcaggtgtctgctgactccagtgcatccatgaactctggggttcttctggttcggccatcacggctctcctccagtgggactcccatgctagcaggggtctctgagtatgagcttcccgaagaccctcgctgggagctgcctcgggacagactggtcttaggcaaacccctgggagagggctgctttgg

SEQ ID NO: 7432 - DNA, 485 bp, Homo sapiens
  source 1..485: mol_type = unassigned DNA
cctgcattgtggagaatgagtacggcagcatcaaccacacataccagctggatgtcgtggagcggtcccctcaccggcccatcctgcaagcagggttgcccgccaacaaaacagtggccctgggtagcaacgtggagttcatgtgtaaggtgtacagtgacccgcagccgcacatccagtggctaaagcacatcgaggtgaatgggagcaagattggcccagacaacctgccttatgtccagatcttgaagactgctggagttaataccaccgacaaagagatggaggtgcttcacttaagaaatgtctcctttgaggacgcaggggagtatacgtgcttggcgggtaactctatcggactctcccatcactctgcatggttgaccgttctggaaggtacacactgtaacttctcctctcgatgtcctgccctcgccacgggcacggggggagcatgcatttccaggcttggggagacacagagg

SEQ ID NO: 7433 - DNA, 276 bp, Homo sapiens
  source 1..276: mol_type = unassigned DNA
tcagtttgaaaaggaggatcgagctcactgtggagtatccatggagatgtggagccttgtcaccaacctctaactgcagaactgggatgtggagctggaagtgcctcctcttctgggctgtgctggtcacagccacactctgcaccgctaggccgtccccgaccttgcctgaacaagactgctggagttaataccaccgacaaagagatggaggtgcttcacttaagaaatgtctcctttgaggacgcaggggagtatacgtgcttggcgggtaac

SEQ ID NO: 7434 - DNA, 545 bp, Homo sapiens
  source 1..545: mol_type = unassigned DNA
tcatgtgtaaggtgtacagtgacccgcagccgcacatccagtggctaaagcacatcgaggtgaatgggagcaagattggcccagacaacctgccttatgtccagatcttgaagcattcggggattaatagctcggatgcggaggtgctgaccctgttcaatgtgacagaggcccagagcggggagtatgtgtgtaaggtttccaattatattggtgaagctaaccagtctgcgtggctcactgtcaccagacctgtggcaaaaggtaatggggagatggatgggaccctgtgctggggatttgatgtaggccccaagctgctggggcaggcggggaagccagtactggactgtccttgccaccctactgtatttctagtgcccagagccatggaaaaatacccggcctgggaggctggtttggtttggtattgtgttggtgtctgtgggttccctctctgccttctgtgtgttccttggctttgtgtggatccatgtgaggactcacggggacacggttttgctgtgttacaaatggtacttcag

SEQ ID NO: 7435 - DNA, 2281 bp, Homo sapiens
  source 1..2281: mol_type = unassigned DNA
ggagcccggtctgcaaggaaagtgaggcgccgccgctgcgttctggaggaggggggcacaaggtctggagaccccgggtggcggacgggagccctccccccgccccgcctccggggcaccagctccggctccattgttcccgcccgggctggaggcgccgagcaccgagcgccgccgggagtcgagcgccggccgcggagctcttgcgaccccgccaggacccgaacagagcccgggggcggcgggccggagccggggacgcgggcacacgcccgctcgcacaagccacggcggactctcccgaggcggaacctccacgccgagcgagggtcagtttgaaaaggaggatcgagctcactgtggagtatccatggagatgtggagccttgtcaccaacctctaactgcagaactgggatgtggagctggaagtgcctcctcttctgggctgtgctggtcacagccacactctgcaccgctaggccgtccccgaccttgcctgaacaagatgctctcccctcctcggaggatgatgatgatgatgatgactcctcttcagaggagaaagaaacagataacaccaaaccaaaccgtatgcccgtagctccatattggacatccccagaaaagatggaaaagaaattgcatgcagtgccggctgccaagacagtgaagttcaaatgcccttccagtgggaccccaaaccccacactgcgctggttgaaaaatggcaaagaattcaaacctgaccacagaattggaggctacaaggtccgttatgccacctggagcatcataatggactctgtggtgccctctgacaagggcaactacacctgcattgtggagaatgagtacggcagcatcaaccacacataccagctggatgtcgtggagcggtcccctcaccggcccatcctgcaagcagggttgcccgccaacaaaacagtggccctgggtagcaacgtggagttcatgtgtaaggtgtacagtgacccgcagccgcacatccagtggctaaagcacatcgaggtgaatgggagcaagattggcccagacaacctgccttatgtccagatcttgaaggtaatcatggcaccagtcttcgtgggccagtctactgggaaggagaccactgtctcgggggctcaagttcctgtgggcaggctcagttgcccccgaatgggatcattcctcacgcttcaggcacacacactccatctcagtagggatctagccacatcccccaggactagtaacagaggtcacaaagtggaggtgagctgggaacagagggctgcagggatgggtggtgctggtctgtaataagctttgagagcaacgtcactggggctttggggtcagctacacaaggaaggcatttggacccctgccttttcattgcccgaaaccagagcctttccaccaagcgtttcccagtcttagccctgtgtcctgagttacgtacgatctttctggcaaatggggtgcatgataagagcatctcttacgaagagttggaaaaacaaatgccatatataaattctaagccatatgaggacgaggagtaatggcattttcttcctttttcctctcactcccagacattcattgtccctgaatgctccattaatccagggaaggtaattgcctaaatctccagtggatctcgcaacaggaaggaaccagaagctgggaaagttgtttacctctttgtcccagagttagacctcatcctcccctagcttagctgtctcagagatatactggccctcccttctcttctctttgctgctggtgctaaaactgctctgtaggtcattggccactgtctccactcacaacccctgctccagtcctggagggagtgggttaaacacaaatagaacattccatttgaagcagtgattctttttttttttttttttttttaatcaaatgctttggacttttgaagtccacttgttctgtacttgtaaaagggaaagaaggccgggcgcagtggctcacgcctgtaatcccagcactttagatcacttgaggtcaggagtttgagaccagcccggccaacatggtgaaaccccatctctactaaaaatacaaaaattagctgtgcatagtggttggcacctgtagtcccagctactcaggaggctgaggcaagctaactgcttgaacccagaaggcagaggttgcagtgagctgagatcacgccactgcactccagcctgggtgacagagtgagtgagactctgcgttaaaaaaaaaaaaaaaaaaaaaaa

SEQ ID NO: 7436 - DNA, 1898 bp, Homo sapiens
  source 1..1898: mol_type = unassigned DNA
gcatagcgctcggagcgctcttgcggccacaggcgcggcgtcctcggcggcgggcggcagctagcgggagccgggacgccggtgcagccgcagcgcgcggaggaacccgggtgtgccgggagctgggcggccacgtccggacgggaccgagacccctcgtagcgcattgcggcgacctcgccttccccggccgcgagcgcgccgctgcttgaaaagccgcggaacccaaggacttttctccggtccgagctcggggcgccccgcagggcgcacggtacccgtgctgcagtcgggcacgccgcggcgccggggcctccgcagggcgatggagcccggtctgcaaggaaagtgaggcgccgccgctgcgttctggaggaggggggcacaaggtctggagaccccgggtggcggacgggagccctccccccgccccgcctccggggcaccagctccggctccattgttcccgcccgggctggaggcgccgagcaccgagcgccgccgggagtcgagcgccggccgcggagctcttgcgaccccgccaggacccgaacagagcccgggggcggcgggccggagccggggacgcgggcacacgcccgctcgcacaagccacggcggactctcccgaggcggaacctccacgccgagcgagggtcagtttgaaaaggaggatcgagctcactgtggagtatccatggagatgtggagccttgtcaccaacctctaactgcagaactgggatgtggagctggaagtgcctcctcttctgggctgtgctggtcacagccacactctgcaccgctaggccgtccccgaccttgcctgaacaagatgctctcccctcctcggaggatgatgatgatgatgatgactcctcttcagaggagaaagaaacagataacaccaaaccaaaccccgtagctccatattggacatccccagaaaagatggaaaagaaattgcatgcagtgccggctgccaagacagtgaagttcaaatgcccttccagtgggaccccaaaccccacactgcgctggttgaaaaatggcaaagaattcaaacctgaccacagaattggaggctacaaggtccgttatgccacctggagcatcataatggactctgtggtgccctctgacaagggcaactacacctgcattgtggagaatgagtacggcagcatcaaccacacataccagctggatgtcgtggagcggtcccctcaccggcccatcctgcaagcagggttgcccgccaacaaaacagtggccctgggtagcaacgtggagttcatgtgtaaggtgtacagtgacccgcagccgcacatccagtggctaaagcacatcgaggtgaatgggagcaagattggcccagacaacctgccttatgtccagatcttgaaggtaatcatggcaccagtcttcgtgggccagtctactgggaaggagaccactgtctcgggggctcaagttcctgtgggcaggctcagttgcccccgaatgggatcattcctcacgcttcaggcacacacactccatctcagtagggatctagccacatcccccaggactagtaacagaggtcacaaagtggaggtgagctgggaacagagggctgcagggatgggtggtgctggtctgtaataagctttgagagcaacgtcactggggctttggggtcagctacacaaggaaggcatttggacccctgccttttcattgcccgaaaccagagcctttccaccaagcgtttcccagtcttagccctgtgtcctgagttacgtacgatctttctggcaaatggggtgcatgataagagcatctcttacgaagagttggaaaaacaaatgccatatataaattctaagccatatgaggacgaggagtaatggcatt

SEQ ID NO: 7437 - DNA, 556 bp, Homo sapiens
  source 1..556: mol_type = unassigned DNA
ttgtcaccaacctctaactgcagaactgggatgtggagctggaagtgcctcctcttctgggctgtgctggtcacagccacactctgcaccgctaggccgtccccgaccttgcctgaacaagatgctctcccctcctcggaggatgatgatgatgatgatgactcctcttcagaggagaaagaaacagataacaccaaaccaaaccgtatgcccgtagctccatattggacatccccagaaaagatggaaaagaaattgcatgcagtgccggctgccaagacagtgaagttcaaatgcccttccagtgggaccccaaaccccacactgcgctggttgaaaaatggcaaagaattcaaacctgaccacagaattggaggctacaagagcggtcccctcaccggcccatcctgcaagcagggttgcccgccaacaaaacagtggccctgggtagcaacgtggagttcatgtgtaaggtgtacagtgacccgcagccgcacatccagtggctaaagcacatcgaggtgaatgggagcaagattggcccagacaacctgcc

SEQ ID NO: 7438 - DNA, 571 bp, Homo sapiens
  source 1..571: mol_type = unassigned DNA
gcgctcgggagctggcgaggcggcggcggctcctcaatgctctcccctcctcggaggatgatgatgatgatgatgactcctcttcagaggagaaagaaacagataacaccaaaccaaaccccgtagctccatattggacatccccagaaaagatggaaaagaaattgcatgcagtgccggctgccaagacagtgaagttcaaatgcccttccagtgggaccccaaaccccacactgcgctggttgaaaaatggcaaagaattcaaacctgaccacagaattggaggctacaaggtccgttatgccacctggagcatcataatggactctgtggtgccctctgacaagggcaactacacctgcattgtggagaatgagtacggcagcatcaaccacacataccagctggatgtcgtggagcggtcccctcaccggcccatcctgcaagcagggttgcccgccaacaaaacagtggccctgggtagcaacgtggagttcatgtgtaaggtgtacagtgacccgcagccgcacatccagtggctaaagcacatcgaggtgaatgggagcaagat

SEQ ID NO: 7439 - DNA, 1155 bp, Homo sapiens
  source 1..1155: mol_type = unassigned DNA
tttcacctcctggctccctcccgggcgatccgcgccccttgggtctcccctcccttccctccgtccgcgtctcctgcgccccctccctgcgctcgtcccgccgctcttcccgccgcccaacttttcctccaactcgcgctcgggagctggcgaggcggcggcggctcctcaggtcagtttgaaaaggaggatcgagctcactgtggagtatccatggagatgtggagccttgtcaccaacctctaactgcagaactgggatgtggagctggaagtgcctcctcttctgggctgtgctggtcacagccacactctgcaccgctaggccgtccccgaccttgcctgaacaagcccagccctggggagcccctgtggaagtggagtccttcctggtccaccccggtgacctgctgcagcttcgctgtcggctgcgggacgatgtgcagagcatcaactggctgcgggacggggtgcagctggcggaaagcaaccgcacccgcatcacaggggaggaggtggaggtgcaggactccgtgcccgcagactccggcctctatgcttgcgtaaccagcagcccctcgggcagtgacaccacctacttctccgtcaatgtttcagatgctctcccctcctcggaggatgatgatgatgatgatgactcctcttcagaggagaaagaaacagataacaccaaaccaaaccgtatgcccgtagctccatattggacatccccagaaaagatggaaaagaaattgcatgcagtgccggctgccaagacagtgaagttcaaatgcccttccagtgggaccccaaaccccacactgcgctggttgaaaaatggcaaagaattcaaacctgaccacagaattggaggctacaaggtccgttatgccacctggagcatcataatggactctgtggtgccctctgacaagggcaactacacctgcattgtggagaatgagtacggcagcatcaaccacacataccagctggatgtcgtggagcggtcccctcaccggcccatcctgcaagcagggttgcccgccaacaaaacagtggccctgggtagcaacgtggagttcatgtgtaaggtgtacagtgacccgcagccgcacatccagtggctaaagcacatcgaggtgaatgggagcaa

SEQ ID NO: 7440 - DNA, 725 bp, Homo sapiens
  source 1..725: mol_type = unassigned DNA
ctgtcttcctctctcgccccttggcttcccttcccggccccgtggtggctgcagcccagccctggggagcccctgtggaagtggagtccttcctggtccaccccggtgacctgctgcagcttcgctgtcggctgcgggacgatgtgcagagcatcaactggctgcgggacggggtgcagctggcggaaagcaaccgcacccgcatcacaggggaggaggtggaggtgcaggactccgtgcccgcagactccggcctctatgcttgcgtaaccagcagcccctcgggcagtgacaccacctacttctccgtcaatgtttcagatgctctcccctcctcggaggatgatgatgatgatgatgactcctcttcagaggagaaagaaacagataacaccaaaccaaaccgtatgcccgtagctccatattggacatccccagaaaagatggaaaagaaattgcatgcagtgccggctgccaagacagtgaagttcaaatgcccttccagtgggaccccaaaccccacactgcgctggttgaaaaatggcaaagaattcaaacctgaccacagaattggaggctacaaggtccgttatgccacctggagcatcataatggactctgtggtgccctctgacaagggcaactacacctgcattgtggagaatgagtacggcagcatcaaccacacataccagctggatgtcgtggagcggtcccctcaccgg

SEQ ID NO: 7441 - DNA, 764 bp, Homo sapiens
  source 1..764: mol_type = unassigned DNA
aaccgcacccgcatcacaggggaggaggtggaggtgcaggactccgtgcccgcagactccggcctctatgcttgcgtaaccagcagcccctcgggcagtgacaccacctacttctccgtcaatgtttcagatgctctcccctcctcggaggatgatgatgatgatgatgactcctcttcagaggagaaagaaacagataacaccaaaccaaaccgtatgcgtgagacactgtttcctatcttactgccctttgggtctgggcattgggtttaagaggggaggggaaggctgaaaggggaggaagaggagggcacatggggtcacggtgcctgttctgctaagtgccaggcactgctcacaggtgttgggcagatgggcaagacacctccaggtcctggcctgggccctgctcctgagcctgaccagctgctcctctccaccctgcctgtctctcttggctttccccgggcagccgtagctccatattggacatccccagaaaagatggaaaagaaattgcatgcagtgccggctgccaagacagtgaagttcaaatgcccttccagtgggaccccaaaccccacactgcgctggttgaaaaatggcaaagaattcaaacctgaccacagaattggaggctacaaggtccgttatgccacctggagcatcataatggactctgtggtgccctctgacaagggcaactacacctgcattgtggagaatgagtacggcagcatcaaccacacataccagctggatgt

SEQ ID NO: 7442 - DNA, 657 bp, Homo sapiens
  source 1..657: mol_type = unassigned DNA
ttgggtctcccctcccttccctccgtccgcgtctcctgcgccccctccctgcgctcgtcccgccgctcttcccgccgcccaacttttcctccaactcgcgctcgggagctggcgaggcggcggcggctcctcaggtcagtttgaaaaggaggatcgagctcactgtggagtatccatggagatgtggagccttgtcaccaacctctaactgcagaactgggatgtggagctggaagtgcctcctcttctgggctgtgctggtcacagccacactctgcaccgctaggccgtccccgaccttgcctgaacaagatgctctcccctcctcggaggatgatgatgatgatgatgactcctcttcagaggagaaagaaacagataacaccaaaccaaaccccgtagctccatattggacatccccagaaaagatggaaaagaaattgcatgcagtgccggctgccaagacagtgaagttcaaatgcccttccagtgggaccccaaaccccacactgcgctggttgaaaaatggcaaagaattcaaacctgaccacagaattggaggctacaaggtccgttatgccacctggagcatcataatggactctgtggtgccctctgacaagggcaactacacctgcattgtggagaatgagtacg

SEQ ID NO: 7443 - DNA, 688 bp, Homo sapiens
  source 1..688: mol_type = unassigned DNA
ccctttcacctcctggctccctcccgggcgatccgcgccccttgggtctcccctcccttccctccgtccgcgtctcctgcgccccctccctgcgctcgtcccgccgctcttcccgccgcccaacttttcctccaactcgcgctcgggagctggcgaggcggcggcggctcctcaggtcagtttgaaaaggaggatcgagctcactgtggagtatccatggagatgtggagccttgtcaccaacctctaactgcagaactgggatgtggagctggaagtgcctcctcttctgggctgtgctggtcacagccacactctgcaccgctaggccgtccccgaccttgcctgaacaagatgctctcccctcctcggaggatgatgatgatgatgatgactcctcttcagaggagaaagaaacagataacaccaaaccaaaccgtatgcccgtagctccatattggacatccccagaaaagatggaaaagaaattgcatgcagtgccggctgccaagacagtgaagttcaaatgcccttccagtgggaccccaaaccccacactgcgctggttgaaaaatggcaaagaattcaaacctgaccacagaattggaggctacaaggtccgttatgccacctggagcatcataatggactctgtggtgccctctgacaagggcaactacacctgcatt

SEQ ID NO: 7444 - DNA, 826 bp, Homo sapiens
  source 1..826: mol_type = unassigned DNA
atgtggagctggaagtgcctcctcttctgggctgtgctggtcacagccacactctgcaccgctaggccgtccccgaccttgcctgaacaagcccagccctggggagcccctgtggaagtggagtccttcctggtccaccccggtgacctgctgcagcttcgctgtcggctgcgggacgatgtgcagagcatcaactggctgcgggacggggtgcagctggcggaaagcaaccgcacccgcatcacaggggaggaggtggaggtgcaggactccgtgcccgcagactccggcctctatgcttgcgtaaccagcagcccctcgggcagtgacaccacctacttctccgtcaatgtttcagcttgcccagatctccaggaggctaagtggtgctcggccagcttccactccatcactcccttgccatttggacttggtactcggcttagtgattagaggccctgaacaggtggtggtatccctgctctgctggagaggaacccagatgctctcccctcctcggaggatgatgatgatgatgatgactcctcttcagaggagaaagaaacagataacaccaaaccaaaccccgtagctccatattggacatccccagaaaagatggaaaagaaattgcatgcagtgccggctgccaagacagtgaagttcaaatgcccttccagtgggaccccaaaccccacactgcgctggttgaaaaatggcaaagaattcaaacctgaccacagaattggaggctacaaggtccgttatgccacctggagcatcataatggactctgtggtgccctctgacaagggcaactacacct

SEQ ID NO: 7445 - DNA, 467 bp, Homo sapiens
  source 1..467: mol_type = unassigned DNA
accacctccctccttaacatttctggagacttggagatgcggcgttgagattcgggggagaaaagaaagttcccttggatcccgagttatttaagatctcaccaagttattcgccgccgctgggtcagtttgaaaaggaggatcgagctcactgtggagtatccatggagatgtggagccttgtcaccaacctctaactgcagaactgggatgtggagctggaagtgcctcctcttctgggctgtgctggtcacagccacactctgcaccgctaggccgtccccgaccttgcctgaacaagatgctctcccctcctcggaggatgatgatgatgatgatgactcctcttcagaggagaaagaaacagataacaccaaaccaaaccccgtagctccatattggacatccccagaaaagatggaaaagaaattgcatgcagtgccggctgccaagacagtgaagttcaa

SEQ ID NO: 7446 - DNA, 529 bp, Homo sapiens
  source 1..529: mol_type = unassigned DNA
aaattaaaactcagattcttcagcctgtcttgaccacctccctccttaacatttctggagacttggagatgcggcgttgagattcgggggagaaaagaaagttcccttggatcccgagttatttaagatctcaccaagttattcgccgccgctgtgggacctcccaggcccccttgccccccgcaacttctggactcatatccgtcagacatcacttgtcaccttccagcatcagggagaactggatccctcctggctccacactcttaggctctttggtcagtttgaaaaggaggatcgagctcactgtggagtatccatggagatgtggagccttgtcaccaacctctaactgcagaactgggatgtggagctggaagtgcctcctcttctgggctgtgctggtcacagccacactctgcaccgctaggccgtccccgaccttgcctgaacaagatgctctcccctcctcggaggatgatgatgatgatgatgactcctcttcagaggagaaagaaacagataacac

SEQ ID NO: 7447 - DNA, 777 bp, Homo sapiens
  source 1..777: mol_type = unassigned DNA
cgagcaccgagcgccgccgggagtcgagcgccggccgcggagctcttgcgaccccgccaggacccgaacagagcccgggggcggcgggccggagccggggacgcgggcacacgcccgctcgcacaagccacggcggactctcccgaggcggaacctccacgccgagcgagggtcagtttgaaaaggaggatcgagctcactgtggagtatccatggagatgtggagccttgtcaccaacctctaactgcagaactgggatgtggagctggaagtgcctcctcttctgggctgtgctggtcacagccacactctgcaccgctaggccgtccccgaccttgcctgaacaagcccagccctggggagcccctgtggaagtggagtccttcctggtccaccccggtgacctgctgcagcttcgctgtcggctgcgggacgatgtgcagagcatcaactggctgcgggacggggtgcagctggcggaaagcaaccgcacccgcatcacaggggaggaggtggaggtgcaggactccgtgcccgcagactccggcctctatgcttgcgtaaccagcagcccctcgggcagtgacaccacctacttctccgtcaatgtttcaggttggtagccaagccctgcccttgcccctccctagacccaccccctccagccctctctgccagtttcagaggaaggtgaacctcctccccctccgtgatctgcccccactctgcttcagaaactgctgcccactaacattgctccctgcctgccgcgtggc

SEQ ID NO: 7448 - DNA, 587 bp, Homo sapiens
  source 1..587: mol_type = unassigned DNA
aactcgcgctcgggagctggcgaggcggcggcggctcctcaaccttgattctgcagtgggacctcccaggcccccttgccccccgcaacttctggactcatatccgtcagacatcacttgtcaccttccagcatcagggagaactggatccctcctggctccacactcttaggctctttggtcagtttgaaaaggaggatcgagctcactgtggagtatccatggagatgtggagccttgtcaccaacctctaactgcagaactgggatgtggagctggaagtgcctcctcttctgggctgtgctggtcacagccacactctgcaccgctaggccgtccccgaccttgcctgaacaagcccagccctggggagcccctgtggaagtggagtccttcctggtccaccccggtgacctgctgcagcttcgctgtcggctgcgggacgatgtgcagagcatcaactggctgcgggacggggtgcagctggcggaaagcaaccgcacccgcatcacaggggaggaggtggaggtgcaggactccgtgcccgcagactccggcctctatgcttgcgtaaccagcagcccctc

SEQ ID NO: 7449 - DNA, 389 bp, Homo sapiens
  source 1..389: mol_type = unassigned DNA
caaatttggaggaatgaaattctccagctagaaggcccaagaaagtcttatggaagaaacagcttcttaaggtggggttcagagaaaagggaagggctggcctgttgcagaacaaggaatggcatgaagaaagtcttgcacagaggcatggatgttgcttcgagctgtggcgccctatagaaatagaacatgagcagctggtcacagtggctcatgcctgtaatcccagcactttgggaggccaaggcaggcggattgcttgagcccatgagatggagatgagcctggacaacatgggtcagtttgaaaaggaggatcgagctcactgtggagtatccatggagatgtggagccttgtcaccaacctctaactgcagaactgggatgtg

SEQ ID NO: 7450 - DNA, 584 bp, Homo sapiens
  source 1..584: mol_type = unassigned DNA
accacctccctccttaacatttctggagacttggagatgcggcgttgagattcgggggagaaaagaaagttcccttggatcccgagttatttaagatctcaccaagttattcgccgccgctgatgtgccctaccctttgcacctccggaccagcgctttttttggaatactatctagccttgagactgtttagcagaaagtggccattttcctcccttggcccgggctcccggtttcctccctgaggcttgtttaaaagcgaagtagcagggccccgtgggacgcgccttggtctgggtaatcacccccacgcccgggtcatccaccttcctctcggtgaccgaggttcagcagcctctgctattgccggccgtctttgccgatggcctgcctccctaatgacttgtttacatatcctacccccagtgggttaggagaagctccggggctgccccgaccctccgagtgcagggtgtttggggaccgggaggctgctggggcctgactccagctgggagggttatgaactgcatcagtgacgagctgcttgaaatatctgttgcatttactcttagtcatagctg

SEQ ID NO: 7451 - DNA, 442 bp, Homo sapiens
  source 1..442: mol_type = unassigned DNA
tgtgtgtttttaaggactgatttgggccgcatcccccggaaactaaagtggggtgttttaccgtttaaataacggctacagatgtgccctaccctttgcacctccggaccagcgctttttttggaatactatctagccttgagactgtttagcagaaagtggccattttcctcccttggcccgggctcccggtttcctccctgaggcttgtttaaaagcgaagtagcagggccccgtgggacgcgccttggtctgggtaatcacccccacgcccgggtcatccaccttcctctcggtgaccgaggttcagcagcctctgctattgccggccgtctttgccgatggcctgcctccctaatgacttgtttacatatcctacccccagtgggttaggagaagctccggggctgccccgaccctccgagtgcagggtgtttgggga

SEQ ID NO: 7452 - DNA, 5375 bp, Homo sapiens
  source 1..5375: mol_type = unassigned DNA
ccctttcacctcctggctccctcccgggcgatccgcgccccttgggtctcccctcccttccctccgtccgcgtctcctgcgccccctccctgcgctcgtcccgccgctcttcccgccgcccaacttttcctccaactcgcgctcgggagctggcgaggcggcggcggctcctcaaagtgggagagcttcaaggtcacgtggtccgtccagcccctgctatctcaccagacactgtccaccctgtatgttggatcagtactccagtgagaagacagcaggcactttcacccatgcagcccattcagtcttcataaccacctgtgatggaggcaagggtcagtttgaaaaggaggatcgagctcactgtggagtatccatggagatgtggagccttgtcaccaacctctaactgcagaactgggatgtggagctggaagtgcctcctcttctgggctgtgctggtcacagccacactctgcaccgctaggccgtccccgaccttgcctgaacaagcccagccctggggagcccctgtggaagtggagtccttcctggtccaccccggtgacctgctgcagcttcgctgtcggctgcgggacgatgtgcagagcatcaactggctgcgggacggggtgcagctggcggaaagcaaccgcacccgcatcacaggggaggaggtggaggtgcaggactccgtgcccgcagactccggcctctatgcttgcgtaaccagcagcccctcgggcagtgacaccacctacttctccgtcaatgtttcagatgctctcccctcctcggaggatgatgatgatgatgatgactcctcttcagaggagaaagaaacagataacaccaaaccaaaccccgtagctccatattggacatccccagaaaagatggaaaagaaattgcatgcagtgccggctgccaagacagtgaagttcaaatgcccttccagtgggaccccaaaccccacactgcgctggttgaaaaatggcaaagaattcaaacctgaccacagaattggaggctacaaggtccgttatgccacctggagcatcataatggactctgtggtgccctctgacaagggcaactacacctgcattgtggagaatgagtacggcagcatcaaccacacataccagctggatgtcgtggagcggtcccctcaccggcccatcctgcaagcagggttgcccgccaacaaaacagtggccctgggtagcaacgtggagttcatgtgtaaggtgtacagtgacccgcagccgcacatccagtggctaaagcacatcgaggtgaatgggagcaagattggcccagacaacctgccttatgtccagatcttgaagactgctggagttaataccaccgacaaagagatggaggtgcttcacttaagaaatgtctcctttgaggacgcaggggagtatacgtgcttggcgggtaactctatcggactctcccatcactctgcatggttgaccgttctggaagccctggaagagaggccggcagtgatgacctcgcccctgtacctggagatcatcatctattgcacaggggccttcctcatctcctgcatggtggggtcggtcatcgtctacaagatgaagagtggtaccaagaagagtgacttccacagccagatggctgtgcacaagctggccaagagcatccctctgcgcagacaggtaacagtgtctgctgactccagtgcatccatgaactctggggttcttctggttcggccatcacggctctcctccagtgggactcccatgctagcaggggtctctgagtatgagcttcccgaagaccctcgctgggagctgcctcgggacagactggtcttaggcaaacccctgggagagggctgctttgggcaggtggtgttggcagaggctatcgggctggacaaggacaaacccaaccgtgtgaccaaagtggctgtgaagatgttgaagtcggacgcaacagagaaagacttgtcagacctgatctcagaaatggagatgatgaagatgatcgggaagcataagaatatcatcaacctgctgggggcctgcacgcaggatggtcccttgtatgtcatcgtggagtatgcctccaagggcaacctgcgggagtacctgcaggcccggaggcccccagggctggaatactgctacaaccccagccacaacccagaggagcagctctcctccaaggacctggtgtcctgcgcctaccaggtggcccgaggcatggagtatctggcctccaagaagtgcatacaccgagacctggcagccaggaatgtcctggtgacagaggacaatgtgatgaagatagcagactttggcctcgcacgggacattcaccacatcgactactataaaaagacaaccaacggccgactgcctgtgaagtggatggcacccgaggcattatttgaccggatctacacccaccagagtgatgtgtggtctttcggggtgctcctgtgggagatcttcactctgggcggctccccataccccggtgtgcctgtggaggaacttttcaagctgctgaaggagggtcaccgcatggacaagcccagtaactgcaccaacgagctgtacatgatgatgcgggactgctggcatgcagtgccctcacagagacccaccttcaagcagctggtggaagacctggaccgcatcgtggccttgacctccaaccaggagtacctggacctgtccatgcccctggaccagtactcccccagctttcccgacacccggagctctacgtgctcctcaggggaggattccgtcttctctcatgagccgctgcccgaggagccctgcctgccccgacacccagcccagcttgccaatggcggactcaaacgccgctgactgccacccacacgccctccccagactccaccgtcagctgtaaccctcacccacagcccctgctgggcccaccacctgtccgtccctgtcccctttcctgctggcaggagccggctgcctaccaggggccttcctgtgtggcctgccttcaccccactcagctcacctctccctccacctcctctccacctgctggtgagaggtgcaaagaggcagatctttgctgccagccacttcatcccctcccagatgttggaccaacacccctccctgccaccaggcactgcctggagggcagggagtgggagccaatgaacaggcatgcaagtgagagcttcctgagctttctcctgtcggtttggtctgttttgccttcacccataagcccctcgcactctggtggcaggtgccttgtcctcagggctacagcagtagggaggtcagtgcttcgtgcctcgattgaaggtgacctctgccccagataggtggtgccagtggcttattaattccgatactagtttgctttgctgaccaaatgcctggtaccagaggatggtgaggcgaaggccaggttgggggcagtgttgtggccctggggcccagccccaaactgggggctctgtatatagctatgaagaaaacacaaagtgtataaatctgagtatatatttacatgtctttttaaaagggtcgttaccagagatttacccatcgggtaagatgctcctggtggctgggaggcatcagttgctatatattaaaaacaaaaaagaaaaaaaaggaaaatgtttttaaaaaggtcatatattttttgctacttttgctgttttatttttttaaattatgttctaaacctattttcagtttaggtccctcaataaaaattgctgctgcttcatttatctatgggctgtatgaaaagggtgggaatgtccactggaaagaagggacacccacgggccctggggctaggtctgtcccgagggcaccgcatgctcccggcgcaggttccttgtaacctcttcttcctaggtcctgcacccagacctcacgacgcacctcctgcctctccgctgcttttggaaagtcagaaaaagaagatgtctgcttcgagggcaggaaccccatccatgcagtagaggcgctgggcagagagtcaaggcccagcagccatcgaccatggatggtttcctccaaggaaaccggtggggttgggctggggagggggcacctacctaggaatagccacggggtagagctacagtgattaagaggaaagcaagggcgcggttgctcacgcctgtaatcccagcactttgggacaccgaggtgggcagatcacttcaggtcaggagtttgagaccagcctggccaacttagtgaaaccccatctctactaaaaatgcaaaaattatccaggcatggtggcacacgcctgtaatcccagctccacaggaggctgaggcagaatcccttgaagctgggaggcggaggttgcagtgagccgagattgcgccattgcactccagcctgggcaacagagaaaacaaaaaggaaaacaaatgatgaaggtctgcagaaactgaaacccagacatgtgtctgccccctctatgtgggcatggttttgccagtgcttctaagtgcaggagaacatgtcacctgaggctagttttgcattcaggtccctggcttcgtttcttgttggtatgcctccccagatcgtccttcctgtatccatgtgaccagactgtatttgttgggactgtcgcagatcttggcttcttacagttcttcctgtccaaactccatcctgtccctcaggaacggggggaaaattctccgaatgtttttggttttttggctgcttggaatttacttctgccacctgctggtcatcactgtcctcactaagtggattctggctcccccgtacctcatggctcaaactaccactcctcagtcgctatattaaagcttatattttgctggattactgctaaatacaaaagaaagttcaatatgttttcatttctgtagggaaaatgggattgctgctttaaatttctgagctagggattttttggcagctgcagtgttggcgactattgtaaaattctctttgtttctctctgtaaatagcacctgctaacattacaatttgtatttatgtttaaagaaggcatcatttggtgaacagaactaggaaatgaatttttagctcttaaaagcatttgctttgagaccgcacaggagtgtctttccttgtaaaacagtgatgataatttctgccttggccctaccttgaagcaatgttgtgtgaagggatgaagaatctaaaagtcttcataagtccttgggagaggtgctagaaaaatataaggcactatcataattacagtgatgtccttgctgttactactcaaatcacccacaaatttccccaaagactgcgctagctgtcaaataaaagacagtgaaattgacctga

SEQ ID NO: 7453 - DNA, 5900 bp, Homo sapiens
  source 1..5900: mol_type = unassigned DNA
agatgcaggggcgcaaacgccaaaggagaccaggctgtaggaagagaagggcagagcgccggacagctcggcccgctccccgtcctttggggccgcggctggggaactacaaggcccagcaggcagctgcagggggcggaggcggaggagggaccagcgcgggtgggagtgagagagcgagccctcgcgccccgccggcgcatagcgctcggagcgctcttgcggccacaggcgcggcgtcctcggcggcgggcggcagctagcgggagccgggacgccggtgcagccgcagcgcgcggaggaacccgggtgtgccgggagctgggcggccacgtccggacgggaccgagacccctcgtagcgcattgcggcgacctcgccttccccggccgcgagcgcgccgctgcttgaaaagccgcggaacccaaggacttttctccggtccgagctcggggcgccccgcagggcgcacggtacccgtgctgcagtcgggcacgccgcggcgccggggcctccgcagggcgatggagcccggtctgcaaggaaagtgaggcgccgccgctgcgttctggaggaggggggcacaaggtctggagaccccgggtggcggacgggagccctccccccgccccgcctccggggcaccagctccggctccattgttcccgcccgggctggaggcgccgagcaccgagcgccgccgggagtcgagcgccggccgcggagctcttgcgaccccgccaggacccgaacagagcccgggggcggcgggccggagccggggacgcgggcacacgcccgctcgcacaagccacggcggactctcccgaggcggaacctccacgccgagcgagggtcagtttgaaaaggaggatcgagctcactgtggagtatccatggagatgtggagccttgtcaccaacctctaactgcagaactgggatgtggagctggaagtgcctcctcttctgggctgtgctggtcacagccacactctgcaccgctaggccgtccccgaccttgcctgaacaagcccagccctggggagcccctgtggaagtggagtccttcctggtccaccccggtgacctgctgcagcttcgctgtcggctgcgggacgatgtgcagagcatcaactggctgcgggacggggtgcagctggcggaaagcaaccgcacccgcatcacaggggaggaggtggaggtgcaggactccgtgcccgcagactccggcctctatgcttgcgtaaccagcagcccctcgggcagtgacaccacctacttctccgtcaatgtttcagatgctctcccctcctcggaggatgatgatgatgatgatgactcctcttcagaggagaaagaaacagataacaccaaaccaaaccgtatgcccgtagctccatattggacatccccagaaaagatggaaaagaaattgcatgcagtgccggctgccaagacagtgaagttcaaatgcccttccagtgggaccccaaaccccacactgcgctggttgaaaaatggcaaagaattcaaacctgaccacagaattggaggctacaaggtccgttatgccacctggagcatcataatggactctgtggtgccctctgacaagggcaactacacctgcattgtggagaatgagtacggcagcatcaaccacacataccagctggatgtcgtggagcggtcccctcaccggcccatcctgcaagcagggttgcccgccaacaaaacagtggccctgggtagcaacgtggagttcatgtgtaaggtgtacagtgacccgcagccgcacatccagtggctaaagcacatcgaggtgaatgggagcaagattggcccagacaacctgccttatgtccagatcttgaagactgctggagttaataccaccgacaaagagatggaggtgcttcacttaagaaatgtctcctttgaggacgcaggggagtatacgtgcttggcgggtaactctatcggactctcccatcactctgcatggttgaccgttctggaagccctggaagagaggccggcagtgatgacctcgcccctgtacctggagatcatcatctattgcacaggggccttcctcatctcctgcatggtggggtcggtcatcgtctacaagatgaagagtggtaccaagaagagtgacttccacagccagatggctgtgcacaagctggccaagagcatccctctgcgcagacaggtaacagtgtctgctgactccagtgcatccatgaactctggggttcttctggttcggccatcacggctctcctccagtgggactcccatgctagcaggggtctctgagtatgagcttcccgaagaccctcgctgggagctgcctcgggacagactggtcttaggcaaacccctgggagagggctgctttgggcaggtggtgttggcagaggctatcgggctggacaaggacaaacccaaccgtgtgaccaaagtggctgtgaagatgttgaagtcggacgcaacagagaaagacttgtcagacctgatctcagaaatggagatgatgaagatgatcgggaagcataagaatatcatcaacctgctgggggcctgcacgcaggatggtcccttgtatgtcatcgtggagtatgcctccaagggcaacctgcgggagtacctgcaggcccggaggcccccagggctggaatactgctacaaccccagccacaacccagaggagcagctctcctccaaggacctggtgtcctgcgcctaccaggtggcccgaggcatggagtatctggcctccaagaagtgcatacaccgagacctggcagccaggaatgtcctggtgacagaggacaatgtgatgaagatagcagactttggcctcgcacgggacattcaccacatcgactactataaaaagacaaccaacggccgactgcctgtgaagtggatggcacccgaggcattatttgaccggatctacacccaccagagtgatgtgtggtctttcggggtgctcctgtgggagatcttcactctgggcggctccccataccccggtgtgcctgtggaggaacttttcaagctgctgaaggagggtcaccgcatggacaagcccagtaactgcaccaacgagctgtacatgatgatgcgggactgctggcatgcagtgccctcacagagacccaccttcaagcagctggtggaagacctggaccgcatcgtggccttgacctccaaccaggagtacctggacctgtccatgcccctggaccagtactcccccagctttcccgacacccggagctctacgtgctcctcaggggaggattccgtcttctctcatgagccgctgcccgaggagccctgcctgccccgacacccagcccagcttgccaatggcggactcaaacgccgctgactgccacccacacgccctccccagactccaccgtcagctgtaaccctcacccacagcccctgctgggcccaccacctgtccgtccctgtcccctttcctgctggcaggagccggctgcctaccaggggccttcctgtgtggcctgccttcaccccactcagctcacctctccctccacctcctctccacctgctggtgagaggtgcaaagaggcagatctttgctgccagccacttcatcccctcccagatgttggaccaacacccctccctgccaccaggcactgcctggagggcagggagtgggagccaatgaacaggcatgcaagtgagagcttcctgagctttctcctgtcggtttggtctgttttgccttcacccataagcccctcgcactctggtggcaggtgccttgtcctcagggctacagcagtagggaggtcagtgcttcgtgcctcgattgaaggtgacctctgccccagataggtggtgccagtggcttattaattccgatactagtttgctttgctgaccaaatgcctggtaccagaggatggtgaggcgaaggccaggttgggggcagtgttgtggccctggggcccagccccaaactgggggctctgtatatagctatgaagaaaacacaaagtgtataaatctgagtatatatttacatgtctttttaaaagggtcgttaccagagatttacccatcgggtaagatgctcctggtggctgggaggcatcagttgctatatattaaaaacaaaaaagaaaaaaaaggaaaatgtttttaaaaaggtcatatattttttgctacttttgctgttttatttttttaaattatgttctaaacctattttcagtttaggtccctcaataaaaattgctgctgcttcatttatctatgggctgtatgaaaagggtgggaatgtccactggaaagaagggacacccacgggccctggggctaggtctgtcccgagggcaccgcatgctcccggcgcaggttccttgtaacctcttcttcctaggtcctgcacccagacctcacgacgcacctcctgcctctccgctgcttttggaaagtcagaaaaagaagatgtctgcttcgagggcaggaaccccatccatgcagtagaggcgctgggcagagagtcaaggcccagcagccatcgaccatggatggtttcctccaaggaaaccggtggggttgggctggggagggggcacctacctaggaatagccacggggtagagctacagtgattaagaggaaagcaagggcgcggttgctcacgcctgtaatcccagcactttgggacaccgaggtgggcagatcacttcaggtcaggagtttgagaccagcctggccaacttagtgaaaccccatctctactaaaaatgcaaaaattatccaggcatggtggcacacgcctgtaatcccagctccacaggaggctgaggcagaatcccttgaagctgggaggcggaggttgcagtgagccgagattgcgccattgcactccagcctgggcaacagagaaaacaaaaaggaaaacaaatgatgaaggtctgcagaaactgaaacccagacatgtgtctgccccctctatgtgggcatggttttgccagtgcttctaagtgcaggagaacatgtcacctgaggctagttttgcattcaggtccctggcttcgtttcttgttggtatgcctccccagatcgtccttcctgtatccatgtgaccagactgtatttgttgggactgtcgcagatcttggcttcttacagttcttcctgtccaaactccatcctgtccctcaggaacggggggaaaattctccgaatgtttttggttttttggctgcttggaatttacttctgccacctgctggtcatcactgtcctcactaagtggattctggctcccccgtacctcatggctcaaactaccactcctcagtcgctatattaaagcttatattttgctggattactgctaaatacaaaagaaagttcaatatgttttcatttctgtagggaaaatgggattgctgctttaaatttctgagctagggattttttggcagctgcagtgttggcgactattgtaaaattctctttgtttctctctgtaaatagcacctgctaacattacaatttgtatttatgtttaaagaaggcatcatttggtgaacagaactaggaaatgaatttttagctcttaaaagcatttgctttgagaccgcacaggagtgtctttccttgtaaaacagtgatgataatttctgccttggccctaccttgaagcaatgttgtgtgaagggatgaagaatctaaaagtcttcataagtccttgggagaggtgctagaaaaatataaggcactatcataattacagtgatgtccttgctgttactactcaaatcacccacaaatttccccaaagactgcgctagctgtcaaataaaagacagtgaaattgacctg

SEQ ID NO: 7454 - DNA, 5482 bp, Homo sapiens
  source 1..5482: mol_type = unassigned DNA
agatgcaggggcgcaaacgccaaaggagaccaggctgtaggaagagaagggcagagcgccggacagctcggcccgctccccgtcctttggggccgcggctggggaactacaaggcccagcaggcagctgcagggggcggaggcggaggagggaccagcgcgggtgggagtgagagagcgagccctcgcgccccgccggcgcatagcgctcggagcgctcttgcggccacaggcgcggcgtcctcggcggcgggcggcagctagcgggagccgggacgccggtgcagccgcagcgcgcggaggaacccgggtgtgccgggagctgggcggccacgtccggacgggaccgagacccctcgtagcgcattgcggcgacctcgccttccccggccgcgagcgcgccgctgcttgaaaagccgcggaacccaaggacttttctccggtccgagctcggggcgccccgcagggcgcacggtacccgtgctgcagtcgggcacgccgcggcgccggggcctccgcagggcgatggagcccggtctgcaaggaaagtgaggcgccgccgctgcgttctggaggaggggggcacaaggtctggagaccccgggtggcggacgggagccctccccccgccccgcctccggggcaccagctccggctccattgttcccgcccgggctggaggcgccgagcaccgagcgccgccgggagtcgagcgccggccgcggagctcttgcgaccccgccaggacccgaacagagcccgggggcggcgggccggagccggggacgcgggcacacgcccgctcgcacaagccacggcggactctcccgaggcggaacctccacgccgagcgagggtcagtttgaaaaggaggatcgagctcactgtggagtatccatggagatgtggagccttgtcaccaacctctaactgcagaactgggatgtggagctggaagtgcctcctcttctgggctgtgctggtcacagccacactctgcaccgctaggccgtccccgaccttgcctgaacaagatgctctcccctcctcggaggatgatgatgatgatgatgactcctcttcagaggagaaagaaacagataacaccaaaccaaaccccgtagctccatattggacatccccagaaaagatggaaaagaaattgcatgcagtgccggctgccaagacagtgaagttcaaatgcccttccagtgggaccccaaaccccacactgcgctggttgaaaaatggcaaagaattcaaacctgaccacagaattggaggctacaaggtccgttatgccacctggagcatcataatggactctgtggtgccctctgacaagggcaactacacctgcattgtggagaatgagtacggcagcatcaaccacacataccagctggatgtcgtggagcggtcccctcaccggcccatcctgcaagcagggttgcccgccaacaaaacagtggccctgggtagcaacgtggagttcatgtgtaaggtgtacagtgacccgcagccgcacatccagtggctaaagcacatcgaggtgaatgggagcaagattggcccagacaacctgccttatgtccagatcttgaagccctggaagagaggccggcagtgatgacctcgcccctgtacctggagatcatcatctattgcacaggggccttcctcatctcctgcatggtggggtcggtcatcgtctacaagatgaagagtggtaccaagaagagtgacttccacagccagatggctgtgcacaagctggccaagagcatccctctgcgcagacaggtaacagtgtctgctgactccagtgcatccatgaactctggggttcttctggttcggccatcacggctctcctccagtgggactcccatgctagcaggggtctctgagtatgagcttcccgaagaccctcgctgggagctgcctcgggacagactggtcttaggcaaacccctgggagagggctgctttgggcaggtggtgttggcagaggctatcgggctggacaaggacaaacccaaccgtgtgaccaaagtggctgtgaagatgttgaagtcggacgcaacagagaaagacttgtcagacctgatctcagaaatggagatgatgaagatgatcgggaagcataagaatatcatcaacctgctgggggcctgcacgcaggatggtcccttgtatgtcatcgtggagtatgcctccaagggcaacctgcgggagtacctgcaggcccggaggcccccagggctggaatactgctacaaccccagccacaacccagaggagcagctctcctccaaggacctggtgtcctgcgcctaccaggtggcccgaggcatggagtatctggcctccaagaagtgcatacaccgagacctggcagccaggaatgtcctggtgacagaggacaatgtgatgaagatagcagactttggcctcgcacgggacattcaccacatcgactactataaaaagacaaccaacggccgactgcctgtgaagtggatggcacccgaggcattatttgaccggatctacacccaccagagtgatgtgtggtctttcggggtgctcctgtgggagatcttcactctgggcggctccccataccccggtgtgcctgtggaggaacttttcaagctgctgaaggagggtcaccgcatggacaagcccagtaactgcaccaacgagctgtacatgatgatgcgggactgctggcatgcagtgccctcacagagacccaccttcaagcagctggtggaagacctggaccgcatcgtggccttgacctccaaccaggagtacctggacctgtccatgcccctggaccagtactcccccagctttcccgacacccggagctctacgtgctcctcaggggaggattccgtcttctctcatgagccgctgcccgaggagccctgcctgccccgacacccagcccagcttgccaatggcggactcaaacgccgctgactgccacccacacgccctccccagactccaccgtcagctgtaaccctcacccacagcccctgctgggcccaccacctgtccgtccctgtcccctttcctgctggcaggagccggctgcctaccaggggccttcctgtgtggcctgccttcaccccactcagctcacctctccctccacctcctctccacctgctggtgagaggtgcaaagaggcagatctttgctgccagccacttcatcccctcccagatgttggaccaacacccctccctgccaccaggcactgcctggagggcagggagtgggagccaatgaacaggcatgcaagtgagagcttcctgagctttctcctgtcggtttggtctgttttgccttcacccataagcccctcgcactctggtggcaggtgccttgtcctcagggctacagcagtagggaggtcagtgcttcgtgcctcgattgaaggtgacctctgccccagataggtggtgccagtggcttattaattccgatactagtttgctttgctgaccaaatgcctggtaccagaggatggtgaggcgaaggccaggttgggggcagtgttgtggccctggggcccagccccaaactgggggctctgtatatagctatgaagaaaacacaaagtgtataaatctgagtatatatttacatgtctttttaaaagggtcgttaccagagatttacccatcgggtaagatgctcctggtggctgggaggcatcagttgctatatattaaaaacaaaaaagaaaaaaaaggaaaatgtttttaaaaaggtcatatattttttgctacttttgctgttttatttttttaaattatgttctaaacctattttcagtttaggtccctcaataaaaattgctgctgcttcatttatctatgggctgtatgaaaagggtgggaatgtccactggaaagaagggacacccacgggccctggggctaggtctgtcccgagggcaccgcatgctcccggcgcaggttccttgtaacctcttcttcctaggtcctgcacccagacctcacgacgcacctcctgcctctccgctgcttttggaaagtcagaaaaagaagatgtctgcttcgagggcaggaaccccatccatgcagtagaggcgctgggcagagagtcaaggcccagcagccatcgaccatggatggtttcctccaaggaaaccggtggggttgggctggggagggggcacctacctaggaatagccacggggtagagctacagtgattaagaggaaagcaagggcgcggttgctcacgcctgtaatcccagcactttgggacaccgaggtgggcagatcacttcaggtcaggagtttgagaccagcctggccaacttagtgaaaccccatctctactaaaaatgcaaaaattatccaggcatggtggcacacgcctgtaatcccagctccacaggaggctgaggcagaatcccttgaagctgggaggcggaggttgcagtgagccgagattgcgccattgcactccagcctgggcaacagagaaaacaaaaaggaaaacaaatgatgaaggtctgcagaaactgaaacccagacatgtgtctgccccctctatgtgggcatggttttgccagtgcttctaagtgcaggagaacatgtcacctgaggctagttttgcattcaggtccctggcttcgtttcttgttggtatgcctccccagatcgtccttcctgtatccatgtgaccagactgtatttgttgggactgtcgcagatcttggcttcttacagttcttcctgtccaaactccatcctgtccctcaggaacggggggaaaattctccgaatgtttttggttttttggctgcttggaatttacttctgccacctgctggtcatcactgtcctcactaagtggattctggctcccccgtacctcatggctcaaactaccactcctcagtcgctatattaaagcttatattttgctggattactgctaaatacaaaagaaagttcaatatgttttcatttctgtagggaaaatgggattgctgctttaaatttctgagctagggattttttggcagctgcagtgttggcgactattgtaaaattctctttgtttctctctgtaaatagcacctgctaacattacaatttgtatttatgtttaaagaaggcatcatttggtgaacagaactaggaaatgaatttttagctcttaaaagcatttgctttgagaccgcacaggagtgtctttccttgtaaaacagtgatgataatttctgccttggccctaccttgaagcaatgttgtgtgaagggatgaagaatctaaaagtcttcataagtccttgggagaggtgctagaaaaatataaggcactatcataattacagtgatgtccttgctgttactactcaaatcacccacaaatttccccaaagactgcgctagctgtcaaataaaagacagtgaaattgacctg

SEQ ID NO: 7455 - DNA, 6054 bp, Homo sapiens
  source 1..6054: mol_type = unassigned DNA
agatgcaggggcgcaaacgccaaaggagaccaggctgtaggaagagaagggcagagcgccggacagctcggcccgctccccgtcctttggggccgcggctggggaactacaaggcccagcaggcagctgcagggggcggaggcggaggagggaccagcgcgggtgggagtgagagagcgagccctcgcgccccgccggcgcatagcgctcggagcgctcttgcggccacaggcgcggcgtcctcggcggcgggcggcagctagcgggagccgggacgccggtgcagccgcagcgcgcggaggaacccgggtgtgccgggagctgggcggccacgtccggacgggaccgagacccctcgtagcgcattgcggcgacctcgccttccccggccgcgagcgcgccgctgcttgaaaagccgcggaacccaaggacttttctccggtccgagctcggggcgccccgcagggcgcacggtacccgtgctgcagtcgggcacgccgcggcgccggggcctccgcagggcgatggagcccggtctgcaaggaaagtgaggcgccgccgctgcgttctggaggaggggggcacaaggtctggagaccccgggtggcggacgggagccctccccccgccccgcctccggggcaccagctccggctccattgttcccgcccgggctggaggcgccgagcaccgagcgccgccgggagtcgagcgccggccgcggagctcttgcgaccccgccaggacccgaacagagcccgggggcggcgggccggagccggggacgcgggcacacgcccgctcgcacaagccacggcggactctcccgaggcggaacctccacgccgagcgagggtcagtttgaaaaggaggatcgagctcactgtggagtatccatggagatgtggagccttgtcaccaacctctaactgcagaactgggatgtggagctggaagtgcctcctcttctgggctgtgctggtcacagccacactctgcaccgctaggccgtccccgaccttgcctgaacaagcccagccctggggagcccctgtggaagtggagtccttcctggtccaccccggtgacctgctgcagcttcgctgtcggctgcgggacgatgtgcagagcatcaactggctgcgggacggggtgcagctggcggaaagcaaccgcacccgcatcacaggggaggaggtggaggtgcaggactccgtgcccgcagactccggcctctatgcttgcgtaaccagcagcccctcgggcagtgacaccacctacttctccgtcaatgtttcagttcccatagatgctctcccctcctcggaggatgatgatgatgatgatgactcctcttcagaggagaaagaaacagataacaccaaaccaaaccccgtagctccatattggacatccccagaaaagatggaaaagaaattgcatgcagtgccggctgccaagacagtgaagttcaaatgcccttccagtgggaccccaaaccccacactgcgctggttgaaaaatggcaaagaattcaaacctgaccacagaattggaggctacaaggtccgttatgccacctggagcatcataatggactctgtggtgccctctgacaagggcaactacacctgcattgtggagaatgagtacggcagcatcaaccacacataccagctggatgtcgtggagcggtcccctcaccggcccatcctgcaagcagggttgcccgccaacaaaacagtggccctgggtagcaacgtggagttcatgtgtaaggtgtacagtgacccgcagccgcacatccagtggctaaagcacatcgaggtgaatgggagcaagattggcccagacaacctgccttatgtccagatcttgaagcattcggggattaatagctcggatgcggaggtgctgaccctgttcaatgtgacagaggcccagagcggggagtatgtgtgtaaggtttccaattatattggtgaagctaaccagtctgcgtggctcactgtcaccagacctgtggcaaaagactgctggagttaataccaccgacaaagagatggaggtgcttcacttaagaaatgtctcctttgaggacgcaggggagtatacgtgcttggcgggtaactctatcggactctcccatcactctgcatggttgaccgttctggaagccctggaagagaggccggcagtgatgacctcgcccctgtacctggagatcatcatctattgcacaggggccttcctcatctcctgcatggtggggtcggtcatcgtctacaagatgaagagtggtaccaagaagagtgacttccacagccagatggctgtgcacaagctggccaagagcatccctctgcgcagacaggtaacagtgtctgctgactccagtgcatccatgaactctggggttcttctggttcggccatcacggctctcctccagtgggactcccatgctagcaggggtctctgagtatgagcttcccgaagaccctcgctgggagctgcctcgggacagactggtcttaggcaaacccctgggagagggctgctttgggcaggtggtgttggcagaggctatcgggctggacaaggacaaacccaaccgtgtgaccaaagtggctgtgaagatgttgaagtcggacgcaacagagaaagacttgtcagacctgatctcagaaatggagatgatgaagatgatcgggaagcataagaatatcatcaacctgctgggggcctgcacgcaggatggtcccttgtatgtcatcgtggagtatgcctccaagggcaacctgcgggagtacctgcaggcccggaggcccccagggctggaatactgctacaaccccagccacaacccagaggagcagctctcctccaaggacctggtgtcctgcgcctaccaggtggcccgaggcatggagtatctggcctccaagaagtgcatacaccgagacctggcagccaggaatgtcctggtgacagaggacaatgtgatgaagatagcagactttggcctcgcacgggacattcaccacatcgactactataaaaagacaaccaacggccgactgcctgtgaagtggatggcacccgaggcattatttgaccggatctacacccaccagagtgatgtgtggtctttcggggtgctcctgtgggagatcttcactctgggcggctccccataccccggtgtgcctgtggaggaacttttcaagctgctgaaggagggtcaccgcatggacaagcccagtaactgcaccaacgagctgtacatgatgatgcgggactgctggcatgcagtgccctcacagagacccaccttcaagcagctggtggaagacctggaccgcatcgtggccttgacctccaaccaggagtacctggacctgtccatgcccctggaccagtactcccccagctttcccgacacccggagctctacgtgctcctcaggggaggattccgtcttctctcatgagccgctgcccgaggagccctgcctgccccgacacccagcccagcttgccaatggcggactcaaacgccgctgactgccacccacacgccctccccagactccaccgtcagctgtaaccctcacccacagcccctgctgggcccaccacctgtccgtccctgtcccctttcctgctggcaggagccggctgcctaccaggggccttcctgtgtggcctgccttcaccccactcagctcacctctccctccacctcctctccacctgctggtgagaggtgcaaagaggcagatctttgctgccagccacttcatcccctcccagatgttggaccaacacccctccctgccaccaggcactgcctggagggcagggagtgggagccaatgaacaggcatgcaagtgagagcttcctgagctttctcctgtcggtttggtctgttttgccttcacccataagcccctcgcactctggtggcaggtgccttgtcctcagggctacagcagtagggaggtcagtgcttcgtgcctcgattgaaggtgacctctgccccagataggtggtgccagtggcttattaattccgatactagtttgctttgctgaccaaatgcctggtaccagaggatggtgaggcgaaggccaggttgggggcagtgttgtggccctggggcccagccccaaactgggggctctgtatatagctatgaagaaaacacaaagtgtataaatctgagtatatatttacatgtctttttaaaagggtcgttaccagagatttacccatcgggtaagatgctcctggtggctgggaggcatcagttgctatatattaaaaacaaaaaagaaaaaaaaggaaaatgtttttaaaaaggtcatatattttttgctacttttgctgttttatttttttaaattatgttctaaacctattttcagtttaggtccctcaataaaaattgctgctgcttcatttatctatgggctgtatgaaaagggtgggaatgtccactggaaagaagggacacccacgggccctggggctaggtctgtcccgagggcaccgcatgctcccggcgcaggttccttgtaacctcttcttcctaggtcctgcacccagacctcacgacgcacctcctgcctctccgctgcttttggaaagtcagaaaaagaagatgtctgcttcgagggcaggaaccccatccatgcagtagaggcgctgggcagagagtcaaggcccagcagccatcgaccatggatggtttcctccaaggaaaccggtggggttgggctggggagggggcacctacctaggaatagccacggggtagagctacagtgattaagaggaaagcaagggcgcggttgctcacgcctgtaatcccagcactttgggacaccgaggtgggcagatcacttcaggtcaggagtttgagaccagcctggccaacttagtgaaaccccatctctactaaaaatgcaaaaattatccaggcatggtggcacacgcctgtaatcccagctccacaggaggctgaggcagaatcccttgaagctgggaggcggaggttgcagtgagccgagattgcgccattgcactccagcctgggcaacagagaaaacaaaaaggaaaacaaatgatgaaggtctgcagaaactgaaacccagacatgtgtctgccccctctatgtgggcatggttttgccagtgcttctaagtgcaggagaacatgtcacctgaggctagttttgcattcaggtccctggcttcgtttcttgttggtatgcctccccagatcgtccttcctgtatccatgtgaccagactgtatttgttgggactgtcgcagatcttggcttcttacagttcttcctgtccaaactccatcctgtccctcaggaacggggggaaaattctccgaatgtttttggttttttggctgcttggaatttacttctgccacctgctggtcatcactgtcctcactaagtggattctggctcccccgtacctcatggctcaaactaccactcctcagtcgctatattaaagcttatattttgctggattactgctaaatacaaaagaaagttcaatatgttttcatttctgtagggaaaatgggattgctgctttaaatttctgagctagggattttttggcagctgcagtgttggcgactattgtaaaattctctttgtttctctctgtaaatagcacctgctaacattacaatttgtatttatgtttaaagaaggcatcatttggtgaacagaactaggaaatgaatttttagctcttaaaagcatttgctttgagaccgcacaggagtgtctttccttgtaaaacagtgatgataatttctgccttggccctaccttgaagcaatgttgtgtgaagggatgaagaatctaaaagtcttcataagtccttgggagaggtgctagaaaaatataaggcactatcataattacagtgatgtccttgctgttactactcaaatcacccacaaatttccccaaagactgcgctagctgtcaaataaaagacagtgaaattgacctg

SEQ ID NO: 7456 - DNA, 4255 bp, Homo sapiens
  source 1..4255: mol_type = unassigned DNA
cccaaggaccactcttctgcgtttggagttgctccccgcaaccccgggctcgtcgctttctccatcccgacccacgcggggcgcggggacaacacaggtcgcggaggagcgttgccattcaagtgactgcagcagcagcggcagcgcctcggttcctgagcccaccgcaggctgaaggcattgcgcgtagtccatgcccgtagaggaagtgtgcagatgggattaacgtccacatggagatatggaagaggaccggggattggtaccgtaaccatggtcagctggggtcgtttcatctgcctggtcgtggtcaccatggcaaccttgtccctggcccggccctccttcagtttagttgaggataccacattagagccagaagagccaccaaccaaataccaaatctctcaaccagaagtgtacgtggctgcgccaggggagtcgctagaggtgcgctgcctgttgaaagatgccgccgtgatcagttggactaaggatggggtgcacttggggcccaacaataggacagtgcttattggggagtacttgcagataaagggcgccacgcctagagactccggcctctatgcttgtactgccagtaggactgtagacagtgaaacttggtacttcatggtgaatgtcacagatgccatctcatccggagatgatgaggatgacaccgatggtgcggaagattttgtcagtgagaacagtaacaacaagagagcaccatactggaccaacacagaaaagatggaaaagcggctccatgctgtgcctgcggccaacactgtcaagtttcgctgcccagccggggggaacccaatgccaaccatgcggtggctgaaaaacgggaaggagtttaagcaggagcatcgcattggaggctacaaggtacgaaaccagcactggagcctcattatggaaagtgtggtcccatctgacaagggaaattatacctgtgtagtggagaatgaatacgggtccatcaatcacacgtaccacctggatgttgtggagcgatcgcctcaccggcccatcctccaagccggactgccggcaaatgcctccacagtggtcggaggagacgtagagtttgtctgcaaggtttacagtgatgcccagccccacatccagtggatcaagcacgtggaaaagaacggcagtaaatacgggcccgacgggctgccctacctcaaggttctcaaggccgccggtgttaacaccacggacaaagagattgaggttctctatattcggaatgtaacttttgaggacgctggggaatatacgtgcttggcgggtaattctattgggatatcctttcactctgcatggttgacagttctgccagcgcctggaagagaaaaggagattacagcttccccagactacctggagatagccatttactgcataggggtcttcttaatcgcctgtatggtggtaacagtcatcctgtgccgaatgaagaacacgaccaagaagccagacttcagcagccagccggctgtgcacaagctgaccaaacgtatccccctgcggagacaggtaacagtttcggctgagtccagctcctccatgaactccaacaccccgctggtgaggataacaacacgcctctcttcaacggcagacacccccatgctggcaggggtctccgagtatgaacttccagaggacccaaaatgggagtttccaagagataagctgacactgggcaagcccctgggagaaggttgctttgggcaagtggtcatggcggaagcagtgggaattgacaaagacaagcccaaggaggcggtcaccgtggccgtgaagatgttgaaagatgatgccacagagaaagacctttctgatctggtgtcagagatggagatgatgaagatgattgggaaacacaagaatatcataaatcttcttggagcctgcacacaggatgggcctctctatgtcatagttgagtatgcctctaaaggcaacctccgagaatacctccgagcccggaggccacccgggatggagtactcctatgacattaaccgtgttcctgaggagcagatgaccttcaaggacttggtgtcatgcacctaccagctggccagaggcatggagtacttggcttcccaaaaatgtattcatcgagatttagcagccagaaatgttttggtaacagaaaacaatgtgatgaaaatagcagactttggactcgccagagatatcaacaatatagactattacaaaaagaccaccaatgggcggcttccagtcaagtggatggctccagaagccctgtttgatagagtatacactcatcagagtgatgtctggtccttcggggtgttaatgtgggagatcttcactttagggggctcgccctacccagggattcccgtggaggaactttttaagctgctgaaggaaggacacagaatggataagccagccaactgcaccaacgaactgtacatgatgatgagggactgttggcatgcagtgccctcccagagaccaacgttcaagcagttggtagaagacttggatcgaattctcactctcacaaccaatgaggaatacttggacctcagccaacctctcgaacagtattcacctagttaccctgacacaagaagttcttgttcttcaggagatgattctgttttttctccagaccccatgccttacgaaccatgccttcctcagtatccacacataaacggcagtgttaaaacatgaatgactgtgtctgcctgtccccaaacaggacagcactgggaacctagctacactgagcagggagaccatgcctcccagagcttgttgtctccacttgtatatatggatcagaggagtaaataattggaaaagtaatcagcatatgtgtaaagatttatacagttgaaaacttgtaatcttccccaggaggagaagaaggtttctggagcagtggactgccacaagccaccatgtaacccctctcacctgccgtgcgtactggctgtggaccagtaggactcaaggtggacgtgcgttctgccttccttgttaattttgtaataattggagaagatttatgtcagcacacacttacagagcacaaatgcagtatataggtgctggatgtatgtaaatatattcaaattatgtataaatatatattatatatttacaaggagttattttttgtattgattttaaatggatgtcccaatgcacctagaaaattggtctctctttttttaatagctatttgctaaatgctgttcttacacataatttcttaattttcaccgagcagaggtggaaaaatacttttgctttcagggaaaatggtataacgttaatttattaataaattggtaatatacaaaacaattaatcatttatagttttttttgtaatttaagtggcatttctatgcaggcagcacagcagactagttaatctattgcttggacttaactagttatcagatcctttgaaaagagaatatttacaatatatgactaatttggggaaaatgaagttttgatttatttgtgtttaaatgctgctgtcagacgattgttcttagacctcctaaatgccccatattaaaagaactcattcataggaaggtgtttcattttggtgtgcaaccctgtcattacgtcaacgcaacgtctaactggacttcccaagataaatggtaccagcgtcctcttaaaagatgccttaatccattccttgaggacagaccttagttgaaatgatagcagaatgtgcttctctctggcagctggccttctgcttctgagttgcacattaatcagattagcctgtattctcttcagtgaattttgataatggcttccagactctttggcgttggagacgcctgttaggatcttcaagtcccatcatagaaaattgaaacacagagttgttctgctgatagttttggggatacgtccatctttttaagggattgctttcatctaattctggcaggacctcaccaaaagatccagcctcatacctacatcagacaaaatatcgccgttgttccttctgtactaaagtattgtgttttgctttggaaacacccactcactttgcaatagccgtgcaagatgaatgcagattacactgatcttatgtgttacaaaattggagaaagtatttaataaaacctgttaatttttatactgacaataaaaatgtttctacagatattaatgttaacaagacaaaataaatgtcacgcaactta

SEQ ID NO: 7457 - DNA, 3990 bp, Homo sapiens
  source 1..3990: mol_type = unassigned DNA
acagactctcccgcagaactgaccccagcaagaagcctttgggagcagtagagatggagtttcactatgttgcccaggctagccttgaactcctgacctcagatgatctgcccgcgcaggcctcccgaagtgctgggattacaggcatgagccaccgcacctggcctgccaactcttgttaagatctcgaaggaaacattttcttcccctgaaggaaacccagctatgcagacaccagctgataatcttgcattcctgaaagatgttgcacccctatggcaagtggcggctgctgaggctctgacgtgactcccaggcatgaacgctctcagctgtgtttacctcagctcctcgggagggagcctgggagactgacgcctgagttttacatcagtgtcaaaacccaagcacaacctagggagggacctcctgcctagtgtgtgtgggtcaggagatagaaaagctctcactgagtaaactggacaaggtcaatatacctcgctgattgagaagacttcactctctctgcaaagagacgtgtgtgttttagaggaagtgggagccccagccgattctgcaagacttccgagagtcagatatccagacagaagatgcggacacctgggtgaccagacagcgaagaggaaagaacaaaacgagcatgtgccaagcctgtgagggagaaagggcaacaaaccagtgaccttccacagaaatgtgtttaaacaaaacaaaacagctctttggcgttgctaagagactgccattttggaggaaagagcgatcgcctcaccggcccatcctccaagccggactgccggcaaatgcctccacagtggtcggaggagacgtagagtttgtctgcaaggtttacagtgatgcccagccccacatccagtggatcaagcacgtggaaaagaacggcagtaaatacgggcccgacgggctgccctacctcaaggttctcaaggccgccggtgttaacaccacggacaaagagattgaggttctctatattcggaatgtaacttttgaggacgctggggaatatacgtgcttggcgggtaattctattgggatatcctttcactctgcatggttgacagttctgccagcgcctggaagagaaaaggagattacagcttccccagactacctggagatagccatttactgcataggggtcttcttaatcgcctgtatggtggtaacagtcatcctgtgccgaatgaagaacacgaccaagaagccagacttcagcagccagccggctgtgcacaagctgaccaaacgtatccccctgcggagacaggtaacagtttcggctgagtccagctcctccatgaactccaacaccccgctggtgaggataacaacacgcctctcttcaacggcagacacccccatgctggcaggggtctccgagtatgaacttccagaggacccaaaatgggagtttccaagagataagctgacactgggcaagcccctgggagaaggttgctttgggcaagtggtcatggcggaagcagtgggaattgacaaagacaagcccaaggaggcggtcaccgtggccgtgaagatgttgaaagatgatgccacagagaaagacctttctgatctggtgtcagagatggagatgatgaagatgattgggaaacacaagaatatcataaatcttcttggagcctgcacacaggatgggcctctctatgtcatagttgagtatgcctctaaaggcaacctccgagaatacctccgagcccggaggccacccgggatggagtactcctatgacattaaccgtgttcctgaggagcagatgaccttcaaggacttggtgtcatgcacctaccagctggccagaggcatggagtacttggcttcccaaaaatgtattcatcgagatttagcagccagaaatgttttggtaacagaaaacaatgtgatgaaaatagcagactttggactcgccagagatatcaacaatatagactattacaaaaagaccaccaatgggcggcttccagtcaagtggatggctccagaagccctgtttgatagagtatacactcatcagagtgatgtctggtccttcggggtgttaatgtgggagatcttcactttagggggctcgccctacccagggattcccgtggaggaactttttaagctgctgaaggaaggacacagaatggataagccagccaactgcaccaacgaactgtacatgatgatgagggactgttggcatgcagtgccctcccagagaccaacgttcaagcagttggtagaagacttggatcgaattctcactctcacaaccaatgaggaatacttggacctcagccaacctctcgaacagtattcacctagttaccctgacacaagaagttcttgttcttcaggagatgattctgttttttctccagaccccatgccttacgaaccatgccttcctcagtatccacacataaacggcagtgttaaaacatgaatgactgtgtctgcctgtccccaaacaggacagcactgggaacctagctacactgagcagggagaccatgcctcccagagcttgttgtctccacttgtatatatggatcagaggagtaaataattggaaaagtaatcagcatatgtgtaaagatttatacagttgaaaacttgtaatcttccccaggaggagaagaaggtttctggagcagtggactgccacaagccaccatgtaacccctctcacctgccgtgcgtactggctgtggaccagtaggactcaaggtggacgtgcgttctgccttccttgttaattttgtaataattggagaagatttatgtcagcacacacttacagagcacaaatgcagtatataggtgctggatgtatgtaaatatattcaaattatgtataaatatatattatatatttacaaggagttattttttgtattgattttaaatggatgtcccaatgcacctagaaaattggtctctctttttttaatagctatttgctaaatgctgttcttacacataatttcttaattttcaccgagcagaggtggaaaaatacttttgctttcagggaaaatggtataacgttaatttattaataaattggtaatatacaaaacaattaatcatttatagttttttttgtaatttaagtggcatttctatgcaggcagcacagcagactagttaatctattgcttggacttaactagttatcagatcctttgaaaagagaatatttacaatatatgactaatttggggaaaatgaagttttgatttatttgtgtttaaatgctgctgtcagacgattgttcttagacctcctaaatgccccatattaaaagaactcattcataggaaggtgtttcattttggtgtgcaaccctgtcattacgtcaacgcaacgtctaactggacttcccaagataaatggtaccagcgtcctcttaaaagatgccttaatccattccttgaggacagaccttagttgaaatgatagcagaatgtgcttctctctggcagctggccttctgcttctgagttgcacattaatcagattagcctgtattctcttcagtgaattttgataatggcttccagactctttggcgttggagacgcctgttaggatcttcaagtcccatcatagaaaattgaaacacagagttgttctgctgatagttttggggatacgtccatctttttaagggattgctttcatctaattctggcaggacctcaccaaaagatccagcctcatacctacatcagacaaaatatcgccgttgttccttctgtactaaagtattgtgttttgctttggaaacacccactcactttgcaatagccgtgcaagatgaatgcagattacactgatcttatgtgttacaaaattggagaaagtatttaataaaacctgttaatttttatactgacaataaaaatgtttctacagatattaatgttaacaaga

SEQ ID NO: 7458 - DNA, 1736 bp, Homo sapiens
  source 1..1736: mol_type = unassigned DNA
gccctacccagggattcccgtggaggaactttttaagctgctgaaggaaggacacagaatggataagccagccaactgcaccaacgaactgtacatgatgatgagggactgttggcatgcagtgccctcccagagaccaacgttcaagcagttggtagaagacttggatcgaattctcactctcacaaccaatgaggaatacttggacctcagtcagcctctcgaaccgtattcaccttgttatcctgacccaagatgaaataaaacgtctctcttcccttctttcaggaatacttggacctcagccaacctctcgaacagtattcacctagttaccctgacacaagaagttcttgttcttcaggagatgattctgttttttctccagaccccatgccttacgaaccatgccttcctcagtatccacacataaacggcagtgttaaaacatgaatgactgtgtctgcctgtccccaaacaggacagcactgggaacctagctacactgagcagggagaccatgcctcccagagcttgttgtctccacttgtatatatggatcagaggagtaaataattggaaaagtaatcagcatatgtgtaaagatttatacagttgaaaacttgtaatcttccccaggaggagaagaaggtttctggagcagtggactgccacaagccaccatgtaacccctctcacctgccgtgcgtactggctgtggaccagtaggactcaaggtggacgtgcgttctgccttccttgttaattttgtaataattggagaagatttatgtcagcacacacttacagagcacaaatgcagtatataggtgctggatgtatgtaaatatattcaaattatgtataaatatatattatatatttacaaggagttattttttgtattgattttaaatggatgtcccaatgcacctagaaaattggtctctctttttttaatagctatttgctaaatgctgttcttacacataatttcttaattttcaccgagcagaggtggaaaaatacttttgctttcagggaaaatggtataacgttaatttattaataaattggtaatatacaaaacaattaatcatttatagttttttttgtaatttaagtggcatttctatgcaggcagcacagcagactagttaatctattgcttggacttaactagttatcagatcctttgaaaagagaatatttacaatatatgactaatttggggaaaatgaagttttgatttatttgtgtttaaatgctgctgtcagacgattgttcttagacctcctaaatgccccatattaaaagaactcattcataggaaggtgtttcattttggtgtgcaaccctgtcattacgtcaacgcaacgtctaactggacttcccaagataaatggtaccagcgtcctcttaaaagatgccttaatccattccttgaggacagaccttagttgaaatgatagcagaatgtgcttctctctggcagctggccttctgcttctgagttgcacattaatcagattagcctgtattctcttcagtgaattttgataatggcttccagactctttggcgttggagacgcctgttaggatcttcaagtcccatcatagaaaattgaaacacagagttgttctgctgatagttttggggatacgtccatctttttaagggattgctttcatctaattctggcaggacctcaccaaaagatccagcctcatacc

SEQ ID NO: 7459 - DNA, 3547 bp, Homo sapiens
  source 1..3547: mol_type = unassigned DNA
ggcggcggctggaggagagcgcggtggagagccgagcgggcgggcggcgggtgcggagcgggcgagggagcgcgcgcggccgccacaaagctcgggcgccgcggggctgcatgcggcgtacctggcccggcgcggcgactgctctccgggctggcgggggccggccgcgagccccgggggccccgaggccgcagcttgcctgcgcgctctgagccttcgcaactcgcgagcaaagtttggtggaggcaacgccaagcctgagtcctttcttcctctcgttccccaaatccgagggcagcccgcgggcgtcatgcccgcgctcctccgcagcctggggtacgcgtgaagcccgggaggcttggcgccggcgaagacccaaggaccactcttctgcgtttggagttgctccccgcaaccccgggctcgtcgctttctccatcccgacccacgcggggcgcggggacaacacaggtcgcggaggagcgttgccattcaagtgactgcagcagcagcggcagcgcctcggttcctgagcccaccgcaggctgaaggcattgcgcgtagtccatgcccgtagaggaagtgtgcagatgggattaacgtccacatggagatatggaagaggaccggggattggtaccgtaaccatggtcagctggggtcgtttcatctgcctggtcgtggtcaccatggcaaccttgtccctggcccggccctccttcagtttagttgaggataccacattagagccagaaggagcaccatactggaccaacacagaaaagatggaaaagcggctccatgctgtgcctgcggccaacactgtcaagtttcgctgcccagccggggggaacccaatgccaaccatgcggtggctgaaaaacgggaaggagtttaagcaggagcatcgcattggaggctacaaggtacgaaaccagcactggagcctcattatggaaagtgtggtcccatctgacaagggaaattatacctgtgtagtggagaatgaatacgggtccatcaatcacacgtaccacctggatgttgtggagcgatcgcctcaccggcccatcctccaagccggactgccggcaaatgcctccacagtggtcggaggagacgtagagtttgtctgcaaggtttacagtgatgcccagccccacatccagtggatcaagcacgtggaaaagaacggcagtaaatacgggcccgacgggctgccctacctcaaggttctcaaggccgccggtgttaacaccacggacaaagagattgaggttctctatattcggaatgtaacttttgaggacgctggggaatatacgtgcttggcgggtaattctattgggatatcctttcactctgcatggttgacagttctgccagcgcctggaagagaaaaggagattacagcttccccagactacctggagatagccatttactgcataggggtcttcttaatcgcctgtatggtggtaacagtcatcctgtgccgaatgaagaacacgaccaagaagccagacttcagcagccagccggctgtgcacaagctgaccaaacgtatccccctgcggagacaggtttcggctgagtccagctcctccatgaactccaacaccccgctggtgaggataacaacacgcctctcttcaacggcagacacccccatgctggcaggggtctccgagtatgaacttccagaggacccaaaatgggagtttccaagagataagctgacactgggcaagcccctgggagaaggttgctttgggcaagtggtcatggcggaagcagtgggaattgacaaagacaagcccaaggaggcggtcaccgtggccgtgaagatgttgaaagatgatgccacagagaaagacctttctgatctggtgtcagagatggagatgatgaagatgattgggaaacacaagaatatcataaatcttcttggagcctgcacacaggatgggcctctctatgtcatagttgagtatgcctctaaaggcaacctccgagaatacctccgagcccggaggccacccgggatggagtactcctatgacattaaccgtgttcctgaggagcagatgaccttcaaggacttggtgtcatgcacctaccagctggccagaggcatggagtacttggcttcccaaaaatgtattcatcgagatttagcagccagaaatgttttggtaacagaaaacaatgtgatgaaaatagcagactttggactcgccagagatatcaacaatatagactattacaaaaagaccaccaatgggcggcttccagtcaagtggatggctccagaagccctgtttgatagagtatacactcatcagagtgatgtctggtccttcggggtgttaatgtgggagatcttcactttagggggctcgccctacccagggattcccgtggaggaactttttaagctgctgaaggaaggacacagaatggataagccagccaactgcaccaacgaactgtacatgatgatgagggactgttggcatgcagtgccctcccagagaccaacgttcaagcagttggtagaagacttggatcgaattctcactctcacaaccaatgaggaatacttggacctcagccaacctctcgaacagtattcacctagttaccctgacacaagaagttcttgttcttcaggagatgattctgttttttctccagaccccatgccttacgaaccatgccttcctcagtatccacacataaacggcagtgttaaaacatgaatgactgtgtctgcctgtccccaaacaggacagcactgggaacctagctacactgagcagggagaccatgcctcccagagcttgttgtctccacttgtatatatggatcagaggagtaaataattggaaaagtaatcagcatatgtgtaaagatttatacagttgaaaacttgtaatcttccccaggaggagaagaaggtttctggagcagtggactgccacaagccaccatgtaacccctctcacctgccgtgcgtactggctgtggaccagtaggactcaaggtggacgtgcgttctgccttccttgttaattttgtaataattggagaagatttatgtcagcacacacttacagagcacaaatgcagtatataggtgctggatgtatgtaaatatattcaaattatgtataaatatatattatatatttacaaggagttattttttgtattgattttaaatggatgtcccaatgcacctagaaaattggtctctctttttttaatagctatttgctaaatgctgttcttacacataatttcttaattttcaccgagcagaggtggaaaaatacttttgctttcagggaaaatggtataacgttaatttattaataaattggtaatatacaaaacaattaatcatttatagttttttttgtaatttaagtggcatttctatgcaggcagcacagcagactagttaatctattgcttggacttaactagttatcagatcctttgaaaagagaatatttacaatatatgactaatttggggaaaa

SEQ ID NO: 7460 - DNA, 3244 bp, Homo sapiens
  source 1..3244: mol_type = unassigned DNA
ccggccgcgagccccgggggccccgaggccgcagcttgcctgcgcgctctgagccttcgcaactcgcgagcaaagtttggtggaggcaacgccaagcctgagtcctttcttcctctcgttccccaaatccgagggcagcccgcgggcgtcatgcccgcgctcctccgcagcctggggtacgcgtgaagcccgggaggcttggcgccggcgaagacccaaggaccactcttctgcgtttggagttgctccccgcaaccccgggctcgtcgctttctccatcccgacccacgcggggcgcggggacaacacaggtcgcggaggagcgttgccattcaagtgactgcagcagcagcggcagcgcctcggttcctgagcccaccgcaggctgaaggcattgcgcgtagtccatgcccgtagaggaagtgtgcagatgggattaacgtccacatggagatatggaagaggaccggggattggtaccgtaaccatggtcagctggggtcgtttcatctgcctggtcgtggtcaccatggcaaccttgtccctggcccggccctccttcagtttagttgaggataccacattagagccagaagagccaccaaccaaataccaaatctctcaaccagaagtgtacgtggctgcgccaggggagtcgctagaggtgcgctgcctgttgaaagatgccgccgtgatcagttggactaaggatggggtgcacttggggcccaacaataggacagtgcttattggggagtacttgcagataaagggcgccacgcctagagactccggcctctatgcttgtactgccagtaggactgtagacagtgaaacttggtacttcatggtgaatgtcacagatgccatctcatccggagatgatgaggatgacaccgatggtgcggaagattttgtcagtgagaacagtaacaacaagagagcaccatactggaccaacacagaaaagatggaaaagcggctccatgctgtgcctgcggccaacactgtcaagtttcgctgcccagccggggggaacccaatgccaaccatgcggtggctgaaaaacgggaaggagtttaagcaggagcatcgcattggaggctacaaggtacgaaaccagcactggagcctcattatggaaagtgtggtcccatctgacaagggaaattatacctgtgtagtggagaatgaatacgggtccatcaatcacacgtaccacctggatgttgtggagcgatcgcctcaccggcccatcctccaagccggactgccggcaaatgcctccacagtggtcggaggagacgtagagtttgtctgcaaggtttacagtgatgcccagccccacatccagtggatcaagcacgtggaaaagaacggcagtaaatacgggcccgacgggctgccctacctcaaggttctcaaggtttcggctgagtccagctcctccatgaactccaacaccccgctggtgaggataacaacacgcctctcttcaacggcagacacccccatgctggcaggggtctccgagtatgaacttccagaggacccaaaatgggagtttccaagagataagctgacactgggcaagcccctgggagaaggttgctttgggcaagtggtcatggcggaagcagtgggaattgacaaagacaagcccaaggaggcggtcaccgtggccgtgaagatgttgaaagatgatgccacagagaaagacctttctgatctggtgtcagagatggagatgatgaagatgattgggaaacacaagaatatcataaatcttcttggagcctgcacacaggatgggcctctctatgtcatagttgagtatgcctctaaaggcaacctccgagaatacctccgagcccggaggccacccgggatggagtactcctatgacattaaccgtgttcctgaggagcagatgaccttcaaggacttggtgtcatgcacctaccagctggccagaggcatggagtacttggcttcccaaaaatgtattcatcgagatttagcagccagaaatgttttggtaacagaaaacaatgtgatgaaaatagcagactttggactcgccagagatatcaacaatatagactattacaaaaagaccaccaatgggcggcttccagtcaagtggatggctccagaagccctgtttgatagagtatacactcatcagagtgatgtctggtccttcggggtgttaatgtgggagatcttcactttagggggctcgccctacccagggattcccgtggaggaactttttaagctgctgaaggaaggacacagaatggataagccagccaactgcaccaacgaactgtacatgatgatgagggactgttggcatgcagtgccctcccagagaccaacgttcaagcagttggtagaagacttggatcgaattctcactctcacaaccaatgaggaatacttggacctcagccaacctctcgaacagtattcacctagttaccctgacacaagaagttcttgttcttcaggagatgattctgttttttctccagaccccatgccttacgaaccatgccttcctcagtatccacacataaacggcagtgttaaaacatgaatgactgtgtctgcctgtccccaaacaggacagcactgggaacctagctacactgagcagggagaccatgcctcccagagcttgttgtctccacttgtatatatggatcagaggagtaaataattggaaaagtaatcagcatatgtgtaaagatttatacagttgaaaacttgtaatcttccccaggaggagaagaaggtttctggagcagtggactgccacaagccaccatgtaacccctctcacctgccgtgcgtactggctgtggaccagtaggactcaaggtggacgtgcgttctgccttccttgttaattttgtaataattggagaagatttatgtcagcacacacttacagagcacaaatgcagtatataggtgctggatgtatgtaaatatattcaaattatgtataaatatatattatatatttacaaggagttattttttgtattgattttaaatggatgtcccaatgcacctagaaaattggtctctctttttttaatagctatttgctaaatgctgttcttacacataatttcttaattttcaccgagcagaggtggaaaaatacttttgctttcagggaaaatggtataacgttaatttattaataaattggtaatatacaaaacaa

SEQ ID NO: 7461 - DNA, 3501 bp, Homo sapiens
  source 1..3501: mol_type = unassigned DNA
ggcgggtgcggagcgggcgagggagcgcgcgcggccgccacaaagctcgggcgccgcggggctgcatgcggcgtacctggcccggcgcggcgactgctctccgggctggcgggggccggccgcgagccccgggggccccgaggccgcagcttgcctgcgcgctctgagccttcgcaactcgcgagcaaagtttggtggaggcaacgccaagcctgagtcctttcttcctctcgttccccaaatccgagggcagcccgcgggcgtcatgcccgcgctcctccgcagcctggggtacgcgtgaagcccgggaggcttggcgccggcgaagacccaaggaccactcttctgcgtttggagttgctccccgcaaccccgggctcgtcgctttctccatcccgacccacgcggggcgcggggacaacacaggtcgcggaggagcgttgccattcaagtgactgcagcagcagcggcagcgcctcggttcctgagcccaccgcaggctgaaggcattgcgcgtagtccatgcccgtagaggaagtgtgcagatgggattaacgtccacatggagatatggaagaggaccggggattggtaccgtaaccatggtcagctggggtcgtttcatctgcctggtcgtggtcaccatggcaaccttgtccctggcccggccctccttcagtttagttgaggataccacattagagccagaaggagcaccatactggaccaacacagaaaagatggaaaagcggctccatgctgtgcctgcggccaacactgtcaagtttcgctgcccagccggggggaacccaatgccaaccatgcggtggctgaaaaacgggaaggagtttaagcaggagcatcgcattggaggctacaaggtacgaaaccagcactggagcctcattatggaaagtgtggtcccatctgacaagggaaattatacctgtgtagtggagaatgaatacgggtccatcaatcacacgtaccacctggatgttgtggagcgatcgcctcaccggcccatcctccaagccggactgccggcaaatgcctccacagtggtcggaggagacgtagagtttgtctgcaaggtttacagtgatgcccagccccacatccagtggatcaagcacgtggaaaagaacggcagtaaatacgggcccgacgggctgccctacctcaaggttctcaagcactcggggataaatagttccaatgcagaagtgctggctctgttcaatgtgaccgaggcggatgctggggaatatatatgtaaggtctccaattatatagggcaggccaaccagtctgcctggctcactgtcctgccaaaacagcaaggccgccggtgttaacaccacggacaaagagattgaggttctctatattcggaatgtaacttttgaggacgctggggaatatacgtgcttggcgggtaattctattgggatatcctttcactctgcatggttgacagttctgccagcgcctggaagagaaaaggagattacagcttccccagactacctggagatagccatttactgcataggggtcttcttaatcgcctgtatggtggtaacagtcatcctgtgccgaatgaagaacacgaccaagaagccagacttcagcagccagccggctgtgcacaagctgaccaaacgtatccccctgcggagacaggtaacagtttcggctgagtccagctcctccatgaactccaacaccccgctggtgaggataacaacacgcctctcttcaacggcagacacccccatgctggcaggggtctccgagtatgaacttccagaggacccaaaatgggagtttccaagagataagctgacactgggcaagcccctgggagaaggttgctttgggcaagtggtcatggcggaagcagtgggaattgacaaagacaagcccaaggaggcggtcaccgtggccgtgaagatgttgaaagatgatgccacagagaaagacctttctgatctggtgtcagagatggagatgatgaagatgattgggaaacacaagaatatcataaatcttcttggagcctgcacacaggatgggcctctctatgtcatagttgagtatgcctctaaaggcaacctccgagaatacctccgagcccggaggccacccgggatggagtactcctatgacattaaccgtgttcctgaggagcagatgaccttcaaggacttggtgtcatgcacctaccagctggccagaggcatggagtacttggcttcccaaaaatgtattcatcgagatttagcagccagaaatgttttggtaacagaaaacaatgtgatgaaaatagcagactttggactcgccagagatatcaacaatatagactattacaaaaagaccaccaatgggcggcttccagtcaagtggatggctccagaagccctgtttgatagagtatacactcatcagagtgatgtctggtccttcggggtgttaatgtgggagatcttcactttagggggctcgccctacccagggattcccgtggaggaactttttaagctgctgaaggaaggacacagaatggataagccagccaactgcaccaacgaactgtacatgatgatgagggactgttggcatgcagtgccctcccagagaccaacgttcaagcagttggtagaagacttggatcgaattctcactctcacaaccaatgaggaatacttggacctcagccaacctctcgaacagtattcacctagttaccctgacacaagaagttcttgttcttcaggagatgattctgttttttctccagaccccatgccttacgaaccatgccttcctcagtatccacacataaacggcagtgttaaaacatgaatgactgtgtctgcctgtccccaaacaggacagcactgggaacctagctacactgagcagggagaccatgcctcccagagcttgttgtctccacttgtatatatggatcagaggagtaaataattggaaaagtaatcagcatatgtgtaaagatttatacagttgaaaacttgtaatcttccccaggaggagaagaaggtttctggagcagtggactgccacaagccaccatgtaacccctctcacctgccgtgcgtactggctgtggaccagtaggactcaaggtggacgtgcgttctgccttccttgttaattttgtaataattggagaagatttatgtcagcacacacttacagagcacaaatgcagtatataggtgctggatgtatgtaaatatattcaaattatgtataaatatatattatatatttacaaggagttattttttgtattgattttaaatggatgtcccaatgcacctagaaaattggtctctctttttttaatagctatttgctaaatgctgttcttacacataatttcttaattttcaccgagcagaggtggaaaaatacttttgctttcagggaaaatggtataacgttaatttattaataaattggtaatat

SEQ ID NO: 7462 - DNA, 3003 bp, Homo sapiens
  source 1..3003: mol_type = unassigned DNA; mol_type = unassigned DNA
ggctggaggagagcgcggtggagagccgagcgggcgggcggcgggtgcggagcgggcgagggagcgcgcgcggccgccacaaagctcgggcgccgcggggctgcatgcggcgtacctggcccggcgcggcgactgctctccgggctggcgggggccggccgcgagccccgggggccccgaggccgcagcttgcctgcgcgctctgagccttcgcaactcgcgagcaaagtttggtggaggcaacgccaagcctgagtcctttcttcctctcgttccccaaatccgagggcagcccgcgggcgtcatgcccgcgctcctccgcagcctggggtacgcgtgaagcccgggaggcttggcgccggcgaagacccaaggaccactcttctgcgtttggagttgctccccgcaaccccgggctcgtcgctttctccatcccgacccacgcggggcgcggggacaacacaggtcgcggaggagcgttgccattcaagtgactgcagcagcagcggcagcgcctcggttcctgagcccaccgcaggctgaaggcattgcgcgtagtccatgcccgtagaggaagtgtgcagatgggattaacgtccacatggagatatggaagaggaccggggattggtaccgtaaccatggtcagctggggtcgtttcatctgcctggtcgtggtcaccatggcaaccttgtccctggcccggccctccttcagtttagttgaggataccacattagagccagaaggagcaccatactggaccaacacagaaaagatggaaaagcggctccatgctgtgcctgcggccaacactgtcaagtttcgctgcccagccggggggaacccaatgccaaccatgcggtggctgaaaaacgggaaggagtttaagcaggagcatcgcattggaggctacaaggtacgaaaccagcactggagcctcattatggaaagtgtggtcccatctgacaagggaaattatacctgtgtagtggagaatgaatacgggtccatcaatcacacgtaccacctggatgttgtggagcgatcgcctcaccggcccatcctccaagccggactgccggcaaatgcctccacagtggtcggaggagacgtagagtttgtctgcaaggtttacagtgatgcccagccccacatccagtggatcaagcacgtggaaaagaacggcagtaaatacgggcccgacgggctgccctacctcaaggttctcaagcactcggggataaatagttccaatgcagaagtgctggctctgttcaatgtgaccgaggcggatgctggggaatatatatgtaaggtctccaattatatagggcaggccaaccagtctgcctggctcactgtcctgccaaaacagcaagcgcctggaagagaaaaggagattacagcttccccagactacctggagatagccatttactgcataggggtcttcttaatcgcctgtatggtggtaacagtcatcctgtgccgaatgaagaacacgaccaagaagccagacttcagcagccagccggctgtgcacaagctgaccaaacgtatccccctgcggagacaggtaacagtttcggctgagtccagctcctccatgaactccaacaccccgctggtgaggataacaacacgcctctcttcaacggcagacacccccatgctggcaggggtctccgagtatgaacttccagaggacccaaaatgggagtttccaagagataagctgacactgggcaagcccctgggagaaggttgctttgggcaagtggtcatggcggaagcagtgggaattgacaaagacaagcccaaggaggcggtcaccgtggccgtgaagatgttgaaagatgatgccacagagaaagacctttctgatctggtgtcagagatggagatgatgaagatgattgggaaacacaagaatatcataaatcttcttggagcctgcacacaggatgggcctctctatgtcatagttgagtatgcctctaaaggcaacctccgagaatacctccgagcccggaggccacccgggatggagtactcctatgacattaaccgtgttcctgaggagcagatgaccttcaaggacttggtgtcatgcacctaccagctggccagaggcatggagtacttggcttcccaaaaatgtattcatcgagatttagcagccagaaatgttttggtaacagaaaacaatgtgatgaaaatagcagactttggactcgccagagatatcaacaatatagactattacaaaaagaccaccaatgggcggcttccagtcaagtggatggctccagaagccctgtttgatagagtatacactcatcagagtgatgtctggtccttcggggtgttaatgtgggagatcttcactttagggggctcgccctacccagggattcccgtggaggaactttttaagctgctgaaggaaggacacagaatggataagccagccaactgcaccaacgaactgtacatgatgatgagggactgttggcatgcagtgccctcccagagaccaacgttcaagcagttggtagaagacttggatcgaattctcactctcacaaccaatgaggaatacttggacctcagccaacctctcgaacagtattcacctagttaccctgacacaagaagttcttgttcttcaggagatgattctgttttttctccagaccccatgccttacgaaccatgccttcctcagtatccacacataaacggcagtgttaaaacatgaatgactgtgtctgcctgtccccaaacaggacagcactgggaacctagctacactgagcagggagaccatgcctcccagagcttgttgtctccacttgtatatatggatcagaggagtaaataattggaaaagtaatcagcatatgtgtaaagatttatacagttgaaaacttgtaatcttccccaggaggagaagaaggtttctggagcagtggactgccacaagccaccatgtaacc

SEQ ID NO: 7463 - DNA, 497 bp, Homo sapiens
  source 1..497: mol_type = unassigned DNA; mol_type = unassigned DNA
ggggacccacaacatgttaccggttttcattttgctggggctcgcatttgaagcaagggctctagtgaggaggtggtgtagactcagcgggttatttaggtccgtgtgaagccgagttgcctgcccagcacctatagctcaactaggttttattgttctctacctgtcaatagttgatttatgatggattccaagagaaaagctaaggacagcctggggtacatcagacgtggtctcagggaggtcttcgtggaagtcaggaatacttggacctcagccaacctctcgaacagtattcacctagttaccctgacacaagaagttcttgttcttcaggagatgattctgttttttctccagaccccatgccttacgaaccatgccttcctcagtatccacacataaacggcagtgttaaaacatgaatgactgtgtctgcctgtccccaaacaggacagcactgggaacctagctacactgagcagggagaccatgcc

SEQ ID NO: 7464 - DNA, 1138 bp, Homo sapiens
  source 1..1138: mol_type = unassigned DNA; mol_type = unassigned DNA
ttcagcagccagccggctgtgcacaagctgaccaaacgtatccccctgcggagacaggtaacagtttcggctgagtccagctcctccatgaactccaacaccccgctggtgaggataacaacacgcctctcttcaacggcagacacccccatgctggcaggggtctccgagtatgaacttccagaggacccaaaatgggagtttccaagagataagctgacactgggcaagcccctgggagaaggttgctttgggcaagtggtcatggcggaagcagtgggaattgacaaagacaagcccaaggaggcggtcaccgtggccgtgaagatgttgaaagatgatgccacagagaaagacctttctgatctggtgtcagagatggagatgatgaagatgattgggaaacacaagaatatcataaatcttcttggagcctgcacacaggatgggcctctctatgtcatagttgagtatgcctctaaaggcaacctccgagaatacctccgagcccggaggccacccgggatggagtactcctatgacattaaccgtgttcctgaggagcagatgaccttcaaggacttggtgtcatgcacctaccagctggccagaggcatggagtacttggcttcccaaaaatgtattcatcgagatttagcagccagaaatgttttggtaacagaaaacaatgtgatgaaaatagcagactttggactcgccagagatatcaacaatatagactattacaaaaagaccaccaatgggcggcttccagtcaagtggatggctccagaagccctgtttgatagagtatacactcatcagagtgatgtctggtccttcggggtgttaatgtgggagatcttcactttagggggctcgccctacccagggattcccgtggaggaactttttaagctgctgaaggaaggacacagaatggataagccagccaactgcaccaacgaactgaatacttggacctcagccaacctctcgaacagtattcacctagttaccctgacacaagaagttcttgttcttcaggagatgattctgttttttctccagaccccatgccttacgaaccatgccttcctcagtatccacacataaacggcagtgttaaaacatgaat

SEQ ID NO: 7465 - DNA, 2472 bp, Homo sapiens
  source 1..2472: mol_type = unassigned DNA; mol_type = unassigned DNA
ggtaccgtaaccatggtcagctggggtcgtttcatctgcctggtcgtggtcaccatggcaaccttgtccctggcccggccctccttcagtttagttgaggataccacattagagccagaagagccaccaaccaaataccaaatctctcaaccagaagtgtacgtggctgcgccaggggagtcgctagaggtgcgctgcctgttgaaagatgccgccgtgatcagttggactaaggatggggtgcacttggggcccaacaataggacagtgcttattggggagtacttgcagataaagggcgccacgcctagagactccggcctctatgcttgtactgccagtaggactgtagacagtgaaacttggtacttcatggtgaatgtcacagatgccatctcatccggagatgatgaggatgacaccgatggtgcggaagattttgtcagtgagaacagtaacaacaagagagcaccatactggaccaacacagaaaagatggaaaagcggctccatgctgtgcctgcggccaacactgtcaagtttcgctgcccagccggggggaacccaatgccaaccatgcggtggctgaaaaacgggaaggagtttaagcaggagcatcgcattggaggctacaaggtacgaaaccagcactggagcctcattatggaaagtgtggtcccatctgacaagggaaattatacctgtgtagtggagaatgaatacgggtccatcaatcacacgtaccacctggatgttgtggagcgatcgcctcaccggcccatcctccaagccggactgccggcaaatgcctccacagtggtcggaggagacgtagagtttgtctgcaaggtttacagtgatgcccagccccacatccagtggatcaagcacgtggaaaagaacggcagtaaatacgggcccgacgggctgccctacctcaaggttctcaaggccgccggtgttaacaccacggacaaagagattgaggttctctatattcggaatgtaacttttgaggacgctggggaatatacgtgcttggcgggtaattctattgggatatcctttcactctgcatggttgacagttctgccagcgcctggaagagaaaaggagattacagcttccccagactacctggagatagccatttactgcataggggtcttcttaatcgcctgtatggtggtaacagtcatcctgtgccgaatgaagaacacgaccaagaagccagacttcagcagccagccggctgtgcacaagctgaccaaacgtatccccctgcggagacaggtttcggctgagtccagctcctccatgaactccaacaccccgctggtgaggataacaacacgcctctcttcaacggcagacacccccatgctggcaggggtctccgagtatgaacttccagaggacccaaaatgggagtttccaagagataagctgacactgggcaagcccctgggagaaggttgctttgggcaagtggtcatggcggaagcagtgggaattgacaaagacaagcccaaggaggcggtcaccgtggccgtgaagatgttgaaagatgatgccacagagaaagacctttctgatctggtgtcagagatggagatgatgaagatgattgggaaacacaagaatatcataaatcttcttggagcctgcacacaggatgggcctctctatgtcatagttgagtatgcctctaaaggcaacctccgagaatacctccgagcccggaggccacccgggatggagtactcctatgacattaaccgtgttcctgaggagcagatgaccttcaaggacttggtgtcatgcacctaccagctggccagaggcatggagtacttggcttcccaaaaatgtattcatcgagatttagcagccagaaatgttttggtaacagaaaacaatgtgatgaaaatagcagactttggactcgccagagatatcaacaatatagactattacaaaaagaccaccaatgggcggcttccagtcaagtggatggctccagaagccctgtttgatagagtatacactcatcagagtgatgtctggtccttcggggtgttaatgtgggagatcttcactttagggggctcgccctacccagggattcccgtggaggaactttttaagctgctgaaggaaggacacagaatggataagccagccaactgcaccaacgaactgtacatgatgatgagggactgttggcatgcagtgccctcccagagaccaacgttcaagcagttggtagaagacttggatcgaattctcactctcacaaccaatgaggaatacttggacctcagccaacctctcgaacagtattcacctagttaccctgacacaagaagttcttgttcttcaggagatgattctgttttttctccagaccccatgccttacgaaccatgccttcctcagtatccacacataaacggcagtgttaaaacatga

SEQ ID NO: 7466 - DNA, 3061 bp, Homo sapiens
  source 1..3061: mol_type = unassigned DNA; mol_type = unassigned DNA
gagcgggcgagggagcgcgcgcggccgccacaaagctcgggcgccgcggggctgcatgcggcgtacctggcccggcgcggcgactgctctccgggctggcgggggccggccgcgagccccgggggccccgaggccgcagcttgcctgcgcgctctgagccttcgcaactcgcgagcaaagtttggtggaggcaacgccaagcctgagtcctttcttcctctcgttccccaaatccgagggcagcccgcgggcgtcatgcccgcgctcctccgcagcctggggtacgcgtgaagcccgggaggcttggcgccggcgaagacccaaggaccactcttctgcgtttggagttgctccccgcaaccccgggctcgtcgctttctccatcccgacccacgcggggcgcggggacaacacaggtcgcggaggagcgttgccattcaagtgactgcagcagcagcggcagcgcctcggttcctgagcccaccgcaggctgaaggcattgcgcgtagtccatgcccgtagaggaagtgtgcagatgggattaacgtccacatggagatatggaagaggaccggggattggtaccgtaaccatggtcagctggggtcgtttcatctgcctggtcgtggtcaccatggcaaccttgtccctggcccggccctccttcagtttagttgaggataccacattagagccagaagagccaccaaccaaataccaaatctctcaaccagaagtgtacgtggctgcgccaggggagtcgctagaggtgcgctgcctgttgaaagatgccgccgtgatcagttggactaaggatggggtgcacttggggcccaacaataggacagtgcttattggggagtacttgcagataaagggcgccacgcctagagactccggcctctatgcttgtactgccagtaggactgtagacagtgaaacttggtacttcatggtgaatgtcacagatgccatctcatccggagatgatgaggatgacaccgatggtgcggaagattttgtcagtgagaacagtaacaacaagagagcaccatactggaccaacacagaaaagatggaaaagcggctccatgctgtgcctgcggccaacactgtcaagtttcgctgcccagccggggggaacccaatgccaaccatgcggtggctgaaaaacgggaaggagtttaagcaggagcatcgcattggaggctacaaggtacgaaaccagcactggagcctcattatggaaagtgtggtcccatctgacaagggaaattatacctgtgtagtggagaatgaatacgggtccatcaatcacacgtaccacctggatgttgtggagcgatcgcctcaccggcccatcctccaagccggactgccggcaaatgcctccacagtggtcggaggagacgtagagtttgtctgcaaggtttacagtgatgcccagccccacatccagtggatcaagcacgtggaaaagaacggcagtaaatacgggcccgacgggctgccctacctcaaggttctcaagcactcggggataaatagttccaatgcagaagtgctggctctgttcaatgtgaccgaggcggatgctggggaatatatatgtaaggtctccaattatatagggcaggccaaccagtctgcctggctcactgtcctgccaaaacagcaagcgcctggaagagaaaaggagattacagcttccccagactacctggagatagccatttactgcataggggtcttcttaatcgcctgtatggtggtaacagtcatcctgtgccgaatgaagaacacgaccaagaagccagacttcagcagccagccggctgtgcacaagctgaccaaacgtatccccctgcggagacaggtaacagtttcggctgagtccagctcctccatgaactccaacaccccgctggtgaggataacaacacgcctctcttcaacggcagacacccccatgctggcaggggtctccgagtatgaacttccagaggacccaaaatgggagtttccaagagataagctgacactgggcaagcccctgggagaaggttgctttgggcaagtggtcatggcggaagcagtgggaattgacaaagacaagcccaaggaggcggtcaccgtggccgtgaagatgttgaaagatgatgccacagagaaagacctttctgatctggtgtcagagatggagatgatgaagatgattgggaaacacaagaatatcataaatcttcttggagcctgcacacaggatgggcctctctatgtcatagttgagtatgcctctaaaggcaacctccgagaatacctccgagcccggaggccacccgggatggagtactcctatgacattaaccgtgttcctgaggagcagatgaccttcaaggacttggtgtcatgcacctaccagctggccagaggcatggagtacttggcttcccaaaaatgtattcatcgagatttagcagccagaaatgttttggtaacagaaaacaatgtgatgaaaatagcagactttggactcgccagagatatcaacaatatagactattacaaaaagaccaccaatgggcggcttccagtcaagtggatggctccagaagccctgtttgatagagtatacactcatcagagtgatgtctggtccttcggggtgttaatgtgggagatcttcactttagggggctcgccctacccagggattcccgtggaggaactttttaagctgctgaaggaaggacacagaatggataagccagccaactgcaccaacgaactgtacatgatgatgagggactgttggcatgcagtgccctcccagagaccaacgttcaagcagttggtagaagacttggatcgaattctcactctcacaaccaatgaggaatacttggacctcagccaacctctcgaacagtattcacctagttaccctgacacaagaagttcttgttcttcaggagatgattctgttttttctccagaccccatgccttacgaaccatgccttcctcagtatccacacataaacggcagtgttaaaacatga

SEQ ID NO: 7467 - DNA, 3001 bp, Homo sapiens
  source 1..3001: mol_type = unassigned DNA; mol_type = unassigned DNA
gagagccgagcgggcgggcggcgggtgcggagcgggcgagggagcgcgcgcggccgccacaaagctcgggcgccgcggggctgcatgcggcgtacctggcccggcgcggcgactgctctccgggctggcgggggccggccgcgagccccgggggccccgaggccgcagcttgcctgcgcgctctgagccttcgcaactcgcgagcaaagtttggtggaggcaacgccaagcctgagtcctttcttcctctcgttccccaaatccgagggcagcccgcgggcgtcatgcccgcgctcctccgcagcctggggtacgcgtgaagcccgggaggcttggcgccggcgaagacccaaggaccactcttctgcgtttggagttgctccccgcaaccccgggctcgtcgctttctccatcccgacccacgcggggcgcggggacaacacaggtcgcggaggagcgttgccattcaagtgactgcagcagcagcggcagcgcctcggttcctgagcccaccgcaggctgaaggcattgcgcgtagtccatgcccgtagaggaagtgtgcagatgggattaacgtccacatggagatatggaagaggaccggggattggtaccgtaaccatggtcagctggggtcgtttcatctgcctggtcgtggtcaccatggcaaccttgtccctggcccggccctccttcagtttagttgaggataccacattagagccagaagatgccatctcatccggagatgatgaggatgacaccgatggtgcggaagattttgtcagtgagaacagtaacaacaagagagcaccatactggaccaacacagaaaagatggaaaagcggctccatgctgtgcctgcggccaacactgtcaagtttcgctgcccagccggggggaacccaatgccaaccatgcggtggctgaaaaacgggaaggagtttaagcaggagcatcgcattggaggctacaaggtacgaaaccagcactggagcctcattatggaaagtgtggtcccatctgacaagggaaattatacctgtgtagtggagaatgaatacgggtccatcaatcacacgtaccacctggatgttgtggagcgatcgcctcaccggcccatcctccaagccggactgccggcaaatgcctccacagtggtcggaggagacgtagagtttgtctgcaaggtttacagtgatgcccagccccacatccagtggatcaagcacgtggaaaagaacggcagtaaatacgggcccgacgggctgccctacctcaaggttctcaagcactcggggataaatagttccaatgcagaagtgctggctctgttcaatgtgaccgaggcggatgctggggaatatatatgtaaggtctccaattatatagggcaggccaaccagtctgcctggctcactgtcctgccaaaacagcaagcgcctggaagagaaaaggagattacagcttccccagactacctggagatagccatttactgcataggggtcttcttaatcgcctgtatggtggtaacagtcatcctgtgccgaatgaagaacacgaccaagaagccagacttcagcagccagccggctgtgcacaagctgaccaaacgtatccccctgcggagacaggtaacagtttcggctgagtccagctcctccatgaactccaacaccccgctggtgaggataacaacacgcctctcttcaacggcagacacccccatgctggcaggggtctccgagtatgaacttccagaggacccaaaatgggagtttccaagagataagctgacactgggcaagcccctgggagaaggttgctttgggcaagtggtcatggcggaagcagtgggaattgacaaagacaagcccaaggaggcggtcaccgtggccgtgaagatgttgaaagatgatgccacagagaaagacctttctgatctggtgtcagagatggagatgatgaagatgattgggaaacacaagaatatcataaatcttcttggagcctgcacacaggatgggcctctctatgtcatagttgagtatgcctctaaaggcaacctccgagaatacctccgagcccggaggccacccgggatggagtactcctatgacattaaccgtgttcctgaggagcagatgaccttcaaggacttggtgtcatgcacctaccagctggccagaggcatggagtacttggcttcccaaaaatgtattcatcgagatttagcagccagaaatgttttggtaacagaaaacaatgtgatgaaaatagcagactttggactcgccagagatatcaacaatatagactattacaaaaagaccaccaatgggcggcttccagtcaagtggatggctccagaagccctgtttgatagagtatacactcatcagagtgatgtctggtccttcggggtgttaatgtgggagatcttcactttagggggctcgccctacccagggattcccgtggaggaactttttaagctgctgaaggaaggacacagaatggataagccagccaactgcaccaacgaactgtacatgatgatgagggactgttggcatgcagtgccctcccagagaccaacgttcaagcagttggtagaagacttggatcgaattctcactctcacaaccaatgagatctgaaagtttatggcttcattgagaaactgggaaaagttggtcaggcgcagtggctcatgcctgtaatcccagcactttgggaggccgaggcaggcggatcatgaggtcaggagttccagaccagcctggccaacatggtgaaaccctgtctctactaaagatacaaaaaattagccgggcgtgttggtgtgcacctgtaatcccagctactccgggaggctgaggcaggagagtcacttgaaccggggaggcggaggttgcagtgagccgagatcatgccattgcattccagccttggcgacagagcgagactccgtctcaaaaaaaaaaaaaataaaaa

SEQ ID NO: 7468 - DNA, 2650 bp, Homo sapiens
  source 1..2650: mol_type = unassigned DNA; mol_type = unassigned DNA
ggaccggggattggtaccgtaaccatggtcagctggggtcgtttcatctgcctggtcgtggtcaccatggcaaccttgtccctggcccggccctccttcagtttagttgaggataccacattagagccagaagagccaccaaccaaataccaaatctctcaaccagaagtgtacgtggctgcgccaggggagtcgctagaggtgcgctgcctgttgaaagatgccgccgtgatcagttggactaaggatggggtgcacttggggcccaacaataggacagtgcttattggggagtacttgcagataaagggcgccacgcctagagactccggcctctatgcttgtactgccagtaggactgtagacagtgaaacttggtacttcatggtgaatgtcacagatgccatctcatccggagatgatgaggatgacaccgatggtgcggaagattttgtcagtgagaacagtaacaacaagagagcaccatactggaccaacacagaaaagatggaaaagcggctccatgctgtgcctgcggccaacactgtcaagtttcgctgcccagccggggggaacccaatgccaaccatgcggtggctgaaaaacgggaaggagtttaagcaggagcatcgcattggaggctacaaggtacgaaaccagcactggagcctcattatggaaagtgtggtcccatctgacaagggaaattatacctgtgtagtggagaatgaatacgggtccatcaatcacacgtaccacctggatgttgtggagcgatcgcctcaccggcccatcctccaagccggactgccggcaaatgcctccacagtggtcggaggagacgtagagtttgtctgcaaggtttacagtgatgcccagccccacatccagtggatcaagcacgtggaaaagaacggcagtaaatacgggcccgacgggctgccctacctcaaggttctcaagcactcggggataaatagttccaatgcagaagtgctggctctgttcaatgtgaccgaggcggatgctggggaatatatatgtaaggtctccaattatatagggcaggccaaccagtctgcctggctcactgtcctgccaaaacagcaagcgcctggaagagaaaaggagattacagcttccccagactacctggagatagccatttactgcataggggtcttcttaatcgcctgtatggtggtaacagtcatcctgtgccgaatgaagaacacgaccaagaagccagacttcagcagccagccggctgtgcacaagctgaccaaacgtatccccctgcggagacaggtaacagtttcggctgagtccagctcctccatgaactccaacaccccgctggtgaggataacaacacgcctctcttcaacggcagacacccccatgctggcaggggtctccgagtatgaacttccagaggacccaaaatgggagtttccaagagataagctgacactgggcaagcccctgggagaaggttgctttgggcaagtggtcatggcggaagcagtgggaattgacaaagacaagcccaaggaggcggtcaccgtggccgtgaagatgttgaaagatgatgccacagagaaagacctttctgatctggtgtcagagatggagatgatgaagatgattgggaaacacaagaatatcataaatcttcttggagcctgcacacaggatgggcctctctatgtcatagttgagtatgcctctaaaggcaacctccgagaatacctccgagcccggaggccacccgggatggagtactcctatgacattaaccgtgttcctgaggagcagatgaccttcaaggacttggtgtcatgcacctaccagctggccagaggcatggagtacttggcttcccaaaaatgtattcatcgagatttagcagccagaaatgttttggtaacagaaaacaatgtgatgaaaatagcagactttggactcgccagagatatcaacaatatagactattacaaaaagaccaccaatgggcggcttccagtcaagtggatggctccagaagccctgtttgatagagtatacactcatcagagtgatgtctggtccttcggggtgttaatgtgggagatcttcactttagggggctcgccctacccagggattcccgtggaggaactttttaagctgctgaaggaaggacacagaatggataagccagccaactgcaccaacgaactgtacatgatgatgagggactgttggcatgcagtgccctcccagagaccaacgttcaagcagttggtagaagacttggatcgaattctcactctcacaaccaatgagatctgaaagtttatggcttcattgagaaactgggaaaagttggtcaggcgcagtggctcatgcctgtaatcccagcactttgggaggccgaggcaggcggatcatgaggtcaggagttccagaccagcctggccaacatggtgaaaccctgtctctactaaagatacaaaaaattagccgggcgtgttggtgtgcacctgtaatcccagctactccgggaggctgaggcaggagagtcacttgaaccggggaggcggaggttgcagtgagccgagatcatgccattgcattccagccttggcgacagagcgagactccgtct

SEQ ID NO: 7469 - DNA, 2727 bp, Homo sapiens
  source 1..2727: mol_type = unassigned DNA; mol_type = unassigned DNA
cgcgagcaaagtttggtggaggcaacgccaagcctgagtcctttcttcctctcgttccccaaatccgagggcagcccgcgggcgtcatgcccgcgctcctccgcagcctggggtacgcgtgaagcccgggaggcttggcgccggcgaagacccaaggaccactcttctgcgtttggagttgctccccgcaaccccgggctcgtcgctttctccatcccgacccacgcggggcgcggggacaacacaggtcgcggaggagcgttgccattcaagtgactgcagcagcagcggcagcgcctcggttcctgagcccaccgcaggctgaaggcattgcgcgtagtccatgcccgtagaggaagtgtgcagatgggattaacgtccacatggagatatggaagaggaccggggattggtaccgtaaccatggtcagctggggtcgtttcatctgcctggtcgtggtcaccatggcaaccttgtccctggcccggccctccttcagtttagttgaggataccacattagagccagaagagccaccaaccaaataccaaatctctcaaccagaagtgtacgtggctgcgccaggggagtcgctagaggtgcgctgcctgttgaaagatgccgccgtgatcagttggactaaggatggggtgcacttggggcccaacaataggacagtgcttattggggagtacttgcagataaagggcgccacgcctagagactccggcctctatgcttgtactgccagtaggactgtagacagtgaaacttggtacttcatggtgaatgtcacagatgccatctcatccggagatgatgaggatgacaccgatggtgcggaagattttgtcagtgagaacagtaacaacaagagagcaccatactggaccaacacagaaaagatggaaaagcggctccatgctgtgcctgcggccaacactgtcaagtttcgctgcccagccggggggaacccaatgccaaccatgcggtggctgaaaaacgggaaggagtttaagcaggagcatcgcattggaggctacaaggtacgaaaccagcactggagcctcattatggaaagtgtggtcccatctgacaagggaaattatacctgtgtagtggagaatgaatacgggtccatcaatcacacgtaccacctggatgttgtggagcgatcgcctcaccggcccatcctccaagccggactgccggcaaatgcctccacagtggtcggaggagacgtagagtttgtctgcaaggtttacagtgatgcccagccccacatccagtggatcaagcacgtggaaaagaacggcagtaaatacgggcccgacgggctgccctacctcaaggttctcaagcactcggggataaatagttccaatgcagaagtgctggctctgttcaatgtgaccgaggcggatgctggggaatatatatgtaaggtctccaattatatagggcaggccaaccagtctgcctggctcactgtcctgccaaaacagcaagcgcctggaagagaaaaggagattacagcttccccagactacctggagatagccatttactgcataggggtcttcttaatcgcctgtatggtggtaacagtcatcctgtgccgaatgaagaacacgaccaagaagccagacttcagcagccagccggctgtgcacaagctgaccaaacgtatccccctgcggagacaggtaacagtttcggctgagtccagctcctccatgaactccaacaccccgctggtgaggataacaacacgcctctcttcaacggcagacacccccatgctggcaggggtctccgagtatgaacttccagaggacccaaaatgggagtttccaagagataagctgacactgggcaagcccctgggagaaggttgctttgggcaagtggtcatggcggaagcagtgggaattgacaaagacaagcccaaggaggcggtcaccgtggccgtgaagatgttgaaagatgatgccacagagaaagacctttctgatctggtgtcagagatggagatgatgaagatgattgggaaacacaagaatatcataaatcttcttggagcctgcacacaggatgggcctctctatgtcatagttgagtatgcctctaaaggcaacctccgagaatacctccgagcccggaggccacccgggatggagtactcctatgacattaaccgtgttcctgaggagcagatgaccttcaaggacttggtgtcatgcacctaccagctggccagaggcatggagtacttggcttcccaaaaatgtattcatcgagatttagcagccagaaatgttttggtaacagaaaacaatgtgatgaaaatagcagactttggactcgccagagatatcaacaatatagactattacaaaaagaccaccaatgggcggcttccagtcaagtggatggctccagaagccctgtttgatagagtatacactcatcagagtgatgtctggtccttcggggtgttaatgtgggagatcttcactttagggggctcgccctacccagggattcccgtggaggaactttttaagctgctgaaggaaggacacagaatggataagccagccaactgcaccaacgaactgtacatgatgatgagggactgttggcatgcagtgccctcccagagaccaacgttcaagcagttggtagaagacttggatcgaattctcactctcacaaccaatgag

SEQ ID NO: 7470 - DNA, 2593 bp, Homo sapiens
  source 1..2593: mol_type = unassigned DNA; mol_type = unassigned DNA
cgagggagcgcgcgcggccgccacaaagctcgggcgccgcggggctgcatgcggcgtacctggcccggcgcggcgactgctctccgggctggcgggggccggccgcgagccccgggggccccgaggccgcagcttgcctgcgcgctctgagccttcgcaactcgcgagcaaagtttggtggaggcaacgccaagcctgagtcctttcttcctctcgttccccaaatccgagggcagcccgcgggcgtcatgcccgcgctcctccgcagcctggggtacgcgtgaagcccgggaggcttggcgccggcgaagacccaaggaccactcttctgcgtttggagttgctccccgcaaccccgggctcgtcgctttctccatcccgacccacgcggggcgcggggacaacacaggtcgcggaggagcgttgccattcaagtgactgcagcagcagcggcagcgcctcggttcctgagcccaccgcaggctgaaggcattgcgcgtagtccatgcccgtagaggaagtgtgcagatgggattaacgtccacatggagatatggaagaggaccggggattggtaccgtaaccatggtcagctggggtcgtttcatctgcctggtcgtggtcaccatggcaaccttgtccctggcccggccctccttcagtttagttgaggataccacattagagccagaagatgccatctcatccggagatgatgaggatgacaccgatggtgcggaagattttgtcagtgagaacagtaacaacaagagagcaccatactggaccaacacagaaaagatggaaaagcggctccatgctgtgcctgcggccaacactgtcaagtttcgctgcccagccggggggaacccaatgccaaccatgcggtggctgaaaaacgggaaggagtttaagcaggagcatcgcattggaggctacaaggtacgaaaccagcactggagcctcattatggaaagtgtggtcccatctgacaagggaaattatacctgtgtagtggagaatgaatacgggtccatcaatcacacgtaccacctggatgttgtggagcgatcgcctcaccggcccatcctccaagccggactgccggcaaatgcctccacagtggtcggaggagacgtagagtttgtctgcaaggtttacagtgatgcccagccccacatccagtggatcaagcacgtggaaaagaacggcagtaaatacgggcccgacgggctgccctacctcaaggttctcaaggccgccggtgttaacaccacggacaaagagattgaggttctctatattcggaatgtaacttttgaggacgctggggaatatacgtgcttggcgggtaattctattgggatatcctttcactctgcatggttgacagttctgccagcgcctggaagagaaaaggagattacagcttccccagactacctggagatagccatttactgcataggggtcttcttaatcgcctgtatggtggtaacagtcatcctgtgccgaatgaagaacacgaccaagaagccagacttcagcagccagccggctgtgcacaagctgaccaaacgtatccccctgcggagacaggtttcggctgagtccagctcctccatgaactccaacaccccgctggtgaggataacaacacgcctctcttcaacggcagacacccccatgctggcaggggtctccgagtatgaacttccagaggacccaaaatgggagtttccaagagataagctgacactgggcaagcccctgggagaaggttgctttgggcaagtggtcatggcggaagcagtgggaattgacaaagacaagcccaaggaggcggtcaccgtggccgtgaagatgttgaaagatgatgccacagagaaagacctttctgatctggtgtcagagatggagatgatgaagatgattgggaaacacaagaatatcataaatcttcttggagcctgcacacaggatgggcctctctatgtcatagttgagtatgcctctaaaggcaacctccgagaatacctccgagcccggaggccacccgggatggagtactcctatgacattaaccgtgttcctgaggagcagatgaccttcaaggacttggtgtcatgcacctaccagctggccagaggcatggagtacttggcttcccaaaaatgtattcatcgagatttagcagccagaaatgttttggtaacagaaaacaatgtgatgaaaatagcagactttggactcgccagagatatcaacaatatagactattacaaaaagaccaccaatgggcggcttccagtcaagtggatggctccagaagccctgtttgatagagtatacactcatcagagtgatgtctggtccttcggggtgttaatgtgggagatcttcactttagggggctcgccctacccagggattcccgtggaggaactttttaagctgctgaaggaaggacacagaatggataagccagccaactgcaccaacgaactgtacatgatgatgagggactgttggcatgcagtgccctcccagagaccaacgttcaagcagttggtagaagacttggatcgaattc

SEQ ID NO: 7471 - DNA, 386 bp, Homo sapiens
  source 1..386: mol_type = unassigned DNA; mol_type = unassigned DNA
cactcggggataaatagttccaatgcagaagtgctggctctgttcaatgtgaccgaggcggatgctggggaatatatatgtaaggtctccaattatatagggcaggccaaccagtctgcctggctcactgtcctgccaaaacagcaaggccgccggtgttaacaccacggacaaagagattgaggttctctatattcggaatgtaacttttgaggacgctggggaatatacgtgcttggcgggtaattctattgggatatcctttcactctgcatggttgacagttctgccagcgcctggaagagaaaaggagattacagcttccccagactacctggagatagccatttactgcataggggtcttcttaatcgcctgtatggtgg

SEQ ID NO: 7472 - DNA, 1478 bp, Homo sapiens
  source 1..1478: mol_type = unassigned DNA; mol_type = unassigned DNA
tcttctgcgtttggagttgctccccgcaaccccgggctcgtcgctttctccatcccgacccacgcggggcgcggggacaacacaggtcgcggaggagcgttgccattcaagtgactgcagcagcagcggcagcgcctcggttcctgagcccaccgcaggctgaaggcattgcgcgtagtccatgcccgtagaggaagtgtgcagatgggattaacgtccacatggagatatggaagaggaccggggattggtaccgtaaccatggtcagctggggtcgtttcatctgcctggtcgtggtcaccatggcaaccttgtccctggcccggccctccttcagtttagttgaggataccacattagagccagaagagccaccaaccaaataccaaatctctcaaccagaagtgtacgtggctgcgccaggggagtcgctagaggtgcgctgcctgttgaaagatgccgccgtgatcagttggactaaggatggggtgcacttggggcccaacaataggacagtgcttattggggagtacttgcagataaagggcgccacgcctagagactccggcctctatgcttgtactgccagtaggactgtagacagtgaaacttggtacttcatggtgaatgtcacagatgccatctcatccggagatgatgaggatgacaccgatggtgcggaagattttgtcagtgagaacagtaacaacaagagagcaccatactggaccaacacagaaaagatggaaaagcggctccatgctgtgcctgcggccaacactgtcaagtttcgctgcccagccggggggaacccaatgccaaccatgcggtggctgaaaaacgggaaggagtttaagcaggagcatcgcattggaggctacaaggtacgaaaccagcactggagcctcattatggaaagtgtggtcccatctgacaagggaaattatacctgtgtagtggagaatgaatacgggtccatcaatcacacgtaccacctggatgttgtggagcgatcgcctcaccggcccatcctccaagccggactgccggcaaatgcctccacagtggtcggaggagacgtagagtttgtctgcaaggtttacagtgatgcccagccccacatccagtggatcaagcacgtggaaaagaacggcagtaaatacgggcccgacgggctgccctacctcaaggttctcaagcactcggggataaatagttccaatgcagaagtgctggctctgttcaatgtgaccgaggcggatgctggggaatatatatgtaaggtctccaattatatagggcaggccaaccagtctgcctggctcactgtcctgccaaaacagcaaggccgccggtgttaacaccacggacaaagagattgaggttctctatattcggaatgtaacttttgaggacgctggggaatatacgtgcttggcgggtaattctattgggatatcctttcactctgcatggt

SEQ ID NO: 7473 - DNA, 1680 bp, Homo sapiens
  source 1..1680: mol_type = unassigned DNA; mol_type = unassigned DNA
ccggccgcgagccccgggggccccgaggccgcagcttgcctgcgcgctctgagccttcgcaactcgcgagcaaagtttggtggaggcaacgccaagcctgagtcctttcttcctctcgttccccaaatccgagggcagcccgcgggcgtcatgcccgcgctcctccgcagcctggggtacgcgtgaagcccgggaggcttggcgccggcgaagacccaaggaccactcttctgcgtttggagttgctccccgcaaccccgggctcgtcgctttctccatcccgacccacgcggggcgcggggacaacacaggtcgcggaggagcgttgccattcaagtgactgcagcagcagcggcagcgcctcggttcctgagcccaccgcaggctgaaggcattgcgcgtagtccatgcccgtagaggaagtgtgcagatgggattaacgtccacatggagatatggaagaggaccggggattggtaccgtaaccatggtcagctggggtcgtttcatctgcctggtcgtggtcaccatggcaaccttgtccctggcccggccctccttcagtttagttgaggataccacattagagccagaagagccaccaaccaaataccaaatctctcaaccagaagtgtacgtggctgcgccaggggagtcgctagaggtgcgctgcctgttgaaagatgccgccgtgatcagttggactaaggatggggtgcacttggggcccaacaataggacagtgcttattggggagtacttgcagataaagggcgccacgcctagagactccggcctctatgcttgtactgccagtaggactgtagacagtgaaacttggtacttcatggtgaatgtcacagatgccatctcatccggagatgatgaggatgacaccgatggtgcggaagattttgtcagtgagaacagtaacaacaagagagcaccatactggaccaacacagaaaagatggaaaagcggctccatgctgtgcctgcggccaacactgtcaagtttcgctgcccagccggggggaacccaatgccaaccatgcggtggctgaaaaacgggaaggagtttaagcaggagcatcgcattggaggctacaaggtacgaaaccagcactggagcctcattatggaaagtgtggtcccatctgacaagggaaattatacctgtgtagtggagaatgaatacgggtccatcaatcacacgtaccacctggatgttgtgggcagccagggtttatgagctttgcatgatcctcatggttcccaagcgtcatctgtgtaaagtggacgtggtatgaaatgtctgacattttggaagctgagattactctgaaaatgttaattgggcaggtgaaaagggtacagatgtgctgtagcagacctttggttttaaaagagaagcatcatttccccaacagggcaactgtagaaggccagctgaagagtaaaggaaaaggtctgaggactgagcctgtggctggctggaaaaaggtgaatgttgagggcccttcacttccatcacaagaaagtcattagacggtaccaattcagtgtctgttcctggcatctatttcctctgtgcaaagggaaccatgtatatgagcttataaatacatttttgtcagagtgcacagataagtaggccattttaattaaacattgaagacc

SEQ ID NO: 7474 - DNA, 730 bp, Homo sapiens
  source 1..730: mol_type = unassigned DNA; mol_type = unassigned DNA
gattttctgggggtatcctctggttgctcttccagatacttcctgacttcctggggcttggggagaggtggatgcctgctggggccatttgcagagcaagaacagcttctcctgggaataagcaggcctccactgacctttgttggacgttctctcctctccctccttcccatctgtctccgtcttctctctcccacctttctgcagagccaccaaccaaataccaaatctctcaaccagaagtgtacgtggctgcgccaggggagtcgctagaggtgcgctgcctgttgaaagatgccgccgtgatcagttggactaaggatggggtgcacttggggcccaacaataggacagtgcttattggggagtacttgcagataaagggcgccacgcctagagactccggcctctatgcttgtactgccagtaggactgtagacagtgaaacttggtacttcatggtgaatgtcacagatgccatctcatccggagatgatgaggatgacaccgatggtgcggaagattttgtcagtgagaacagtaacaacaagagtaagtaactgcccggctccgatggtccccgagagaggagcatggagggaagttctgcctgtcacctgtcttcttgtcgactcttctgcgccatgctgtgtcccgcggcccttgcctttccccgctgtgtctactttcctgactttcaaacctgagaataaaccagtgttgctgcaca

SEQ ID NO: 7475 - DNA, 579 bp, Homo sapiens
  source 1..579: mol_type = unassigned DNA; mol_type = unassigned DNA
gtccctggcccggccctccttcagtttagttgaggataccacattagagccagaagagccaccaaccaaataccaaatctctcaaccagaagtgtacgtggctgcgccaggggagtcgctagaggtgcgctgcctgttgaaagatgccgccgtgatcagttggactaaggatggggtgcacttggggcccaacaataggacagtgcttattggggagtacttgcagataaagggcgccacgcctagagactccggcctctatgcttgtactgccagtaggactgtagacagtgaaacttggtacttcatggtgaatgtcacagatgccatctcatccggagatgatgaggatgacaccgatggtgcggaagattttgtcagtgagaacagtaacaacaagagtaagtaactgcccggctccgatggtccccgagagaggagcatggagggaagttctgcctgtcacctgtcttcttgtcgactcttctgcgccatgctgtgtcccgcggcccttgcctttccccgctgtgtctactttcctgactttcaaacctgagaataaaccagtgttgctgcaca

SEQ ID NO: 7476 - DNA, 435 bp, Homo sapiens
  source 1..435: mol_type = unassigned DNA; mol_type = unassigned DNA
aggaagtgtgcagatgggattaacgtccacatggagatatggaagaggaccggggattggtaccgtaaccatggtcagctggggtcgtttcatctgcctggtcgtggtcaccatggcaaccttgtccctggcccggccctccttcagtttagttgaggataccacattagagccagaagatgccatctcatccggagatgatgaggatgacaccgatggtgcggaagattttgtcagtgagaacagtaacaacaagagtaagtaactgcccggctccgatggtccccgagagaggagcatggagggaagttctgcctgtcacctgtcttcttgtcgactcttctgcgccatgctgtgtcccgcggcccttgcctttccccgctgtgtctactttcctgactttcaaacctgagaataaaccagtgttgctgcaca

SEQ ID NO: 7477 - DNA, 587 bp, Homo sapiens
  source 1..587: mol_type = unassigned DNA; mol_type = unassigned DNA
tcaagtgactgcagcagcagcggcagcgcctcggttcctgagcccaccgcaggctgaaggcattgcgcgtagtccatgcccgtagaggaagtgtgcagatgggattaacgtccacatggagatatggaagaggaccggggattggtaccgtaaccatggtcagctggggtcgtttcatctgcctggtcgtggtcaccatggcaaccttgtccctggcccggccctccttcagtttagttgaggataccacattagagccagaagagccaccaaccaaataccaaatctctcaaccagaagtgtacgtggctgcgccaggggagtcgctagagatgccatctcatccggagatgatgaggatgacaccgatggtgcggaagattttgtcagtgagaacagtaacaacaagagtaagtaactgcccggctccgatggtccccgagagaggagcatggagggaagttctgcctgtcacctgtcttcttgtcgactcttctgcgccatgctgtgtcccgcggcccttgcctttccccgctgtgtctactttcctgactttcaaacctgagaataaaccagtgttgctgcac

SEQ ID NO: 7478 - DNA, 574 bp, Homo sapiens
  source 1..574: mol_type = unassigned DNA; mol_type = unassigned DNA
atttctgtggaccggtctggtggtatcacctgggactctgagtgactgcagcagcagcggcagcgcctcggttcctgagcccaccgcaggctgaaggcattgcgcgtagtccatgcccgtagaggaagtgtgcagatgggattaacgtccacatggagatatggaagaggaccggggattggtaccgtaaccatggtcagctggggtcgtttcatctgcctggtcgtggtcaccatggcaaccttgtccctggcccggccctccttcagtttagttgaggataccacattagagccagaagaatggcttctggtggcatgtgacttattggaaagaggctaaccctgactgctgccaaggagaccaatgggagactgggtcccagttggtggtccaggctgcgccacaccgtaggagtccataacaagaagggctggcctctgttgcccgttgatgcatgagccatctcagcagagcaggccgtccccagttattccttgtcccagatgcctctgctggtttgtcctagtgcctgctaaccctcagctgttgccacttggatattatgtcaagc

SEQ ID NO: 7479 - DNA, 3690 bp, Homo sapiens
  source 1..3690: mol_type = unassigned DNA; mol_type = unassigned DNA
aatttgttgaggaatttccccctagccttgaccccttgacagctcccgctcctactcagtgctggggagaagtagggaggccttaagcgaagagatgggtctgcactttggaggagccggacactgttgactttcctgatgtgaaatctacccaggaacaaaacaccagtgactgcagcagcagcggcagcgcctcggttcctgagcccaccgcaggctgaaggcattgcgcgtagtccatgcccgtagaggaagtgtgcagatgggattaacgtccacatggagatatggaagaggaccggggattggtaccgtaaccatggtcagctggggtcgtttcatctgcctggtcgtggtcaccatggcaaccttgtccctggcccggccctccttcagtttagttgaggataccacattagagccagaagatgccatctcatccggagatgatgaggatgacaccgatggtgcggaagattttgtcagtgagaacagtaacaacaagagagcaccatactggaccaacacagaaaagatggaaaagcggctccatgctgtgcctgcggccaacactgtcaagtttcgctgcccagccggggggaacccaatgccaaccatgcggtggctgaaaaacgggaaggagtttaagcaggagcatcgcattggaggctacaaggtacgaaaccagcactggagcctcattatggaaagtgtggtcccatctgacaagggaaattatacctgtgtagtggagaatgaatacgggtccatcaatcacacgtaccacctggatgttgtggagcgatcgcctcaccggcccatcctccaagccggactgccggcaaatgcctccacagtggtcggaggagacgtagagtttgtctgcaaggtttacagtgatgcccagccccacatccagtggatcaagcacgtggaaaagaacggcagtaaatacgggcccgacgggctgccctacctcaaggttctcaaggccgccggtgttaacaccacggacaaagagattgaggttctctatattcggaatgtaacttttgaggacgctggggaatatacgtgcttggcgggtaattctattgggatatcctttcactctgcatggttgacagttctgccagcgcctggaagagaaaaggagattacagcttccccagactacctggagatagccatttactgcataggggtcttcttaatcgcctgtatggtggtaacagtcatcctgtgccgaatgaagaacacgaccaagaagccagacttcagcagccagccggctgtgcacaagctgaccaaacgtatccccctgcggagacaggtaacagtttcggctgagtccagctcctccatgaactccaacaccccgctggtgaggataacaacacgcctctcttcaacggcagacacccccatgctggcaggggtctccgagtatgaacttccagaggacccaaaatgggagtttccaagagataagctgacactgggcaagcccctgggagaaggttgctttgggcaagtggtcatggcggaagcagtgggaattgacaaagacaagcccaaggaggcggtcaccgtggccgtgaagatgttgaaagatgatgccacagagaaagacctttctgatctggtgtcagagatggagatgatgaagatgattgggaaacacaagaatatcataaatcttcttggagcctgcacacaggatgggcctctctatgtcatagttgagtatgcctctaaaggcaacctccgagaatacctccgagcccggaggccacccgggatggagtactcctatgacattaaccgtgttcctgaggagcagatgaccttcaaggacttggtgtcatgcacctaccagctggccagaggcatggagtacttggcttcccaaaaatgtattcatcgagatttagcagccagaaatgttttggtaacagaaaacaatgtgatgaaaatagcagactttggactcgccagagatatcaacaatatagactattacaaaaagaccaccaatgggcggcttccagtcaagtggatggctccagaagccctgtttgatagagtatacactcatcagagtgatgtctggtccttcggggtgttaatgtgggagatcttcactttagggggctcgccctacccagggattcccgtggaggaactttttaagctgctgaaggaaggacacagaatggataagccagccaactgcaccaacgaactgtacatgatgatgagggactgttggcatgcagtgccctcccagagaccaacgttcaagcagttggtagaagacttggatcgaattctcactctcacaaccaatgaggaggagaagaaggtttctggagcagtggactgccacaagccaccatgtaacccctctcacctgccgtgcgtactggctgtggaccagtaggactcaaggtggacgtgcgttctgccttccttgttaattttgtaataattggagaagatttatgtcagcacacacttacagagcacaaatgcagtatataggtgctggatgtatgtaaatatattcaaattatgtataaatatatattatatatttacaaggagttattttttgtattgattttaaatggatgtcccaatgcacctagaaaattggtctctctttttttaatagctatttgctaaatgctgttcttacacataatttcttaattttcaccgagcagaggtggaaaaatacttttgctttcagggaaaatggtataacgttaatttattaataaattggtaatatacaaaacaattaatcatttatagttttttttgtaatttaagtggcatttctatgcaggcagcacagcagactagttaatctattgcttggacttaactagttatcagatcctttgaaaagagaatatttacaatatatgactaatttggggaaaatgaagttttgatttatttgtgtttaaatgctgctgtcagacgattgttcttagacctcctaaatgccccatattaaaagaactcattcataggaaggtgtttcattttggtgtgcaaccctgtcattacgtcaacgcaacgtctaactggacttcccaagataaatggtaccagcgtcctcttaaaagatgccttaatccattccttgaggacagaccttagttgaaatgatagcagaatgtgcttctctctggcagctggccttctgcttctgagttgcacattaatcagattagcctgtattctcttcagtgaattttgataatggcttccagactctttggcgttggagacgcctgttaggatcttcaagtcccatcatagaaaattgaaacacagagttgttctgctgatagttttggggatacgtccatctttttaagggattgctttcatctaattctggcaggacctcaccaaaagatccagcctcatacctacatcagacaaaatatcgccgttgttccttctgtactaaagtattgtgttttgctttggaaacacccactcactttgcaatagccgtgcaagatgaatgcagattacactgatcttatgtgttacaaaattggagaaagtatttaataaaacctgttaatttttatactgacaataaaaatgtttctacagatattaatgttaacaagacaaaataaatgtcacgcaacttattttttt

SEQ ID NO: 7480 - DNA, 4369 bp, Homo sapiens
  source 1..4369: mol_type = unassigned DNA; mol_type = unassigned DNA
ggcggcggctggaggagagcgcggtggagagccgagcgggcgggcggcgggtgcggagcgggcgagggagcgcgcgcggccgccacaaagctcgggcgccgcggggctgcatgcggcgtacctggcccggcgcggcgactgctctccgggctggcgggggccggccgcgagccccgggggccccgaggccgcagcttgcctgcgcgctctgagccttcgcaactcgcgagcaaagtttggtggaggcaacgccaagcctgagtcctttcttcctctcgttccccaaatccgagggcagcccgcgggcgtcatgcccgcgctcctccgcagcctggggtacgcgtgaagcccgggaggcttggcgccggcgaagacccaaggaccactcttctgcgtttggagttgctccccgcaaccccgggctcgtcgctttctccatcccgacccacgcggggcgcggggacaacacaggtcgcggaggagcgttgccattcaagtgactgcagcagcagcggcagcgcctcggttcctgagcccaccgcaggctgaaggcattgcgcgtagtccatgcccgtagaggaagtgtgcagatgggattaacgtccacatggagatatggaagaggaccggggattggtaccgtaaccatggtcagctggggtcgtttcatctgcctggtcgtggtcaccatggcaaccttgtccctggcccggccctccttcagtttagttgaggataccacattagagccagaagatgccatctcatccggagatgatgaggatgacaccgatggtgcggaagattttgtcagtgagaacagtaacaacaagagagcaccatactggaccaacacagaaaagatggaaaagcggctccatgctgtgcctgcggccaacactgtcaagtttcgctgcccagccggggggaacccaatgccaaccatgcggtggctgaaaaacgggaaggagtttaagcaggagcatcgcattggaggctacaaggtacgaaaccagcactggagcctcattatggaaagtgtggtcccatctgacaagggaaattatacctgtgtagtggagaatgaatacgggtccatcaatcacacgtaccacctggatgttgtggagcgatcgcctcaccggcccatcctccaagccggactgccggcaaatgcctccacagtggtcggaggagacgtagagtttgtctgcaaggtttacagtgatgcccagccccacatccagtggatcaagcacgtggaaaagaacggcagtaaatacgggcccgacgggctgccctacctcaaggttctcaaggccgccggtgttaacaccacggacaaagagattgaggttctctatattcggaatgtaacttttgaggacgctggggaatatacgtgcttggcgggtaattctattgggatatcctttcactctgcatggttgacagttctgccagcgcctggaagagaaaaggagattacagcttccccagactacctggagatagccatttactgcataggggtcttcttaatcgcctgtatggtggtaacagtcatcctgtgccgaatgaagaacacgaccaagaagccagacttcagcagccagccggctgtgcacaagctgaccaaacgtatccccctgcggagacaggtaacagtttcggctgagtccagctcctccatgaactccaacaccccgctggtgaggataacaacacgcctctcttcaacggcagacacccccatgctggcaggggtctccgagtatgaacttccagaggacccaaaatgggagtttccaagagataagctgacactgggcaagcccctgggagaaggttgctttgggcaagtggtcatggcggaagcagtgggaattgacaaagacaagcccaaggaggcggtcaccgtggccgtgaagatgttgaaagatgatgccacagagaaagacctttctgatctggtgtcagagatggagatgatgaagatgattgggaaacacaagaatatcataaatcttcttggagcctgcacacaggatgggcctctctatgtcatagttgagtatgcctctaaaggcaacctccgagaatacctccgagcccggaggccacccgggatggagtactcctatgacattaaccgtgttcctgaggagcagatgaccttcaaggacttggtgtcatgcacctaccagctggccagaggcatggagtacttggcttcccaaaaatgtattcatcgagatttagcagccagaaatgttttggtaacagaaaacaatgtgatgaaaatagcagactttggactcgccagagatatcaacaatatagactattacaaaaagaccaccaatgggcggcttccagtcaagtggatggctccagaagccctgtttgatagagtatacactcatcagagtgatgtctggtccttcggggtgttaatgtgggagatcttcactttagggggctcgccctacccagggattcccgtggaggaactttttaagctgctgaaggaaggacacagaatggataagccagccaactgcaccaacgaactgtacatgatgatgagggactgttggcatgcagtgccctcccagagaccaacgttcaagcagttggtagaagacttggatcgaattctcactctcacaaccaatgaggaatacttggacctcagccaacctctcgaacagtattcacctagttaccctgacacaagaagttcttgttcttcaggagatgattctgttttttctccagaccccatgccttacgaaccatgccttcctcagtatccacacataaacggcagtgttaaaacatgaatgactgtgtctgcctgtccccaaacaggacagcactgggaacctagctacactgagcagggagaccatgcctcccagagcttgttgtctccacttgtatatatggatcagaggagtaaataattggaaaagtaatcagcatatgtgtaaagatttatacagttgaaaacttgtaatcttccccaggaggagaagaaggtttctggagcagtggactgccacaagccaccatgtaacccctctcacctgccgtgcgtactggctgtggaccagtaggactcaaggtggacgtgcgttctgccttccttgttaattttgtaataattggagaagatttatgtcagcacacacttacagagcacaaatgcagtatataggtgctggatgtatgtaaatatattcaaattatgtataaatatatattatatatttacaaggagttattttttgtattgattttaaatggatgtcccaatgcacctagaaaattggtctctctttttttaatagctatttgctaaatgctgttcttacacataatttcttaattttcaccgagcagaggtggaaaaatacttttgctttcagggaaaatggtataacgttaatttattaataaattggtaatatacaaaacaattaatcatttatagttttttttgtaatttaagtggcatttctatgcaggcagcacagcagactagttaatctattgcttggacttaactagttatcagatcctttgaaaagagaatatttacaatatatgactaatttggggaaaatgaagttttgatttatttgtgtttaaatgctgctgtcagacgattgttcttagacctcctaaatgccccatattaaaagaactcattcataggaaggtgtttcattttggtgtgcaaccctgtcattacgtcaacgcaacgtctaactggacttcccaagataaatggtaccagcgtcctcttaaaagatgccttaatccattccttgaggacagaccttagttgaaatgatagcagaatgtgcttctctctggcagctggccttctgcttctgagttgcacattaatcagattagcctgtattctcttcagtgaattttgataatggcttccagactctttggcgttggagacgcctgttaggatcttcaagtcccatcatagaaaattgaaacacagagttgttctgctgatagttttggggatacgtccatctttttaagggattgctttcatctaattctggcaggacctcaccaaaagatccagcctcatacctacatcagacaaaatatcgccgttgttccttctgtactaaagtattgtgttttgctttggaaacacccactcactttgcaatagccgtgcaagatgaatgcagattacactgatcttatgtgttacaaaattggagaaagtatttaataaaacctgttaatttttatactgacaataaaaatgtttctacagatattaatgttaacaagacaaaataaatgtcacgcaacttattttttt

SEQ ID NO: 7481 - DNA, 3803 bp, Homo sapiens
  source 1..3803: mol_type = unassigned DNA; mol_type = unassigned DNA
tgactgcagcagcagcggcagcgcctcggttcctgagcccaccgcaggctgaaggcattgcgcgtagtccatgcccgtagaggaagtgtgcagatgggattaacgtccacatggagatatggaagaggaccggggattggtaccgtaaccatggtcagctggggtcgtttcatctgcctggtcgtggtcaccatggcaaccttgtccctggcccggccctccttcagtttagttgaggataccacattagagccagaagagccaccaaccaaataccaaatctctcaaccagaagtgtacgtggctgcgccaggggagtcgctagaggtgcgctgcctgttgaaagatgccgccgtgatcagttggactaaggatggggtgcacttggggcccaacaataggacagtgcttattggggagtacttgcagataaagggcgccacgcctagagactccggcctctatgcttgtactgccagtaggactgtagacagtgaaacttggtacttcatggtgaatgtcacagatgccatctcatccggagatgatgaggatgacaccgatggtgcggaagattttgtcagtgagaacagtaacaacaagagagcaccatactggaccaacacagaaaagatggaaaagcggctccatgctgtgcctgcggccaacactgtcaagtttcgctgcccagccggggggaacccaatgccaaccatgcggtggctgaaaaacgggaaggagtttaagcaggagcatcgcattggaggctacaaggtacgaaaccagcactggagcctcattatggaaagtgtggtcccatctgacaagggaaattatacctgtgtagtggagaatgaatacgggtccatcaatcacacgtaccacctggatgttgtggcgcctggaagagaaaaggagattacagcttccccagactacctggagatagccatttactgcataggggtcttcttaatcgcctgtatggtggtaacagtcatcctgtgccgaatgaagaacacgaccaagaagccagacttcagcagccagccggctgtgcacaagctgaccaaacgtatccccctgcggagacaggtaacagtttcggctgagtccagctcctccatgaactccaacaccccgctggtgaggataacaacacgcctctcttcaacggcagacacccccatgctggcaggggtctccgagtatgaacttccagaggacccaaaatgggagtttccaagagataagctgacactgggcaagcccctgggagaaggttgctttgggcaagtggtcatggcggaagcagtgggaattgacaaagacaagcccaaggaggcggtcaccgtggccgtgaagatgttgaaagatgatgccacagagaaagacctttctgatctggtgtcagagatggagatgatgaagatgattgggaaacacaagaatatcataaatcttcttggagcctgcacacaggatgggcctctctatgtcatagttgagtatgcctctaaaggcaacctccgagaatacctccgagcccggaggccacccgggatggagtactcctatgacattaaccgtgttcctgaggagcagatgaccttcaaggacttggtgtcatgcacctaccagctggccagaggcatggagtacttggcttcccaaaaatgtattcatcgagatttagcagccagaaatgttttggtaacagaaaacaatgtgatgaaaatagcagactttggactcgccagagatatcaacaatatagactattacaaaaagaccaccaatgggcggcttccagtcaagtggatggctccagaagccctgtttgatagagtatacactcatcagagtgatgtctggtccttcggggtgttaatgtgggagatcttcactttagggggctcgccctacccagggattcccgtggaggaactttttaagctgctgaaggaaggacacagaatggataagccagccaactgcaccaacgaactgtacatgatgatgagggactgttggcatgcagtgccctcccagagaccaacgttcaagcagttggtagaagacttggatcgaattctcactctcacaaccaatgaggaatacttggacctcagccaacctctcgaacagtattcacctagttaccctgacacaagaagttcttgttcttcaggagatgattctgttttttctccagaccccatgccttacgaaccatgccttcctcagtatccacacataaacggcagtgttaaaacatgaatgactgtgtctgcctgtccccaaacaggacagcactgggaacctagctacactgagcagggagaccatgcctcccagagcttgttgtctccacttgtatatatggatcagaggagtaaataattggaaaagtaatcagcatatgtgtaaagatttatacagttgaaaacttgtaatcttccccaggaggagaagaaggtttctggagcagtggactgccacaagccaccatgtaacccctctcacctgccgtgcgtactggctgtggaccagtaggactcaaggtggacgtgcgttctgccttccttgttaattttgtaataattggagaagatttatgtcagcacacacttacagagcacaaatgcagtatataggtgctggatgtatgtaaatatattcaaattatgtataaatatatattatatatttacaaggagttattttttgtattgattttaaatggatgtcccaatgcacctagaaaattggtctctctttttttaatagctatttgctaaatgctgttcttacacataatttcttaattttcaccgagcagaggtggaaaaatacttttgctttcagggaaaatggtataacgttaatttattaataaattggtaatatacaaaacaattaatcatttatagttttttttgtaatttaagtggcatttctatgcaggcagcacagcagactagttaatctattgcttggacttaactagttatcagatcctttgaaaagagaatatttacaatatatgactaatttggggaaaatgaagttttgatttatttgtgtttaaatgctgctgtcagacgattgttcttagacctcctaaatgccccatattaaaagaactcattcataggaaggtgtttcattttggtgtgcaaccctgtcattacgtcaacgcaacgtctaactggacttcccaagataaatggtaccagcgtcctcttaaaagatgccttaatccattccttgaggacagaccttagttgaaatgatagcagaatgtgcttctctctggcagctggccttctgcttctgagttgcacattaatcagattagcctgtattctcttcagtgaattttgataatggcttccagactctttggcgttggagacgcctgttaggatcttcaagtcccatcatagaaaattgaaacacagagttgttctgctgatagttttggggatacgtccatctttttaagggattgctttcatctaattctggcaggacctcaccaaaagatccagcctcatacctacatcagacaaaatatcgccgttgttccttctgtactaaagtattgtgttttgctttggaaacacccactcactttgcaatagccgtgcaagatgaatgcagattacactgatcttatgtgttacaaaattggagaaagtatttaataaaacctgttaatttttatactgacaataaaaatgtttctacagatattaatgttaacaagacaaaataaatgtcacgcaacttattttttt

SEQ ID NO: 7482 - DNA, 2478 bp, Homo sapiens
  source 1..2478: mol_type = unassigned DNA; mol_type = unassigned DNA
ggtaccgtaaccatggtcagctggggtcgtttcatctgcctggtcgtggtcaccatggcaaccttgtccctggcccggccctccttcagtttagttgaggataccacattagagccagaagagccaccaaccaaataccaaatctctcaaccagaagtgtacgtggctgcgccaggggagtcgctagaggtgcgctgcctgttgaaagatgccgccgtgatcagttggactaaggatggggtgcacttggggcccaacaataggacagtgcttattggggagtacttgcagataaagggcgccacgcctagagactccggcctctatgcttgtactgccagtaggactgtagacagtgaaacttggtacttcatggtgaatgtcacagatgccatctcatccggagatgatgaggatgacaccgatggtgcggaagattttgtcagtgagaacagtaacaacaagagagcaccatactggaccaacacagaaaagatggaaaagcggctccatgctgtgcctgcggccaacactgtcaagtttcgctgcccagccggggggaacccaatgccaaccatgcggtggctgaaaaacgggaaggagtttaagcaggagcatcgcattggaggctacaaggtacgaaaccagcactggagcctcattatggaaagtgtggtcccatctgacaagggaaattatacctgtgtagtggagaatgaatacgggtccatcaatcacacgtaccacctggatgttgtggagcgatcgcctcaccggcccatcctccaagccggactgccggcaaatgcctccacagtggtcggaggagacgtagagtttgtctgcaaggtttacagtgatgcccagccccacatccagtggatcaagcacgtggaaaagaacggcagtaaatacgggcccgacgggctgccctacctcaaggttctcaaggttttcgccgccggtgttaacaccacggacaaagagattgaggttctctatattcggaatgtaacttttgaggacgctggggaatatacgtgcttggcgggtaattctattgggatatcctttcactctgcatggttgacagttctgccagcgcctggaagagaaaaggagattacagcttccccagactacctggagatagccatttactgcataggggtcttcttaatcgcctgtatggtggtaacagtcatcctgtgccgaatgaagaacacgaccaagaagccagacttcagcagccagccggctgtgcacaagctgaccaaacgtatccccctgcggagacaggtttcggctgagtccagctcctccatgaactccaacaccccgctggtgaggataacaacacgcctctcttcaacggcagacacccccatgctggcaggggtctccgagtatgaacttccagaggacccaaaatgggagtttccaagagataagctgacactgggcaagcccctgggagaaggttgctttgggcaagtggtcatggcggaagcagtgggaattgacaaagacaagcccaaggaggcggtcaccgtggccgtgaagatgttgaaagatgatgccacagagaaagacctttctgatctggtgtcagagatggagatgatgaagatgattgggaaacacaagaatatcataaatcttcttggagcctgcacacaggatgggcctctctatgtcatagttgagtatgcctctaaaggcaacctccgagaatacctccgagcccggaggccacccgggatggagtactcctatgacattaaccgtgttcctgaggagcagatgaccttcaaggacttggtgtcatgcacctaccagctggccagaggcatggagtacttggcttcccaaaaatgtattcatcgagatttagcagccagaaatgttttggtaacagaaaacaatgtgatgaaaatagcagactttggactcgccagagatatcaacaatatagactattacaaaaagaccaccaatgggcggcttccagtcaagtggatggctccagaagccctgtttgatagagtatacactcatcagagtgatgtctggtccttcggggtgttaatgtgggagatcttcactttagggggctcgccctacccagggattcccgtggaggaactttttaagctgctgaaggaaggacacagaatggataagccagccaactgcaccaacgaactgtacatgatgatgagggactgttggcatgcagtgccctcccagagaccaacgttcaagcagttggtagaagacttggatcgaattctcactctcacaaccaatgaggaatacttggacctcagccaacctctcgaacagtattcacctagttaccctgacacaagaagttcttgttcttcaggagatgattctgttttttctccagaccccatgccttacgaaccatgccttcctcagtatccacacataaacggcagtgttaaaacatga

SEQ ID NO: 7483 - DNA, 4217 bp, Homo sapiens
  source 1..4217: mol_type = unassigned DNA; mol_type = unassigned DNA
gcggcgtcgcgggcagctggcgccgcgcggtcctgctctgccggtcgcacggacgcaccggcgggccgccggccggagggacggggcgggagctgggcccgcggacagcgagccggagcgggagccgcgcgtagcgagccgggctccggcgctcgccagtctcccgagcggcgcccgcctcccgccggtgcccgcgccgggccgtggggggcagcatgcccgcgcgcgctgcctgaggacgccgcggcccccgcccccgccatgggcgcccctgcctgcgccctcgcgctctgcgtggccgtggccatcgtggccggcgcctcctcggagtccttggggacggagcagcgcgtcgtggggcgagcggcagaagtcccgggcccagagcccggccagcaggagcagttggtcttcggcagcggggatgctgtggagctgagctgtcccccgcccgggggtggtcccatggggcccactgtctgggtcaaggatggcacagggctggtgccctcggagcgtgtcctggtggggccccagcggctgcaggtgctgaatgcctcccacgaggactccggggcctacagctgccggcagcggctcacgcagcgcgtactgtgccacttcagtgtgcgggtgacagacgctccatcctcgggagatgacgaagacggggaggacgaggctgaggacacaggtgtggacacaggggccccttactggacacggcccgagcggatggacaagaagctgctggccgtgccggccgccaacaccgtccgcttccgctgcccagccgctggcaaccccactccctccatctcctggctgaagaacggcagggagttccgcggcgagcaccgcattggaggcatcaagctgcggcatcagcagtggagcctggtcatggaaagcgtggtgccctcggaccgcggcaactacacctgcgtcgtggagaacaagtttggcagcatccggcagacgtacacgctggacgtgctggagcgctccccgcaccggcccatcctgcaggcggggctgccggccaaccagacggcggtgctgggcagcgacgtggagttccactgcaaggtgtacagtgacgcacagccccacatccagtggctcaagcacgtggaggtgaatggcagcaaggtgggcccggacggcacaccctacgttaccgtgctcaagacggcgggcgctaacaccaccgacaaggagctagaggttctctccttgcacaacgtcacctttgaggacgccggggagtacacctgcctggcgggcaattctattgggttttctcatcactctgcgtggctggtggtgctgccagccgaggaggagctggtggaggctgacgaggcgggcagtgtgtatgcaggcatcctcagctacggggtgggcttcttcctgttcatcctggtggtggcggctgtgacgctctgccgcctgcgcagcccccccaagaaaggcctgggctcccccaccgtgcacaagatctcccgcttcccgctcaagcgacagcaggtgtccctggagtccaacgcgtccatgagctccaacacaccactggtgcgcatcgcaaggctgtcctcaggggagggccccacgctggccaatgtctccgagctcgagctgcctgccgaccccaaatgggagctgtctcgggcccggctgaccctgggcaagccccttggggagggctgcttcggccaggtggtcatggcggaggccatcggcattgacaaggaccgggccgccaagcctgtcaccgtagccgtgaagatgctgaaagacgatgccactgacaaggacctgtcggacctggtgtctgagatggagatgatgaagatgatcgggaaacacaaaaacatcatcaacctgctgggcgcctgcacgcagggcgggcccctgtacgtgctggtggagtacgcggccaagggtaacctgcgggagtttctgcgggcgcggcggcccccgggcctggactactccttcgacacctgcaagccgcccgaggagcagctcaccttcaaggacctggtgtcctgtgcctaccaggtggcccggggcatggagtacttggcctcccagaagtgcatccacagggacctggctgcccgcaatgtgctggtgaccgaggacaacgtgatgaagatcgcagacttcgggctggcccgggacgtgcacaacctcgactactacaagaagacgaccaacctggtcctttggggtcctgctctgggagatcttcacgctggggggctccccgtaccccggcatccctgtggaggagctcttcaagctgctgaaggagggccaccgcatggacaagcccgccaactgcacacacgacctgtacatgatcatgcgggagtgctggcatgccgcgccctcccagaggcccaccttcaagcagctggtggaggacctggaccgtgtccttaccgtgacgtccaccgacgagtacctggacctgtcggcgcctttcgagcagtactccccgggtggccaggacacccccagctccagctcctcaggggacgactccgtgtttgcccacgacctgctgcccccggccccacccagcagtgggggctcgcggacgtgaagggccactggtccccaacaatgtgaggggtccctagcagcccaccctgctgctggtgcacagccactccccggcatgagactcagtgcagatggagagacagctacacagagctttggtctgtgtgtgtgtgtgtgcgtgtgtgtgtgtgtgtgtgcacatccgcgtgtgcctgtgtgcgtgcgcatcttgcctccaggtgcagaggtaccctgggtgtccccgctgctgtgcaacggtctcctgactggtgctgcagcaccgaggggcctttgttctggggggacccagtgcagaatgtaagtgggcccacccggtgggacccccgtggggcagggagctgggcccgacatggctccggcctctgcctttgcaccacgggacatcacagggtgggcctcggcccctcccacacccaaagctgagcctgcagggaagccccacatgtccagcaccttgtgcctggggtgttagtggcaccgcctccccacctccaggctttcccacttcccaccctgcccctcagagactgaaattacgggtacctgaagatgggagcctttaccttttatgcaaaaggtttattccggaaactagtgtacatttctataaatagatgctgtgtatatggtatatatacatatatatatataacatatatggaagaggaaaaggctggtacaacggaggcctgcgaccctgggggcacaggaggcaggcatggccctgggcggggcgtgggggggcgtggagggaggccccagggggtctcacccatgcaagcagaggaccagggccttttctggcaccgcagttttgttttaaaactggacctgtatatttgtaaagctatttatgggcccctggcactcttgttcccacaccccaacacttccagcatttagctggccacatggcggagagttttaatttttaacttattgacaaccgagaaggtttatcccgccgatagagggacggccaagaatgtacgtccagcctgccccggagctggaggatcccctccaagcctaaaaggttgttaatagttggaggtgattccagtgaagatattttatttcctttgtcctttttcaggagaattagatttctataggatttttctttaggagatttattttttggacttcaaagcaagctggtattttcatacaaattcttctaattgctgtgtgtcccaggcagggagacggtttccagggaggggccggccctgtgtgcaggttccgatgttattagatgttacaagtttatatatatctatatatataatttattgagtttttacaagatgtatttgttgtagacttaacacttcttacgcaatgcttctagagttttatagcctggactgctacctttcaaagcttggagggaagccgtgaattcagttggttcgttctgtactgttactgggccctgagtctgggcagctgtcccttgcttgcctgcagggccatggctcagggtggtctcttcttggggcccagtgcatggtggccagaggtgtcacccaaaccggcaggtgcgattttgttaacccagcgacgaactttccgaaaaataaagacacctggttgct

SEQ ID NO: 7484 - DNA, 4132 bp, Homo sapiens
  source 1..4132: mol_type = unassigned DNA; mol_type = unassigned DNA
tctcccgagcggcgcccgcctcccgccggtgcccgcgccgggccgtggggggcagcatgcccgcgcgcgctgcctgaggacgccgcggcccccgcccccgccatgggcgcccctgcctgcgccctcgcgctctgcgtggccgtggccatcgtggccggcgcctcctcggagtccttggggacggagcagcgcgtcgtggggcgagcggcagaagtcccgggcccagagcccggccagcaggagcagttggtcttcggcagcggggatgctgtggagctgagctgtcccccgcccgggggtggtcccatggggcccactgtctgggtcaaggatggcacagggctggtgccctcggagcgtgtcctggtggggccccagcggctgcaggtgctgaatgcctcccacgaggactccggggcctacagctgccggcagcggctcacgcagcgcgtactgtgccacttcagtgtgcgggtgacagacgctccatcctcgggagatgacgaagacggggaggacgaggctgaggacacaggtgtggacacaggggccccttactggacacggcccgagcggatggacaagaagctgctggccgtgccggccgccaacaccgtccgcttccgctgcccagccgctggcaaccccactccctccatctcctggctgaagaacggcagggagttccgcggcgagcaccgcattggaggcatcaagctgcggcatcagcagtggagcctggtcatggaaagcgtggtgccctcggaccgcggcaactacacctgcgtcgtggagaacaagtttggcagcatccggcagacgtacacgctggacgtgctggagcgctccccgcaccggcccatcctgcaggcggggctgccggccaaccagacggcggtgctgggcagcgacgtggagttccactgcaaggtgtacagtgacgcacagccccacatccagtggctcaagcacgtggaggtgaatggcagcaaggtgggcccggacggcacaccctacgttaccgtgctcaagacggcgggcgctaacaccaccgacaaggagctagaggttctctccttgcacaacgtcacctttgaggacgccggggagtacacctgcctggcgggcaattctattgggttttctcatcactctgcgtggctggtggtgctgccagccgaggaggagctggtggaggctgacgaggcgggcagtgtgtatgcaggcatcctcagctacggggtgggcttcttcctgttcatcctggtggtggcggctgtgacgctctgccgcctgcgcagcccccccaagaaaggcctgggctcccccaccgtgcacaagatctcccgcttcccgctcaagcgacaggtgtccctggagtccaacgcgtccatgagctccaacacaccactggtgcgcatcgcaaggctgtcctcaggggagggccccacgctggccaatgtctccgagctcgagctgcctgccgaccccaaatgggagctgtctcgggcccggctgaccctgggcaagccccttggggagggctgcttcggccaggtggtcatggcggaggccatcggcattgacaaggaccgggccgccaagcctgtcaccgtagccgtgaagatgctgaaagacgatgccactgacaaggacctgtcggacctggtgtctgagatggagatgatgaagatgatcgggaaacacaaaaacatcatcaacctgctgggcgcctgcacgcagggcgggcccctgtacgtgctggtggagtacgcggccaagggtaacctgcgggagtttctgcgggcgcggcggcccccgggcctggactactccttcgacacctgcaagccgcccgaggagcagctcaccttcaaggacctggtgtcctgtgcctaccaggtggcccggggcatggagtacttggcctcccagaagtgcatccacagggacctggctgcccgcaatgtgctggtgaccgaggacaacgtgatgaagatcgcagacttcgggctggcccgggacgtgcacaacctcgactactacaagaagacgaccaacggccggctgcccgtgaagtggatggcgcctgaggccttgtttgaccgagtctacactcaccagagtgacgtctggtcctttggggtcctgctctgggagatcttcacgctggggggctccccgtaccccggcatccctgtggaggagctcttcaagctgctgaaggagggccaccgcatggacaagcccgccaactgcacacacgacctgtacatgatcatgcgggagtgctggcatgccgcgccctcccagaggcccaccttcaagcagctggtggaggacctggaccgtgtccttaccgtgacgtccaccgacgagtacctggacctgtcggcgcctttcgagcagtactccccgggtggccaggacacccccagctccagctcctcaggggacgactccgtgtttgcccacgacctgctgcccccggccccacccagcagtgggggctcgcggacgtgaagggccactggtccccaacaatgtgaggggtccctagcagcccaccctgctgctggtgcacagccactccccggcatgagactcagtgcagatggagagacagctacacagagctttggtctgtgtgtgtgtgtgtgcgtgtgtgtgtgtgtgtgtgcacatccgcgtgtgcctgtgtgcgtgcgcatcttgcctccaggtgcagaggtaccctgggtgtccccgctgctgtgcaacggtctcctgactggtgctgcagcaccgaggggcctttgttctggggggacccagtgcagaatgtaagtgggcccacccggtgggacccccgtggggcagggagctgggcccgacatggctccggcctctgcctttgcaccacgggacatcacagggtgggcctcggcccctcccacacccaaagctgagcctgcagggaagccccacatgtccagcaccttgtgcctggggtgttagtggcaccgcctccccacctccaggctttcccacttcccaccctgcccctcagagactgaaattacgggtacctgaagatgggagcctttaccttttatgcaaaaggtttattccggaaactagtgtacatttctataaatagatgctgtgtatatggtatatatacatatatatatataacatatatggaagaggaaaaggctggtacaacggaggcctgcgaccctgggggcacaggaggcaggcatggccctgggcggggcgtgggggggcgtggagggaggccccagggggtctcacccatgcaagcagaggaccagggccttttctggcaccgcagttttgttttaaaactggacctgtatatttgtaaagctatttatgggcccctggcactcttgttcccacaccccaacacttccagcatttagctggccacatggcggagagttttaatttttaacttattgacaaccgagaaggtttatcccgccgatagagggacggccaagaatgtacgtccagcctgccccggagctggaggatcccctccaagcctaaaaggttgttaatagttggaggtgattccagtgaagatattttatttcctttgtcctttttcaggagaattagatttctataggatttttctttaggagatttattttttggacttcaaagcaagctggtattttcatacaaattcttctaattgctgtgtgtcccaggcagggagacggtttccagggaggggccggccctgtgtgcaggttccgatgttattagatgttacaagtttatatatatctatatatataatttattgagtttttacaagatgtatttgttgtagacttaacacttcttacgcaatgcttctagagttttatagcctggactgctacctttcaaagcttggagggaagccgtgaattcagttggttcgttctgtactgttactgggccctgagtctgggcagctgtcccttgcttgcctgcagggccatggctcagggtggtctcttcttggggcccagtgcatggtggccagaggtgtcacccaaaccggcaggtgcgattttgttaacccagcgacgaactttccgaaaaataaagacacctggttgctaacctg

SEQ ID NO: 7485 - DNA, 3733 bp, Homo sapiens
  source 1..3733: mol_type = unassigned DNA; mol_type = unassigned DNA
cgcgcgctgcctgaggacgccgcggcccccgcccccgccatgggcgcccctgcctgcgccctcgcgctctgcgtggccgtggccatcgtggccggcgcctcctcggagtccttggggacggagcagcgcgtcgtggggcgagcggcagaagtcccgggcccagagcccggccagcaggagcagttggtcttcggcagcggggatgctgtggagctgagctgtcccccgcccgggggtggtcccatggggcccactgtctgggtcaaggatggcacagggctggtgccctcggagcgtgtcctggtggggccccagcggctgcaggtgctgaatgcctcccacgaggactccggggcctacagctgccggcagcggctcacgcagcgcgtactgtgccacttcagtgtgcgggtgacagacgctccatcctcgggagatgacgaagacggggaggacgaggctgaggacacaggtgtggacacaggggccccttactggacacggcccgagcggatggacaagaagctgctggccgtgccggccgccaacaccgtccgcttccgctgcccagccgctggcaaccccactccctccatctcctggctgaagaacggcagggagttccgcggcgagcaccgcattggaggcatcaagctgcggcatcagcagtggagcctggtcatggaaagcgtggtgccctcggaccgcggcaactacacctgcgtcgtggagaacaagtttggcagcatccggcagacgtacacgctggacgtgctggagcgctccccgcaccggcccatcctgcaggcggggctgccggccaaccagacggcggtgctgggcagcgacgtggagttccactgcaaggtgtacagtgacgcacagccccacatccagtggctcaagcacgtggaggtgaatggcagcaaggtgggcccggacggcacaccctacgttaccgtgctcaaggtgtccctggagtccaacgcgtccatgagctccaacacaccactggtgcgcatcgcaaggctgtcctcaggggagggccccacgctggccaatgtctccgagctcgagctgcctgccgaccccaaatgggagctgtctcgggcccggctgaccctgggcaagccccttggggagggctgcttcggccaggtggtcatggcggaggccatcggcattgacaaggaccgggccgccaagcctgtcaccgtagccgtgaagatgctgaaagacgatgccactgacaaggacctgtcggacctggtgtctgagatggagatgatgaagatgatcgggaaacacaaaaacatcatcaacctgctgggcgcctgcacgcagggcgggcccctgtacgtgctggtggagtacgcggccaagggtaacctgcgggagtttctgcgggcgcggcggcccccgggcctggactactccttcgacacctgcaagccgcccgaggagcagctcaccttcaaggacctggtgtcctgtgcctaccaggtggcccggggcatggagtacttggcctcccagaagtgcatccacagggacctggctgcccgcaatgtgctggtgaccgaggacaacgtgatgaagatcgcagacttcgggctggcccgggacgtgcacaacctcgactactacaagaagacgaccaacggccggctgcccgtgaagtggatggcgcctgaggccttgtttgaccgagtctacactcaccagagtgacgtctggtcctttggggtcctgctctgggagatcttcacgctggggggctccccgtaccccggcatccctgtggaggagctcttcaagctgctgaaggagggccaccgcatggacaagcccgccaactgcacacacgacctgtacatgatcatgcgggagtgctggcatgccgcgccctcccagaggcccaccttcaagcagctggtggaggacctggaccgtgtccttaccgtgacgtccaccgacgagtacctggacctgtcggcgcctttcgagcagtactccccgggtggccaggacacccccagctccagctcctcaggggacgactccgtgtttgcccacgacctgctgcccccggccccacccagcagtgggggctcgcggacgtgaagggccactggtccccaacaatgtgaggggtccctagcagcccaccctgctgctggtgcacagccactccccggcatgagactcagtgcagatggagagacagctacacagagctttggtctgtgtgtgtgtgtgtgcgtgtgtgtgtgtgtgtgtgcacatccgcgtgtgcctgtgtgcgtgcgcatcttgcctccaggtgcagaggtaccctgggtgtccccgctgctgtgcaacggtctcctgactggtgctgcagcaccgaggggcctttgttctggggggacccagtgcagaatgtaagtgggcccacccggtgggacccccgtggggcagggagctgggcccgacatggctccggcctctgcctttgcaccacgggacatcacagggtgggcctcggcccctcccacacccaaagctgagcctgcagggaagccccacatgtccagcaccttgtgcctggggtgttagtggcaccgcctccccacctccaggctttcccacttcccaccctgcccctcagagactgaaattacgggtacctgaagatgggagcctttaccttttatgcaaaaggtttattccggaaactagtgtacatttctataaatagatgctgtgtatatggtatatatacatatatatatataacatatatggaagaggaaaaggctggtacaacggaggcctgcgaccctgggggcacaggaggcaggcatggccctgggcggggcgtgggggggcgtggagggaggccccagggggtctcacccatgcaagcagaggaccagggccttttctggcaccgcagttttgttttaaaactggacctgtatatttgtaaagctatttatgggcccctggcactcttgttcccacaccccaacacttccagcatttagctggccacatggcggagagttttaatttttaacttattgacaaccgagaaggtttatcccgccgatagagggacggccaagaatgtacgtccagcctgccccggagctggaggatcccctccaagcctaaaaggttgttaatagttggaggtgattccagtgaagatattttatttcctttgtcctttttcaggagaattagatttctataggatttttctttaggagatttattttttggacttcaaagcaagctggtattttcatacaaattcttctaattgctgtgtgtcccaggcagggagacggtttccagggaggggccggccctgtgtgcaggttccgatgttattagatgttacaagtttatatatatctatatatataatttattgagtttttacaagatgtatttgttgtagacttaacacttcttacgcaatgcttctagagttttatagcctggactgctacctttcaaagcttggagggaagccgtgaattcagttggttcgttctgtactgttactgggccctgagtctgggcagctgtcccttgcttgcctgcagggccatggctcagggtggtctcttcttggggcccagtgcatggtggccagaggtgtcacccaaaccggcaggtgcgattttgttaacccagcgacgaactttccgaaaaataaagacacctggttgctaacctg

SEQ ID NO: 7486 - DNA, 336 bp, Homo sapiens
  source 1..336: mol_type = unassigned DNA; mol_type = unassigned DNA
aaccccactccctccatctcctggctgaagaacggcagggagttccgcggcgagcaccgcattggaggcatcaagctgcggcatcagcagtggagcctggtcatggaaagcgtggtgccctcggaccgcggcaactacacctgcgtcgtggagaacaagtttggcagcatccggcagacgtacacgctggacgtgctggagcgctccccgcaccggcccatcctgcaggcggggctgccggccaaccagacggcggtgctgggcagcgacgtggagttccactgcaagacggcgggcgctaacaccaccgacaaggagctagaggttctctccttg

SEQ ID NO: 7487 - DNA, 545 bp, Homo sapiens
  source 1..545: mol_type = unassigned DNA; mol_type = unassigned DNA
cagcagtggagcctggtcatggaaagcgtggtgccctcggaccgcggcaactacacctgcgtcgtggagaacaagtttggcagcatccggcagacgtacacgctggacgtgctggagcgctccccgcaccggcccatcctgcaggcggggctgccggccaaccagacggcggtgctgggcagcgacgtggagttccactgcaaggtgtacagtgacgcacagccccacatccagtggctcaagcacgtggaggtgaatggcagcaaggtgggcccggacggcacaccctacgttaccgtgctcaagtcctggatcagtgagagtgtggaggccgacgtgcgcctccgcctggccaatgtgtcggagcgggacgggggcgagtacctctgtcgagccaccaatttcataggcgtggccgagaaggccttttggctgagcgttcacgggccccgagcaggtaacgactctgtcccatgccggccggcacaagagctccagctccaaggccctggccgcgcgccctgcacgccccgcacgcccagccc

SEQ ID NO: 7488 - DNA, 821 bp, Homo sapiens
  source 1..821: mol_type = unassigned DNA; mol_type = unassigned DNA
agatctcccgcttcccgctcaagcgacaggtaacagaaagtagataccaggttctgagctgcctgcccgccaggcctcctggagccccacctcggcccacgctggtcctgggctgtgtgagccctctctgcagccaggcgggctcccctctcctcgtctctgctcaccatgtagagcctagggtactttggggcacgaaacattctaaaaatcttcattcaatgctggtggaagtcagaacgcccccccttctggcccagcactgacccccggctgtacctccacgccctgtcgcccacgcggcgccaacctgcccctgctgacccaagcaggtgtccctggagtccaacgcgtccatgagctccaacacaccactggtgcgcatcgcaaggctgtcctcaggggagggccccacgctggccaatgtctccgagctcgagctgcctgccgaccccaaatgggagctgtctcgggcccggctgaccctgggcaagccccttggggagggctgcttcggccaggtggtcatggcggaggccatcggcattgacaaggaccgggccgccaagcctgtcaccgtagccgtgaagatgctgaaagacgatgccactgacaaggacctgtcggacctggtgtctgagatggagatgatgaagatgatcgggaaacacaaaaacatcatcaacctgctgggcgcctgcacgcagggcgggcccctgtacgtgctggtggagtacgcggccaagggtaacctgcgggagtttctgcgggcgcggcggcccccgggcctggactactccttcgacacctgcaagccgccc

SEQ ID NO: 7489 - DNA, 4293 bp, Homo sapiens
  source 1..4293: mol_type = unassigned DNA; mol_type = unassigned DNA
gtcgcgggcagctggcgccgcgcggtcctgctctgccggtcgcacggacgcaccggcgggccgccggccggagggacggggcgggagctgggcccgcggacagcgagccggagcgggagccgcgcgtagcgagccgggctccggcgctcgccagtctcccgagcggcgcccgcctcccgccggtgcccgcgccgggccgtggggggcagcatgcccgcgcgcgctgcctgaggacgccgcggcccccgcccccgccatgggcgcccctgcctgcgccctcgcgctctgcgtggccgtggccatcgtggccggcgcctcctcggagtccttggggacggagcagcgcgtcgtggggcgagcggcagaagtcccgggcccagagcccggccagcaggagcagttggtcttcggcagcggggatgctgtggagctgagctgtcccccgcccgggggtggtcccatggggcccactgtctgggtcaaggatggcacagggctggtgccctcggagcgtgtcctggtggggccccagcggctgcaggtgctgaatgcctcccacgaggactccggggcctacagctgccggcagcggctcacgcagcgcgtactgtgccacttcagtgtgcgggtgacagacgctccatcctcgggagatgacgaagacggggaggacgaggctgaggacacaggtgtggacacaggggccccttactggacacggcccgagcggatggacaagaagctgctggccgtgccggccgccaacaccgtccgcttccgctgcccagccgctggcaaccccactccctccatctcctggctgaagaacggcagggagttccgcggcgagcaccgcattggaggcatcaagctgcggcatcagcagtggagcctggtcatggaaagcgtggtgccctcggaccgcggcaactacacctgcgtcgtggagaacaagtttggcagcatccggcagacgtacacgctggacgtgctggagcgctccccgcaccggcccatcctgcaggcggggctgccggccaaccagacggcggtgctgggcagcgacgtggagttccactgcaaggtgtacagtgacgcacagccccacatccagtggctcaagcacgtggaggtgaatggcagcaaggtgggcccggacggcacaccctacgttaccgtgctcaagtcctggatcagtgagagtgtggaggccgacgtgcgcctccgcctggccaatgtgtcggagcgggacgggggcgagtacctctgtcgagccaccaatttcataggcgtggccgagaaggccttttggctgagcgttcacgggccccgagcagccgaggaggagctggtggaggctgacgaggcgggcagtgtgtatgcaggcatcctcagctacggggtgggcttcttcctgttcatcctggtggtggcggctgtgacgctctgccgcctgcgcagcccccccaagaaaggcctgggctcccccaccgtgcacaagatctcccgcttcccgctcaagcgacaggtgtccctggagtccaacgcgtccatgagctccaacacaccactggtgcgcatcgcaaggctgtcctcaggggagggccccacgctggccaatgtctccgagctcgagctgcctgccgaccccaaatgggagctgtctcgggcccggctgaccctgggcaagccccttggggagggctgcttcggccaggtggtcatggcggaggccatcggcattgacaaggaccgggccgccaagcctgtcaccgtagccgtgaagatgctgaaagacgatgccactgacaaggacctgtcggacctggtgtctgagatggagatgatgaagatgatcgggaaacacaaaaacatcatcaacctgctgggcgcctgcacgcagggcgggcccctgtacgtgctggtggagtacgcggccaagggtaacctgcgggagtttctgcgggcgcggcggcccccgggcctggactactccttcgacacctgcaagccgcccgaggagcagctcaccttcaaggacctggtgtcctgtgcctaccaggtggcccggggcatggagtacttggcctcccagaagtgcatccacagggacctggctgcccgcaatgtgctggtgaccgaggacaacgtgatgaagatcgcagacttcgggctggcccgggacgtgcacaacctcgactactacaagaagacgaccaacggccggctgcccgtgaagtggatggcgcctgaggccttgtttgaccgagtctacactcaccagagtgacgtctggtcctttggggtcctgctctgggagatcttcacgctggggggctccccgtaccccggcatccctgtggaggagctcttcaagctgctgaaggagggccaccgcatggacaagcccgccaactgcacacacgacctgtacatgatcatgcgggagtgctggcatgccgcgccctcccagaggcccaccttcaagcagctggtggaggacctggaccgtgtccttaccgtgacgtccaccgacgagtacctggacctgtcggcgcctttcgagcagtactccccgggtggccaggacacccccagctccagctcctcaggggacgactccgtgtttgcccacgacctgctgcccccggccccacccagcagtgggggctcgcggacgtgaagggccactggtccccaacaatgtgaggggtccctagcagcccaccctgctgctggtgcacagccactccccggcatgagactcagtgcagatggagagacagctacacagagctttggtctgtgtgtgtgtgtgtgcgtgtgtgtgtgtgtgtgtgcacatccgcgtgtgcctgtgtgcgtgcgcatcttgcctccaggtgcagaggtaccctgggtgtccccgctgctgtgcaacggtctcctgactggtgctgcagcaccgaggggcctttgttctggggggacccagtgcagaatgtaagtgggcccacccggtgggacccccgtggggcagggagctgggcccgacatggctccggcctctgcctttgcaccacgggacatcacagggtgggcctcggcccctcccacacccaaagctgagcctgcagggaagccccacatgtccagcaccttgtgcctggggtgttagtggcaccgcctccccacctccaggctttcccacttcccaccctgcccctcagagactgaaattacgggtacctgaagatgggagcctttaccttttatgcaaaaggtttattccggaaactagtgtacatttctataaatagatgctgtgtatatggtatatatacatatatatatataacatatatggaagaggaaaaggctggtacaacggaggcctgcgaccctgggggcacaggaggcaggcatggccctgggcggggcgtgggggggcgtggagggaggccccagggggtctcacccatgcaagcagaggaccagggccttttctggcaccgcagttttgttttaaaactggacctgtatatttgtaaagctatttatgggcccctggcactcttgttcccacaccccaacacttccagcatttagctggccacatggcggagagttttaatttttaacttattgacaaccgagaaggtttatcccgccgatagagggacggccaagaatgtacgtccagcctgccccggagctggaggatcccctccaagcctaaaaggttgttaatagttggaggtgattccagtgaagatattttatttcctttgtcctttttcaggagaattagatttctataggatttttctttaggagatttattttttggacttcaaagcaagctggtattttcatacaaattcttctaattgctgtgtgtcccaggcagggagacggtttccagggaggggccggccctgtgtgcaggttccgatgttattagatgttacaagtttatatatatctatatatataatttattgagtttttacaagatgtatttgttgtagacttaacacttcttacgcaatgcttctagagttttatagcctggactgctacctttcaaagcttggagggaagccgtgaattcagttggttcgttctgtactgttactgggccctgagtctgggcagctgtcccttgcttgcctgcagggccatggctcagggtggtctcttcttggggcccagtgcatggtggccagaggtgtcacccaaaccggcaggtgcgattttgttaacccagcgacgaactttccgaaaaataaagacacctggttgctaacctgg

SEQ ID NO: 7490 - DNA, 3951 bp, Homo sapiens
  source 1..3951: mol_type = unassigned DNA; mol_type = unassigned DNA
gtcgcgggcagctggcgccgcgcggtcctgctctgccggtcgcacggacgcaccggcgggccgccggccggagggacggggcgggagctgggcccgcggacagcgagccggagcgggagccgcgcgtagcgagccgggctccggcgctcgccagtctcccgagcggcgcccgcctcccgccggtgcccgcgccgggccgtggggggcagcatgcccgcgcgcgctgcctgaggacgccgcggcccccgcccccgccatgggcgcccctgcctgcgccctcgcgctctgcgtggccgtggccatcgtggccggcgcctcctcggagtccttggggacggagcagcgcgtcgtggggcgagcggcagaagtcccgggcccagagcccggccagcaggagcagttggtcttcggcagcggggatgctgtggagctgagctgtcccccgcccgggggtggtcccatggggcccactgtctgggtcaaggatggcacagggctggtgccctcggagcgtgtcctggtggggccccagcggctgcaggtgctgaatgcctcccacgaggactccggggcctacagctgccggcagcggctcacgcagcgcgtactgtgccacttcagtgtgcgggtgacagacgctccatcctcgggagatgacgaagacggggaggacgaggctgaggacacaggtgtggacacaggggccccttactggacacggcccgagcggatggacaagaagctgctggccgtgccggccgccaacaccgtccgcttccgctgcccagccgctggcaaccccactccctccatctcctggctgaagaacggcagggagttccgcggcgagcaccgcattggaggcatcaagctgcggcatcagcagtggagcctggtcatggaaagcgtggtgccctcggaccgcggcaactacacctgcgtcgtggagaacaagtttggcagcatccggcagacgtacacgctggacgtgctggagcgctccccgcaccggcccatcctgcaggcggggctgccggccaaccagacggcggtgctgggcagcgacgtggagttccactgcaaggtgtacagtgacgcacagccccacatccagtggctcaagcacgtggaggtgaatggcagcaaggtgggcccggacggcacaccctacgttaccgtgctcaaggtgtccctggagtccaacgcgtccatgagctccaacacaccactggtgcgcatcgcaaggctgtcctcaggggagggccccacgctggccaatgtctccgagctcgagctgcctgccgaccccaaatgggagctgtctcgggcccggctgaccctgggcaagccccttggggagggctgcttcggccaggtggtcatggcggaggccatcggcattgacaaggaccgggccgccaagcctgtcaccgtagccgtgaagatgctgaaagacgatgccactgacaaggacctgtcggacctggtgtctgagatggagatgatgaagatgatcgggaaacacaaaaacatcatcaacctgctgggcgcctgcacgcagggcgggcccctgtacgtgctggtggagtacgcggccaagggtaacctgcgggagtttctgcgggcgcggcggcccccgggcctggactactccttcgacacctgcaagccgcccgaggagcagctcaccttcaaggacctggtgtcctgtgcctaccaggtggcccggggcatggagtacttggcctcccagaagtgcatccacagggacctggctgcccgcaatgtgctggtgaccgaggacaacgtgatgaagatcgcagacttcgggctggcccgggacgtgcacaacctcgactactacaagaagacgaccaacggccggctgcccgtgaagtggatggcgcctgaggccttgtttgaccgagtctacactcaccagagtgacgtctggtcctttggggtcctgctctgggagatcttcacgctggggggctccccgtaccccggcatccctgtggaggagctcttcaagctgctgaaggagggccaccgcatggacaagcccgccaactgcacacacgacctgtacatgatcatgcgggagtgctggcatgccgcgccctcccagaggcccaccttcaagcagctggtggaggacctggaccgtgtccttaccgtgacgtccaccgacgagtacctggacctgtcggcgcctttcgagcagtactccccgggtggccaggacacccccagctccagctcctcaggggacgactccgtgtttgcccacgacctgctgcccccggccccacccagcagtgggggctcgcggacgtgaagggccactggtccccaacaatgtgaggggtccctagcagcccaccctgctgctggtgcacagccactccccggcatgagactcagtgcagatggagagacagctacacagagctttggtctgtgtgtgtgtgtgtgcgtgtgtgtgtgtgtgtgtgcacatccgcgtgtgcctgtgtgcgtgcgcatcttgcctccaggtgcagaggtaccctgggtgtccccgctgctgtgcaacggtctcctgactggtgctgcagcaccgaggggcctttgttctggggggacccagtgcagaatgtaagtgggcccacccggtgggacccccgtggggcagggagctgggcccgacatggctccggcctctgcctttgcaccacgggacatcacagggtgggcctcggcccctcccacacccaaagctgagcctgcagggaagccccacatgtccagcaccttgtgcctggggtgttagtggcaccgcctccccacctccaggctttcccacttcccaccctgcccctcagagactgaaattacgggtacctgaagatgggagcctttaccttttatgcaaaaggtttattccggaaactagtgtacatttctataaatagatgctgtgtatatggtatatatacatatatatatataacatatatggaagaggaaaaggctggtacaacggaggcctgcgaccctgggggcacaggaggcaggcatggccctgggcggggcgtgggggggcgtggagggaggccccagggggtctcacccatgcaagcagaggaccagggccttttctggcaccgcagttttgttttaaaactggacctgtatatttgtaaagctatttatgggcccctggcactcttgttcccacaccccaacacttccagcatttagctggccacatggcggagagttttaatttttaacttattgacaaccgagaaggtttatcccgccgatagagggacggccaagaatgtacgtccagcctgccccggagctggaggatcccctccaagcctaaaaggttgttaatagttggaggtgattccagtgaagatattttatttcctttgtcctttttcaggagaattagatttctataggatttttctttaggagatttattttttggacttcaaagcaagctggtattttcatacaaattcttctaattgctgtgtgtcccaggcagggagacggtttccagggaggggccggccctgtgtgcaggttccgatgttattagatgttacaagtttatatatatctatatatataatttattgagtttttacaagatgtatttgttgtagacttaacacttcttacgcaatgcttctagagttttatagcctggactgctacctttcaaagcttggagggaagccgtgaattcagttggttcgttctgtactgttactgggccctgagtctgggcagctgtcccttgcttgcctgcagggccatggctcagggtggtctcttcttggggcccagtgcatggtggccagaggtgtcacccaaaccggcaggtgcgattttgttaacccagcgacgaactttccgaaaaataaagacacctggttgctaacctgg

SEQ ID NO: 7491 - DNA, 4287 bp, Homo sapiens
  source 1..4287: mol_type = unassigned DNA; mol_type = unassigned DNA
gtcgcgggcagctggcgccgcgcggtcctgctctgccggtcgcacggacgcaccggcgggccgccggccggagggacggggcgggagctgggcccgcggacagcgagccggagcgggagccgcgcgtagcgagccgggctccggcgctcgccagtctcccgagcggcgcccgcctcccgccggtgcccgcgccgggccgtggggggcagcatgcccgcgcgcgctgcctgaggacgccgcggcccccgcccccgccatgggcgcccctgcctgcgccctcgcgctctgcgtggccgtggccatcgtggccggcgcctcctcggagtccttggggacggagcagcgcgtcgtggggcgagcggcagaagtcccgggcccagagcccggccagcaggagcagttggtcttcggcagcggggatgctgtggagctgagctgtcccccgcccgggggtggtcccatggggcccactgtctgggtcaaggatggcacagggctggtgccctcggagcgtgtcctggtggggccccagcggctgcaggtgctgaatgcctcccacgaggactccggggcctacagctgccggcagcggctcacgcagcgcgtactgtgccacttcagtgtgcgggtgacagacgctccatcctcgggagatgacgaagacggggaggacgaggctgaggacacaggtgtggacacaggggccccttactggacacggcccgagcggatggacaagaagctgctggccgtgccggccgccaacaccgtccgcttccgctgcccagccgctggcaaccccactccctccatctcctggctgaagaacggcagggagttccgcggcgagcaccgcattggaggcatcaagctgcggcatcagcagtggagcctggtcatggaaagcgtggtgccctcggaccgcggcaactacacctgcgtcgtggagaacaagtttggcagcatccggcagacgtacacgctggacgtgctggagcgctccccgcaccggcccatcctgcaggcggggctgccggccaaccagacggcggtgctgggcagcgacgtggagttccactgcaaggtgtacagtgacgcacagccccacatccagtggctcaagcacgtggaggtgaatggcagcaaggtgggcccggacggcacaccctacgttaccgtgctcaagacggcgggcgctaacaccaccgacaaggagctagaggttctctccttgcacaacgtcacctttgaggacgccggggagtacacctgcctggcgggcaattctattgggttttctcatcactctgcgtggctggtggtgctgccagccgaggaggagctggtggaggctgacgaggcgggcagtgtgtatgcaggcatcctcagctacggggtgggcttcttcctgttcatcctggtggtggcggctgtgacgctctgccgcctgcgcagcccccccaagaaaggcctgggctcccccaccgtgcacaagatctcccgcttcccgctcaagcgacaggtgtccctggagtccaacgcgtccatgagctccaacacaccactggtgcgcatcgcaaggctgtcctcaggggagggccccacgctggccaatgtctccgagctcgagctgcctgccgaccccaaatgggagctgtctcgggcccggctgaccctgggcaagccccttggggagggctgcttcggccaggtggtcatggcggaggccatcggcattgacaaggaccgggccgccaagcctgtcaccgtagccgtgaagatgctgaaagacgatgccactgacaaggacctgtcggacctggtgtctgagatggagatgatgaagatgatcgggaaacacaaaaacatcatcaacctgctgggcgcctgcacgcagggcgggcccctgtacgtgctggtggagtacgcggccaagggtaacctgcgggagtttctgcgggcgcggcggcccccgggcctggactactccttcgacacctgcaagccgcccgaggagcagctcaccttcaaggacctggtgtcctgtgcctaccaggtggcccggggcatggagtacttggcctcccagaagtgcatccacagggacctggctgcccgcaatgtgctggtgaccgaggacaacgtgatgaagatcgcagacttcgggctggcccgggacgtgcacaacctcgactactacaagaagacgaccaacggccggctgcccgtgaagtggatggcgcctgaggccttgtttgaccgagtctacactcaccagagtgacgtctggtcctttggggtcctgctctgggagatcttcacgctggggggctccccgtaccccggcatccctgtggaggagctcttcaagctgctgaaggagggccaccgcatggacaagcccgccaactgcacacacgacctgtacatgatcatgcgggagtgctggcatgccgcgccctcccagaggcccaccttcaagcagctggtggaggacctggaccgtgtccttaccgtgacgtccaccgacgagtacctggacctgtcggcgcctttcgagcagtactccccgggtggccaggacacccccagctccagctcctcaggggacgactccgtgtttgcccacgacctgctgcccccggccccacccagcagtgggggctcgcggacgtgaagggccactggtccccaacaatgtgaggggtccctagcagcccaccctgctgctggtgcacagccactccccggcatgagactcagtgcagatggagagacagctacacagagctttggtctgtgtgtgtgtgtgtgcgtgtgtgtgtgtgtgtgtgcacatccgcgtgtgcctgtgtgcgtgcgcatcttgcctccaggtgcagaggtaccctgggtgtccccgctgctgtgcaacggtctcctgactggtgctgcagcaccgaggggcctttgttctggggggacccagtgcagaatgtaagtgggcccacccggtgggacccccgtggggcagggagctgggcccgacatggctccggcctctgcctttgcaccacgggacatcacagggtgggcctcggcccctcccacacccaaagctgagcctgcagggaagccccacatgtccagcaccttgtgcctggggtgttagtggcaccgcctccccacctccaggctttcccacttcccaccctgcccctcagagactgaaattacgggtacctgaagatgggagcctttaccttttatgcaaaaggtttattccggaaactagtgtacatttctataaatagatgctgtgtatatggtatatatacatatatatatataacatatatggaagaggaaaaggctggtacaacggaggcctgcgaccctgggggcacaggaggcaggcatggccctgggcggggcgtgggggggcgtggagggaggccccagggggtctcacccatgcaagcagaggaccagggccttttctggcaccgcagttttgttttaaaactggacctgtatatttgtaaagctatttatgggcccctggcactcttgttcccacaccccaacacttccagcatttagctggccacatggcggagagttttaatttttaacttattgacaaccgagaaggtttatcccgccgatagagggacggccaagaatgtacgtccagcctgccccggagctggaggatcccctccaagcctaaaaggttgttaatagttggaggtgattccagtgaagatattttatttcctttgtcctttttcaggagaattagatttctataggatttttctttaggagatttattttttggacttcaaagcaagctggtattttcatacaaattcttctaattgctgtgtgtcccaggcagggagacggtttccagggaggggccggccctgtgtgcaggttccgatgttattagatgttacaagtttatatatatctatatatataatttattgagtttttacaagatgtatttgttgtagacttaacacttcttacgcaatgcttctagagttttatagcctggactgctacctttcaaagcttggagggaagccgtgaattcagttggttcgttctgtactgttactgggccctgagtctgggcagctgtcccttgcttgcctgcagggccatggctcagggtggtctcttcttggggcccagtgcatggtggccagaggtgtcacccaaaccggcaggtgcgattttgttaacccagcgacgaactttccgaaaaataaagacacctggttgctaacctgg

SEQ ID NO: 7492 - DNA, 4438 bp, Homo sapiens
  source 1..4438: mol_type = unassigned DNA; mol_type = unassigned DNA
gtcgcgggcagctggcgccgcgcggtcctgctctgccggtcgcacggacgcaccggcgggccgccggccggagggacggggcgggagctgggcccgcggacagcgagccggagcgggagccgcgcgtagcgagccgggctccggcgctcgccagtctcccgagcggcgcccgcctcccgccggtgcccgcgccgggccgtggggggcagcatgcccgcgcgcgctgcctgaggacgccgcggcccccgcccccgccatgggcgcccctgcctgcgccctcgcgctctgcgtggccgtggccatcgtggccggcgcctcctcggagtccttggggacggagcagcgcgtcgtggggcgagcggcagaagtcccgggcccagagcccggccagcaggagcagttggtcttcggcagcggggatgctgtggagctgagctgtcccccgcccgggggtggtcccatggggcccactgtctgggtcaaggatggcacagggctggtgccctcggagcgtgtcctggtggggccccagcggctgcaggtgctgaatgcctcccacgaggactccggggcctacagctgccggcagcggctcacgcagcgcgtactgtgccacttcagtgtgcgggtgacagacgctccatcctcgggagatgacgaagacggggaggacgaggctgaggacacaggtgtggacacaggggccccttactggacacggcccgagcggatggacaagaagctgctggccgtgccggccgccaacaccgtccgcttccgctgcccagccgctggcaaccccactccctccatctcctggctgaagaacggcagggagttccgcggcgagcaccgcattggaggcatcaagctgcggcatcagcagtggagcctggtcatggaaagcgtggtgccctcggaccgcggcaactacacctgcgtcgtggagaacaagtttggcagcatccggcagacgtacacgctggacgtgctggagcgctccccgcaccggcccatcctgcaggcggggctgccggccaaccagacggcggtgctgggcagcgacgtggagttccactgcaaggtgtacagtgacgcacagccccacatccagtggctcaagcacgtggaggtgaatggcagcaaggtgggcccggacggcacaccctacgttaccgtgctcaagtcctggatcagtgagagtgtggaggccgacgtgcgcctccgcctggccaatgtgtcggagcgggacgggggcgagtacctctgtcgagccaccaatttcataggcgtggccgagaaggccttttggctgagcgttcacgggccccgagcagacggcgggcgctaacaccaccgacaaggagctagaggttctctccttgcacaacgtcacctttgaggacgccggggagtacacctgcctggcgggcaattctattgggttttctcatcactctgcgtggctggtggtgctgccagccgaggaggagctggtggaggctgacgaggcgggcagtgtgtatgcaggcatcctcagctacggggtgggcttcttcctgttcatcctggtggtggcggctgtgacgctctgccgcctgcgcagcccccccaagaaaggcctgggctcccccaccgtgcacaagatctcccgcttcccgctcaagcgacaggtgtccctggagtccaacgcgtccatgagctccaacacaccactggtgcgcatcgcaaggctgtcctcaggggagggccccacgctggccaatgtctccgagctcgagctgcctgccgaccccaaatgggagctgtctcgggcccggctgaccctgggcaagccccttggggagggctgcttcggccaggtggtcatggcggaggccatcggcattgacaaggaccgggccgccaagcctgtcaccgtagccgtgaagatgctgaaagacgatgccactgacaaggacctgtcggacctggtgtctgagatggagatgatgaagatgatcgggaaacacaaaaacatcatcaacctgctgggcgcctgcacgcagggcgggcccctgtacgtgctggtggagtacgcggccaagggtaacctgcgggagtttctgcgggcgcggcggcccccgggcctggactactccttcgacacctgcaagccgcccgaggagcagctcaccttcaaggacctggtgtcctgtgcctaccaggtggcccggggcatggagtacttggcctcccagaagtgcatccacagggacctggctgcccgcaatgtgctggtgaccgaggacaacgtgatgaagatcgcagacttcgggctggcccgggacgtgcacaacctcgactactacaagaagacgaccaacggccggctgcccgtgaagtggatggcgcctgaggccttgtttgaccgagtctacactcaccagagtgacgtctggtcctttggggtcctgctctgggagatcttcacgctggggggctccccgtaccccggcatccctgtggaggagctcttcaagctgctgaaggagggccaccgcatggacaagcccgccaactgcacacacgacctgtacatgatcatgcgggagtgctggcatgccgcgccctcccagaggcccaccttcaagcagctggtggaggacctggaccgtgtccttaccgtgacgtccaccgacgagtacctggacctgtcggcgcctttcgagcagtactccccgggtggccaggacacccccagctccagctcctcaggggacgactccgtgtttgcccacgacctgctgcccccggccccacccagcagtgggggctcgcggacgtgaagggccactggtccccaacaatgtgaggggtccctagcagcccaccctgctgctggtgcacagccactccccggcatgagactcagtgcagatggagagacagctacacagagctttggtctgtgtgtgtgtgtgtgcgtgtgtgtgtgtgtgtgtgcacatccgcgtgtgcctgtgtgcgtgcgcatcttgcctccaggtgcagaggtaccctgggtgtccccgctgctgtgcaacggtctcctgactggtgctgcagcaccgaggggcctttgttctggggggacccagtgcagaatgtaagtgggcccacccggtgggacccccgtggggcagggagctgggcccgacatggctccggcctctgcctttgcaccacgggacatcacagggtgggcctcggcccctcccacacccaaagctgagcctgcagggaagccccacatgtccagcaccttgtgcctggggtgttagtggcaccgcctccccacctccaggctttcccacttcccaccctgcccctcagagactgaaattacgggtacctgaagatgggagcctttaccttttatgcaaaaggtttattccggaaactagtgtacatttctataaatagatgctgtgtatatggtatatatacatatatatatataacatatatggaagaggaaaaggctggtacaacggaggcctgcgaccctgggggcacaggaggcaggcatggccctgggcggggcgtgggggggcgtggagggaggccccagggggtctcacccatgcaagcagaggaccagggccttttctggcaccgcagttttgttttaaaactggacctgtatatttgtaaagctatttatgggcccctggcactcttgttcccacaccccaacacttccagcatttagctggccacatggcggagagttttaatttttaacttattgacaaccgagaaggtttatcccgccgatagagggacggccaagaatgtacgtccagcctgccccggagctggaggatcccctccaagcctaaaaggttgttaatagttggaggtgattccagtgaagatattttatttcctttgtcctttttcaggagaattagatttctataggatttttctttaggagatttattttttggacttcaaagcaagctggtattttcatacaaattcttctaattgctgtgtgtcccaggcagggagacggtttccagggaggggccggccctgtgtgcaggttccgatgttattagatgttacaagtttatatatatctatatatataatttattgagtttttacaagatgtatttgttgtagacttaacacttcttacgcaatgcttctagagttttatagcctggactgctacctttcaaagcttggagggaagccgtgaattcagttggttcgttctgtactgttactgggccctgagtctgggcagctgtcccttgcttgcctgcagggccatggctcagggtggtctcttcttggggcccagtgcatggtggccagaggtgtcacccaaaccggcaggtgcgattttgttaacccagcgacgaactttccgaaaaataaagacacctggttgctaacctgg

SEQ ID NO: 7493 - DNA, 563 bp, Homo sapiens
  source 1..563: mol_type = unassigned DNA; mol_type = unassigned DNA
ggccgcgctttacaggggccgcgctttacaggggccgcgctttacaggggccgcgctttacaggggccgcgctttacaggggccgcgctttacaggggccgcgctttacaggggccgcgctttacaggggccgcgccggcgggggcgggatcgcgcgcaaggcggggctgtagccgccccgggaccgccctgctcaggcgccgtggggttcggcgcggctacgtgcagaatccgtctagctaaaatgtaatttcagattggacaagtactagagggagtcaaaagtgaggaacccaagcctgagcacgtgggccagccccatggggaatctgtcttgtcatcggggctggctggagtagagacaagtctggatgctggctggccaggtggaggaactgcaatgtctggtggagaacagaaaccagagaggtactatgtgggtgtggacgttggaacaggcagtgtccgtgcagctctggtggaccagagtggggtcctgttggcttttgcagaccagccaattaagaattgggagccccagttcaaccaccatgagcagtcct

SEQ ID NO: 7494 - DNA, 681 bp, Homo sapiens
  source 1..681: mol_type = unassigned DNA; mol_type = unassigned DNA
caaggcggggctgtagccgccccgggaccgccctgctcaggcgccgtggggttcggcgcggctacgtgcagaatccgtctagctaaaatgtaatttcagattggacaagtactgtggaggaactgcaatgtctggtggagaacagaaaccagagaggtactatgtgggtgtggacgttggaacaggcagtgtccgtgcagctctggtggaccagagtggggtcctgttggcttttgcagaccagccaattaagaattgggagccccagttcaaccaccatgagcagtcctccgaggacatctgggctgcgtgctgtgttgtcacaaagaaagttgtacaagggattgatttaaaccaaattcgaggacttgggtttgatgccacgtgttctctggttgttttggataagcagtttcacccattaccagtcaaccaggaaggggattcccatcgaaacgtcatcatgtggctggaccatcgagcagtcagtcaagttaacaggatcaatgagaccaagcacagtgtcctccagtacgtcgggggggtgatgtctgtggaaatgcaggccccgaaacttctgtggctgaaagagaacttgagagagatttgctgggataaggcgggacatttctttgatctcccggacttcttatcgtggaaggcaacaggtgtcacagcacg

SEQ ID NO: 7495 - DNA, 4072 bp, Homo sapiens
  source 1..4072: mol_type = unassigned DNA; mol_type = unassigned DNA
gtagccgccccgggaccgccctgctcaggcgccgtggggttcggcgcggctacgtgcagaatccgtctagctaaaatgtaatttcagattggacaagtactaaagttgtacaagggattgatttaaaccaaattcgaggacttgggtttgatgccacgtgttctctggttgttttggataagcagtttcacccattaccagtcaaccaggaaggggattcccatcgaaacgtcatcatgtggctggaccatcgagcagtcagtcaagttaacaggatcaatgagaccaagcacagtgtcctccagtacgtcgggggggtgatgtctgtggaaatgcaggccccgaaacttctgtggctgaaagagaacttgagagagatttgctgggataaggcgggacatttctttgatctcccggacttcttatcgtggaaggcaacaggtgtcacagcacggtctctctgctccctggtgtgtaagtggacatattcagcagagaaaggctgggacgacagtttctggaaaatgattggtttggaagactttgttgcagataattacagcaaaataggaaaccaagtgctacctcctggagcttctcttggaaatgggctcacaccagaggcagcaagagaccttggccttctccctgggattgcggtcgcagcttcactcattgatgcccatgcaggaggactaggagtgattggggcagatgtgagagggcacggcctcatctgtgaggggcagccagtgacgtcacggctggctgtcatctgtggaacgtcttcttgtcacatggggatcagcaaagacccgatttttgtaccaggcgtctgggggccttatttctcagccatggtacctgggttctggctgaatgaaggtggtcagagcgttactggaaaattgatagaccacatggtacaaggccatgctgcttttccagaactacaagtaaaggccacagccaggtcaccggattgaaactgtctcaggaccttgatgatcttgccattctctacctggccacagttcaagccattgctttggggactcgcttcattatagaagccatggaggcagcagggcactcaatcagtactcttttcctatgtggaggcctcagcaagaatcccctttttgtgcaaatgcatgcggacattactggcatgcctgtggtcctgtcgcaagaggtggagtccgttcttgtgggtgctgctgttctgggtgcctgtgcctcaggggatttcgcttctgtacaggaagcaatggcaaaaatgagcaaagttgggaaagttgtgttcccgagactacaggataaaaaatactatgataagaaataccaagtattcctgaagctggttgaacaccagaaggagtatttggcgatcatgaatgatgactgaacagggcttgcaggtgctgatgccagaagcttctgtgccattgcattaaagacttgtcatttgatccatgttcaagacccttgagataaggaaaacgaagcacagagcaattaaataacttgcccaagatcgcccaagatcacccaagatgtccggctgaagttcttaaccattaccttacactaatcaacagcaacaataataataaccacctttctaggatgcaaattatgttccaagaactttcattatttcattacatctgcatagccccaagagtaaataatatcctgttctattgaagaagaaactgaggtcccaagacatgaaattacttgctcaaggtcacacactgccctcaactctgtgatgtcaaaattcccttctccataggtaacagatcctatctggctacttttcattattaaggaacctgtcttaaatcctccaaggtgtcattcatttagttatttgacactaagcccctaagtgaaattataactatggctaaaatccttcctcattttggaggcttctaatccaagaaccaaagatgccaacattcttcctctgtgactattttaactttgtggttatgatacctattgccacactttcagtcctacttgtccacacttaaacaccatgctttcccattctgagtgatggcaccctcatccccacccaaagctactgtgggtgctactgccttacagagtatactgtggtgtgctgcctggatatttccagcatcttggagtgctttcagcagacagccatcagccatcagccttctttgtgaattgcctaggctgccacgtcacctctctagggcagcccacatgcaatgaatgatttgtcaacatggaagcgtacagaccaactcccctcattcaaacttggaacaacttggaaggaccattccagcttcagcactccccagggataagtcaagactttcattgagcctgcaccacaacctgctttctccctctgcccactacttcttccttccctcctctctcacagctgttattcccaacagcatttcttaataaccctccaacatgctaatctccatctcagggtctacttcctggaaaatccaatttacaacaggctgcaataacaaaagtcctcgaagttaagattttttttttctgtttatggtacaattttaaaatctcttgctctatggatgcgcattctctagtgacagagatgtcgtctcccttaatttgaacttgcacttggcttcaatttctccattgaatccttagagtaatctctctttgggcagcccaacaggttggcaataacatctcttggaagtaaaatgcattaaaaggcagtttcattaagtgatataaaatccatgtaactcaagtcttcaacagccctagaagtaaaatttccagtatctcatacagttcctaaattaatattaatttcatagcaagagtgagtttcaagccagtgtgaaaaataaatgaatattcatttttacacacagtgggaaggaatccacatccttgatcacctttctccagtctctaccttaatagttatgctggctgaaaatatccataggatatttgtccctatcttcccagtcccattacctaaacattcagatccaagtcaattatggtcaaggttgttccattaacagaaagctaaatcttacccataatgtctgggattggtcttgcttccctaaaccctagtatggtatttgatggagctcaaatacaccttaggtatttgtgcccactgtgtttacaggtctaagaacaaggaggtgttgtaaaacgtcagttttcattcctgtctctctttctgtgactctgcctcgggcatataaatctcctccctcggggcctggaaactattattccaaagtacctcccagattctgaaaattgtcacagctgctgcattcagcttcttctgaactttgatattgacttgaggtagcctgagtttgcaatttgctataattctttgcctatttgattgcagaccactcttgtgggcatcatccagaaaagcaaactaatccctatggtggatctcatatcattctggctacctctgtctcggttgctgagattgagcctatgttgcagttctttcctttctccctctttcttccctcccttcttttatgccttcatccttccttcctaccttcaacatttgcaggacatgtgtttgggggtctgtggaaggggaagctttacctaaacaatgctgtcagaattctctgtgtgtgggttcaataatttccttcaggaatgaatgctttgctgctgacgtccaattgcactctttgctgctgacatgatctctctactagcatgactgcaggaactgtatgtctagatctgcatctgtccaggtcagagtcttctagctgatatccattctgagacattcagggttacctagaaatcagcaggaaagccttagaattctcagtttcttcatttcatcatttgtatgtgtaagacacagatatcttctttacaagtagggcctactgcagttctatttaaagtgcctagctagggattttctcctcttatcatttatctatttacttacagaccaactcagaacataaaatctctttctcatcctttctccccaacacacacaaaa

SEQ ID NO: 7496 - DNA, 905 bp, Homo sapiens
  source 1..905: mol_type = unassigned DNA; mol_type = unassigned DNA
ccgtggggttcggcgcggctacgtgcagaatccgtctagctaaaatgtaatttcagattggacaagtactgggattcccatcgaaacgtcatcatgtggctggaccatcgagcagtcagtcaagttaacaggatcaatgagaccaagcacagtgtcctccagtacgtcgggggggtgatgtctgtggaaatgcaggccccgaaacttctgtggctgaaagagaacttgagagagatttgctgggataaggcgggacatttctttgatctcccggacttcttatcgtggaaggcaacaggtgtcacagcacggtctctctgctccctggtgtgtaagtggacatattcagcagagaaaggctgggacgacagtttctggaaaatgattggtttggaagactttgttgcagataattacagcaaaataggaaaccaagtgctacctcctggagcttctcttggaaatgggctcacaccagaggcagcaagagaccttggccttctccctgggattgcggtcgcagcttcactcattgatgcccatgcaggaggactaggagtgattggggcagatgtgagagggcacggcctcatctgtgaggggcagccagtgacgtcacggctggctgtcatctgtggaacgtcttcttgtcacatggggatcagcaaagacccgatttttgtaccaggcgtctgggggccttatttctcagccatggtacctgggttctggctgaatgaaggtggtcagagcgttactggaaaattgatagaccacatggtacaaggccatgctgcttttccagaactacaagtaaaggccacagccaggtcaccggattgaaactgtctcaggaccttgatgatcttgccattctctacctggccacagttcaagccattgct

SEQ ID NO: 7497 - DNA, 693 bp, Homo sapiens
  source 1..693: mol_type = unassigned DNA; mol_type = unassigned DNA
gctacgtgcagaatccgtctagctaaaatgtaatttcagattggacaagtactgtggaggaactgcaatgtctggtggagaacagaaaccagagaggtactatgtgggtgtggacgttggaacaggcagtgtccgtgcagctctggtggaccagagtggggtcctgttggcttttgcagaccagccaattaagaattgggagccccagttcaaccaccatgagcagtcctccgaggacatctgggctgcgtgctgtgttgtcacaaaggtagtgatggagcctgagggaactggtgattgcataactcctcgcacgcccccaaagctgacaaaggcattcaaatcaagatttaaaagaatacagtacctgccactcagaactctactgcaagctggattatgtctatgaagccccaggctttgacccttgctctaaatagagctaaggataaaaccagaaagttgtacaagggattgatttaaaccaaattcgaggacttgggtttgatgccacgtgttctctggttgttttggataagcagtttcacccattaccagtcaaccaggaaggggattcccatcgaaacgtcatcatgtggctggaccatcgagcagtcagtcaagttaacaggatcaatgagaccaagcacagtgtcctccagtacgtcgggggggtgatgtctgtggaaatgc

SEQ ID NO: 7498 - DNA, 2052 bp, Homo sapiens
  source 1..2052: mol_type = unassigned DNA; mol_type = unassigned DNA
cccagaaagaggcttctccaacccggcccggcccttccttcccctttcccgcagtcgttgcctcctcctcccctgcctcctcctccccttcctcctcctggccgcttagtctcacacccgccgggccgttgttcccgagacgttgttgagtcccctgtgtcctcttctgggtggaggaactgcaatgtctggtggagaacagaaaccagagaggtactatgtgggtgtggacgttggaacaggcagtgtccgtgcagctctggtggaccagagtggggtcctgttggcttttgcagaccagccaattaagaattgggagccccagttcaaccaccatgagcagtcctccgaggacatctgggctgcgtgctgtgttgtcacaaagaaagttgtacaagggattgatttaaaccaaattcgaggacttgggtttgatgccacgtgttctctggttgttttggataagcagtttcacccattaccagtcaaccaggaaggggattcccatcgaaacgtcatcatgtggctggaccatcgagcagtcagtcaagttaacaggatcaatgagaccaagcacagtgtcctccagtacgtcgggggggtgatgtctgtggaaatgcaggccccgaaacttctgtggctgaaagagaacttgagagagatttgctgggataaggcgggacatttctttgatctcccggacttcttatcgtggaaggcaacaggtgtcacagcacggtctctctgctccctggtgtgtaagtggacatattcagcagagaaaggctgggacgacagtttctggaaaatgattggtttggaagactttgttgcagataattacagcaaaataggaaaccaagtgctacctcctggagcttctcttggaaatgggctcacaccagaggcagcaagagaccttggccttctccctgggattgcggtcgcagcttcactcattgatgcccatgcaggaggactaggagtgattggggcagatgtgagagggcacggcctcatctgtgaggggcagccagtgacgtcacggctggctgtcatctgtggaacgtcttcttgtcacatggggatcagcaaagacccgatttttgtaccaggcgtctgggggccttatttctcagccatggtacctgggttctggctgaatgaaggtggtcagagcgttactggaaaattgatagaccacatggtacaaggccatgctgcttttccagaactacaagtaaaggccacagccagatgccagagtatatatgcatatttgaacagtcacctggatctgattaagaaggctcagcctgtgggtttccttactgttgatttacatgtttggccagatttccatggcaaccggtctcccttagcagatctgacactaaagggcatgagaaccactggatatctgtatattccggctttggcagcgttgcactctcccagttctctactctcccctcaggtcaccggattgaaactgtctcaggaccttgatgatcttgccattctctacctggccacagttcaagccattgctttggggactcgcttcattatagaagccatggaggcagcagggcactcaatcagtactcttttcctatgtggaggcctcagcaagaatcccctttttgtgcaaatgcatgcggacattactggcatgcctgtggtcctgtcgcaagaggtggagtccgttcttgtgggtgctgctgttctgggtgcctgtgcctcaggggatttcgcttctgtacaggaagcaatggcaaaaatgagcaaagttgggaaagttgtgttcccgagactacaggataaaaaatactatgataagaaataccaagtattcctgaagctggttgaacaccagaaggagtatttggcgatcatgaatgatgactgaacagggcttgcaggtgctgatgccagaagcttctgtgccattgcattaaagacttgtcatttgatccatgttcaagacccttgaggtattgtttcatcatttctgtattgtctttcaataaagaaaacaaacatgtgcaa

SEQ ID NO: 7499 - DNA, 1947 bp, Homo sapiens
  source 1..1947: mol_type = unassigned DNA
agaaagaggcttctccaacccggcccggcccttccttcccctttcccgcagtcgttgcctcctcctcccctgcctcctcctccccttcctcctcctggccgcttagtctcacacccgccgggccgttgttcccgagacgttgttgagtcccctgtgtcctcttctgggtggaggaactgcaatgtctggtggagaacagaaaccagagaggtactatgtgggtgtggacgttggaacaggcagtgtccgtgcagctctggtggaccagagtggggtcctgttggcttttgcagaccagccaattaagaattgggagccccagttcaaccaccatgagcagtcctccgaggacatctgggctgcgtgctgtgttgtcacaaaggggattcccatcgaaacgtcatcatgtggctggaccatcgagcagtcagtcaagttaacaggatcaatgagaccaagcacagtgtcctccagtacgtcgggggggtgatgtctgtggaaatgcaggccccgaaacttctgtggctgaaagagaacttgagagagatttgctgggataaggcgggacatttctttgatctcccggacttcttatcgtggaaggcaacaggtgtcacagcacggtctctctgctccctggtgtgtaagtggacatattcagcagagaaaggctgggacgacagtttctggaaaatgattggtttggaagactttgttgcagataattacagcaaaataggaaaccaagtgctacctcctggagcttctcttggaaatgggctcacaccagaggcagcaagagaccttggccttctccctgggattgcggtcgcagcttcactcattgatgcccatgcaggaggactaggagtgattggggcagatgtgagagggcacggcctcatctgtgaggggcagccagtgacgtcacggctggctgtcatctgtggaacgtcttcttgtcacatggggatcagcaaagacccgatttttgtaccaggcgtctgggggccttatttctcagccatggtacctgggttctggctgaatgaaggtggtcagagcgttactggaaaattgatagaccacatggtacaaggccatgctgcttttccagaactacaagtaaaggccacagccaggtaactgctgtctctgttccctctaaaattttccttgtgtgactgtattgagagaattcacgttgggcagttgggtgattttcagatcctacagacaatgaaaatgcctgttagtgcttgaaagatagtcacctggatgatccagaagatagatgtattaattctttaaatgaggtaagagaacttagagaacctagagataccccaagaatatacccagggactatagataagaaactctgatgtagaagaaggaccatggattctggagtcaaaacttcttagtttcacatcccagccatactccttaatagatacaggaccttgagctagttacttaacctctttatgcctgtctcttcatctgtaaaactgaagataataactgatatggagtgatttctagaatattttgaagcaagctgagtgcaaaaaaaatttacgatatactccctttcatgtaaaaagaaagacataggaaaatacatgtgtatctgttcatttttgcaaaagaaatataggaagtggccaggtgcggtggctcactcctgtaaccccagcaccttgggaggccgaggcgggcagatcacgagttcagagatcgagaccagcctggccaacatggtgaaaccccatctctactaaaaatacaaaagttagccgggcatggtgatgtatgcctataatcccagttacttgggaggttgaggcaggagaattgctcaaacccgggaggtggaggttgcagtgagcagagatcgtgccactgcactccagcctgggcaataaagtgagactccgtctc

SEQ ID NO: 7500 - DNA, 471 bp, Homo sapiens
  source 1..471: mol_type = unassigned DNA
aaagaggcttctccaacccggcccggcccttccttcccctttcccgcagtcgttgcctcctcctcccctgcctcctcctccccttcctcctcctggccgcttagtctcacacccgccgggccgttgttcccgagacgttgttgagtcccctgtgtcctcttctgggagctagataagggcctggttccacttctcagtattcagggaatggattccctgcttactcccttccttcctttggatgccacaaaatgagcacttgactgaaaatatgcttatacgcgtttttacagactacgccaagccacagcaaatccctgattgcagtataactaactaaataaattgcacaggacttgtgtacatcaactcccagcaaagtccaaagatcaaagttgaaagaggatactgaattccttcccagatttctgggacactgcttctgtgcactgtcaccaaataaatcctgga

SEQ ID NO: 7501 - DNA, 1976 bp, Homo sapiens
  source 1..1976: mol_type = unassigned DNA
ggcttctccaacccggcccggcccttccttcccctttcccgcagtcgttgcctcctcctcccctgcctcctcctccccttcctcctcctggccgcttagtctcacacccgccgggccgttgttcccgagacgttgttgagtcccctgtgtcctcttctgggtggaggaactgcaatgtctggtggagaacagaaaccagagaggtactatgtgggtgtggacgttggaacaggcagtgtccgtgcagctctggtggaccagagtggggtcctgttggcttttgcagaccagccaattaagaattgggagccccagttcaaccaccatgagcagtcctccgaggacatctgggctgcgtgctgtgttgtcacaaagaaagttgtacaagggattgatttaaaccaaattcgaggacttgggtttgatgccacgtgttctctggttgttttggataagcagtttcacccattaccagtcaaccaggaaggggattcccatcgaaacgtcatcatgtggctggaccatcgagcagtcagtcaagttaacaggatcaatgagaccaagcacagtgtcctccagtacgtcgggggggtgatgtctgtggaaatgcaggccccgaaacttctgtggctgaaagagaacttgagagagatttgctgggataaggcgggacatttctttgatctcccggacttcttatcgtggaaggcaacaggtgtcacagcacggtctctctgctccctggtgtgtaagtggacatattcagcagagaaaggctgggacgacagtttctggaaaatgattggtttggaagactttgttgcagataattacagcaaaataggaaaccaagtgctacctcctggagcttctcttggaaatgggctcacaccagaggcagcaagagaccttggccttctccctgggattgcggtcgcagcttcactcattgatgcccatgcaggaggactaggagtgattggggcagatgtgagagggcacggcctcatctgtgaggggcagccagtgacgtcacggctggctgtcatctgtggaacgtcttcttgtcacatggggatcagcaaagacccgatttttgtaccaggcgtctgggggccttatttctcagccatggtacctgggttctggctgaatgaaggtggtcagagcgttactggaaaattgatagaccacatggtacaaggccatgctgcttttccagaactacaagtaaaggccacagccagatgccagagtatatatgcatatttgaacagtcacctggatctgattaagaaggctcagcctgtgggtttccttactgttgatttacatgtttggccagatttccatggcaaccggtctcccttagcagatctgacactaaagggcatggtcaccggattgaaactgtctcaggaccttgatgatcttgccattctctacctggccacagttcaagccattgctttggggactcgcttcattatagaagccatggaggcagcagggcactcaatcagtactcttttcctatgtggaggcctcagcaagaatcccctttttgtgcaaatgcatgcggacattactggcatgcctgtggtcctgtcgcaagaggtggagtccgttcttgtgggtgctgctgttctgggtgcctgtgcctcaggggatttcgcttctgtacaggaagcaatggcaaaaatgagcaaagttgggaaagttgtgttcccgagactacaggataaaaaatactatgataagaaataccaagtattcctgaagctggttgaacaccagaaggagtatttggcgatcatgaatgatgactgaacagggcttgcaggtgctgatgccagaagcttctgtgccattgcattaaagacttgtcatttgatccatgttcaagacccttgaggtattgtttcatcatttctgtattgtctttcaataaagaaaacaaacatgtgcaaccagaa

SEQ ID NO: 7502 - DNA, 2485 bp, Homo sapiens
  source 1..2485: mol_type = unassigned DNA
cccttccttcccctttcccgcagtcgttgcctcctcctcccctgcctcctcctccccttcctcctcctggccgcttagtctcacacccgccgggccgttgttcccgagacgttgttgagtcccctgtgtcctcttctggactacgccaagccacaggtggaggaactgcaatgtctggtggagaacagaaaccagagaggtactatgtgggtgtggacgttggaacaggcagtgtccgtgcagctctggtggaccagagtggggtcctgttggcttttgcagaccagccaattaagaattgggagccccagttcaaccaccatgagcagtcctccgaggacatctgggctgcgtgctgtgttgtcacaaagaaagttgtacaagggattgatttaaaccaaattcgaggacttgggtttgatgccacgtgttctctggttgttttggataagcagtttcacccattaccagtcaaccaggaaggggattcccatcgaaacgtcatcatgtggctggaccatcgagcagtcagtcaagttaacaggatcaatgagaccaagcacagtgtcctccagtacgtcgggggggtgatgtctgtggaaatgcaggccccgaaacttctgtggctgaaagagaacttgagagagatttgctgggataaggcgggacatttctttgatctcccggacttcttatcgtggaaggcaacaggtgtcacagcacggtctctctgctccctggtgtgtaagtggacatattcagcagagaaaggctgggacgacagtttctggaaaatgattggtttggaagactttgttgcagataattacagcaaaataggaaaccaagtgctacctcctggagcttctcttggaaatgggctcacaccagaggcagcaagagaccttggccttctccctgggattgcggtcgcagcttcactcattgatgcccatgcaggaggactaggagtgattggggcagatgtgagagggcacggcctcatctgtgaggggcagccagtgacgtcacggctggctgtcatctgtggaacgtcttcttgtcacatggggatcagcaaagacccgatttttgtaccaggcgtctgggggccttatttctcagccatggtacctgggttctggctgaatgaaggtggtcagagcgttactggaaaattgatagaccacatggtacaaggccatgctgcttttccagaactacaagtaaaggccacagccagatgccagagtatatatgcatatttgaacagtcacctggatctgattaagaaggctcagcctgtgggtttccttactgttgatttacatgtttggccagatttccatggcaaccggtctcccttagcagatctgacactaaagggcatggtcaccggattgaaactgtctcaggaccttgatgatcttgccattctctacctggccacagttcaagccattgctttggggactcgcttcattatagaagccatggaggcagcagggcactcaatcagtactcttttcctatgtggaggcctcagcaagaatcccctttttgtgcaaatgcatgcggacattactggcatgcctgtggtcctgtcgcaagaggtggagtccgttcttgtgggtgctgctgttctgggtgcctgtgcctcaggggatttcgcttctgtacagtgggggaaatagatagctcagttgtggacgatagcagcaatgggaagcagtatttgagaagaaatcagactctcttcttccagtcttttgcaagacagctgtccccaaagggatgaatccattacctttcaccagagttgagttcgttttccatttcatctttctgcttaaagagaaagccctttaaaagcgcagcgcatacattgagtgcgtgtacttaatttttaatatgtgtgtgcccacagccaagagaacagagaaccttaaataataatgaaactgaattgtacatgtcgtatgttttatgtggcactgattcctaaatatgctcctagcagccaggtattatttaatacatccccattaatcaagctgccaaatctaaatgaaaaccatgtttaaatatgtttaataagattatagcttttggttgaatatcaaactaacatagctacatttttccttccagccagctctcatttactgtcttacatttttactctgaaagcttttgtactatcaaaccaatcttgattataaaacaaattataccacaaacttttagtatcgtgagcttcagctgagtccctcagtgtaaatgttaggagaaagaacagttctgagattttttttctggctaaaaaatgatatttttcttcttcttggggtgagcctttgagtttaaaaggaaattaaaaattcaattagagatactaaattgtttgtagcttctgtattaaatgatgtctgccttttgcatagttattgaaagtgtttcatattaaatgtactttttctttttg

SEQ ID NO: 7503 - DNA, 5360 bp, Homo sapiens
  source 1..5360: mol_type = unassigned DNA
acacccgccgggccgttgttcccgagacgttgttgagtcccctgtgtcctcttctgggagctagataagggcctggttccacttctcagtattcagggaatggattccctgcttactcccttccttcctttggatgccacaaaatgagcacttgactgaaaatatgcttatacgcgtttttacagactacgccaagccacagcaaatccctgattgcagtataactaactaaataaattgcacaggacttgtgtacatcaactcccagcaaagtccaaagatcaaagttgaaagaggatactgaattccttcccagatttctgggacactgcttctgtgcactgtcaccaaataaatcctggaggagtggcgccttaagaaataggagagggagtcaaaagtgaggaacccaagcctgagcacgtgggccagccccatggggaatctgtcttgtcatcggggctggctggagtagagacaagtctggatgctggctggccaggtggaggaactgcaatgtctggtggagaacagaaaccagagaggtactatgtgggtgtggacgttggaacaggcagtgtccgtgcagctctggtggaccagagtggggtcctgttggcttttgcagaccagccaattaagaattgggagccccagttcaaccaccatgagcagtcctccgaggacatctgggctgcgtgctgtgttgtcacaaagaaagttgtacaagggattgatttaaaccaaattcgaggacttgggtttgatgccacgtgttctctggttgttttggataagcagtttcacccattaccagtcaaccaggaaggggattcccatcgaaacgtcatcatgtggctggaccatcgagcagtcagtcaagttaacaggatcaatgagaccaagcacagtgtcctccagtacgtcgggggggtgatgtctgtggaaatgcaggccccgaaacttctgtggctgaaagagaacttgagagagatttgctgggataaggcgggacatttctttgatctcccggacttcttatcgtggaaggcaacaggtgtcacagcacggtctctctgctccctggtgtgtaagtggacatattcagcagagaaaggctgggacgacagtttctggaaaatgattggtttggaagactttgttgcagataattacagcaaaataggaaaccaagtgctacctcctggagcttctcttggaaatgggctcacaccagaggcagcaagagaccttggccttctccctgggattgcggtcgcagcttcactcattgatgcccatgcaggaggactaggagtgattggggcagatgtgagagggcacggcctcatctgtgaggggcagccagtgacgtcacggctggctgtcatctgtggaacgtcttcttgtcacatggggatcagcaaagacccgatttttgtaccaggcgtctgggggccttatttctcagccatggtacctgggttctggctgaatgaaggtggtcagagcgttactggaaaattgatagaccacatggtacaaggccatgctgcttttccagaactacaagtaaaggccacagccagatgccagagtatatatgcatatttgaacagtcacctggatctgattaagaaggctcagcctgtgggtttccttactgttgatttacatgtttggccagatttccatggcaaccggtctcccttagcagatctgacactaaagggcatggtcaccggattgaaactgtctcaggaccttgatgatcttgccattctctacctggccacagttcaagccattgctttggggactcgcttcattatagaagccatggaggcagcagggcactcaatcagtactcttttcctatgtggaggcctcagcaagaatcccctttttgtgcaaatgcatgcggacattactggcatgcctgtggtcctgtcgcaagaggtggagtccgttcttgtgggtgctgctgttctgggtgcctgtgcctcaggggatttcgcttctgtacagataaggaaaacgaagcacagagcaattaaataacttgcccaagatcgcccaagatcacccaagatgtccggctgaagttcttaaccattaccttacactaatcaacagcaacaataataataaccacctttctaggatgcaaattatgttccaagaactttcattatttcattacatctgcatagccccaagagtaaataatatcctgttctattgaagaagaaactgaggtcccaagacatgaaattacttgctcaaggtcacacactgccctcaactctgtgatgtcaaaattcccttctccataggtaacagatcctatctggctacttttcattattaaggagaatggagatgtctcggattttttgtgcacaaattgtcctcagaaccaaacaaaataaccagcataggagagaattcacaaagtaagagactcataaagtaaaatgttttgctttactttttgcctttttcatcctgctttgtttttcaacatgtgtaaatcattctgttactataaacttaataaagaagtaaaagagcaaagaccaaaaatgtaataatgaaataaagtttttatcagttataattttttggcatgatcaggttatctttggtgtacacttcagggttttgtatttcaaacacaactcttcttaaaacttttcatgtgtcccagatgtgacctagtttccttctgggaaatgaatgctgagtgttgtacagacaagtcaaacagacatagctattttaggagtcattaatgtagtgcttatagaaaccaaatatgtaaacccacctggccaggaaaacctttattgagtatatactttgtgctgagtgatattccaggctccagaaatgaaaatacaaagggcaaggcccaatcttgaagagctcatgaactagtaaaagagaacaacaaacatgttacaaggcaaaaacaaattacaaatgtaaataataaagccaaagcataatatgtacaataatggaagcctgaaaaaggtaaagaagtattacataaaatggagccatttgttctgtcttaggagagctcaaaaaagccttcacagaaaaggtagaatccaagcaaattcaaaagtttaaagtccagtttggaaattttctttcaattaagtcatgacgtgtttatggacaaatatccacttgaatcaataagaaaaggaaaatgactagcataatgctgcacataaaataagaattaaaatgtttctgctctcttcgtgtatttttaaaattaaggtaaaattcagataacataaaatccacccttttagtcattttaaagtgtacaattttttagtacattttaaagtgtacaattcagtggtgtttagtacactcacaatgttttgcaaccattaccactacctaattctagaatatctttatcatccaaaaagaaaccctgtgcccattgagtagtcactggcctttccatttaccccaactcctccagcacgcgacaaccactaatttgctttctgtctctatgcctcttctggacactttatataaatacaaccatacaatatgtaggcatttgtgtctggcttctttcagttagcataatatttttgaggttcttccttgttatagcatgaatcagtactttattccttttcatagatgaataacatcccattgtatgtatatgccacatcttgttaatctgtttatcaattggaggacagtgggttgtttctacattttagctattgagaatagggctgcctccatatttgtgtacaagatttgtctgaactcttcttttcaattatcttaactatatacctaatgatatggtttgcctgtgtccccacccaaacctcatcttgaattgtagctcctataatccccatgtgttgtgggagggacctggtggcaggtaattgaatcccggtgtctggtttttcctgttctgttcttgtgacagtgaataagtctcatgaggtctgatggttttataatgggcagttctgcaaatgctgtctttcctgccaccatgtaagacgtgcctttgctcctccttcaccttccgccatgattgtgaggtcttcccagccatgggaactgtgagtccattaaacctctttttatttataaattacccagtcttgggtatttcttcatagcagcatgagaacaaatgaatacacctaggagtagcattgttgggtcttatgataacactaggtttaacttttcgaggaaccaccaaactattttttttcacgttggctgcaccattttacattcccaccagccatatatgaacgttccaatttctccacacctcaccaatattcatcacattctgttttgttttgttttgtattgttttgttttgtttactttttcccatcctagcgagtgtgaagtatctcattgtggttttcctttgtatttccctaatgactgatgatgctgactatctttttatgtgcttactggccatctgtatattttccttagagaaatgactattcagatcccttgcccatttttgaattaggttgtcttttgttatcgaattgtaagagttctgtataaattctggatataagtctcatcagatctataataggcaaatattttctcccattctgtaagttgtctatttttttgataaatcacccactccagtgacatagccaccatgtgctcacacacgcctcatcaggggcccaagcaccagcccattccagggtccactgccagtgaccctgttcattccagcagctgagtcactacacacctcacccagaggccagaggactggcccacccaaggcctgccactggtggcaacctcacccactccagtggccaagccactgaacatctgtgcaacacccaagacctaaggactggccgactcagagtctgacacctctggaaacctcacccactcagaaacagagctaccaaaggcctatagccctctcaggggccacagatctggcccactgggggcccactacactttgcaaagctgcaccatagcctccacaaactcttgcagcctaggccgctgaggcacttgcagacactgctaacattgaatacaccaaacagaatcacacagagactacactattgcacccacctggacccaaagccaaaacactacccaaccaacactaaaggacaaatctacaggaaaaattatttctttatgaaagttgctcaataaaatgagacaagacaactgctacaccagatgtgcagatatcaacataaggacacaagatgtatgcaaaagcaaggaaacctgacacctccaaaggaacataataattttcc

SEQ ID NO: 7504 - DNA, 1738 bp, Homo sapiens
  source 1..1738: mol_type = unassigned DNA
gtaaacataagaatgggccaaagacttcaacccatctgtgacttggcattgtctctgaggggggaaattttgcatgatcgcatggagaatggattttgttgctttatctgatattgtcctcagctcctcctgaatttgccgagatcttacagcagtcagtaaggtctctctgctccctggtgtgtaagtggacatattcagcagagaaaggctgggacgacagtttctggaaaatgattggtttggaagactttgttgcagataattacagcaaaataggaaaccaagtgctacctcctggagcttctcttggaaatgggctcacaccagaggcagcaagagaccttggccttctccctgggattgcggtcgcagcttcactcattgatgcccatgcaggaggactaggagtgattggggcagatgtgagagggcacggcctcatctgtgaggggcagccagtgacgtcacggctggctgtcatctgtggaacgtcttcttgtcacatggggatcagcaaagacccgatttttgtaccaggcgtctgggggccttatttctcagccatggtacctgggttctggctgaatgaaggtggtcagagcgttactggaaaattgatagaccacatggtacaaggccatgctgcttttccagaactacaagtaaaggccacagccaggtcaccggattgaaactgtctcaggaccttgatgatcttgccattctctacctggccacagttcaagccattgctttggggactcgcttcattatagaagccatggaggcagcagggcactcaatcagtactcttttcctatgtggaggcctcagcaagaatcccctttttgtgcaaatgcatgcggacattactggcatgcctgtggtcctgtcgcaagaggtggagtccgttcttgtgggtgctgctgttctgggtgcctgtgcctcaggggatttcgcttctgtacaggaagcaatggcaaaaatgagcaaagttgggaaagttgtgttcccgagactacaggataaaaaatactatgataagaaataccaagtattcctgaagctggttgaacaccagaaggagtatttggcgatcatgaatgatgactgaacagggcttgcaggtgctgatgccagaagcttctgtgccattgcattaaagacttgtcatttgatccatgttcaagacccttgagataaggaaaacgaagcacagagcaattaaataacttgcccaagatcgcccaagatcacccaagatgtccggctgaagttcttaaccattaccttacactaatcaacagcaacaataataataaccacctttctaggatgcaaattatgttccaagaactttcattatttcattacatctgcatagccccaagagtaaataatatcctgttctattgaagaagaaactgaggtcccaagacatgaaattacttgctcaaggtcacacactgccctcaactctgtgatgtcaaaattcccttctccataggtaacagatcctatctggctacttttcattattaaggagaatggagatgtctcggattttttgtgcacaaattgtcctcagaaccaaacaaaataaccagcataggagagaattcacaaagtaagagactcataaagtaaaatgttttgctttactttttgcctttttcatcctgctttgtttttcaacatgtgtaaatcattctgttactataaacttaataaagaa

SEQ ID NO: 7505 - DNA, 2455 bp, Homo sapiens
  source 1..2455: mol_type = unassigned DNA
gtctctgaggggggaaattttgcatgatcgcatggagaatggattttgttgctttatctgatattgtcctcagctcctcctgaatttgccgagatcttacagcagtcagtaaggtggaggaactgcaatgtctggtggagaacagaaaccagagaggtactatgtgggtgtggacgttggaacaggcagtgtccgtgcagctctggtggaccagagtggggtcctgttggcttttgcagaccagccaattaagaattgggagccccagttcaaccaccatgagcagtcctccgaggacatctgggctgcgtgctgtgttgtcacaaagaaagttgtacaagggattgatttaaaccaaattcgaggacttgggtttgatgccacgtgttctctggttgttttggataagcagtttcacccattaccagtcaaccaggaagaacttgagagagatttgctgggataaggcgggacatttctttgatctcccggacttcttatcgtggaaggcaacaggtgtcacagcacggtctctctgctccctggtgtgtaagtggacatattcagcagagaaaggctgggacgacagtttctggaaaatgattggtttggaagactttgttgcagataattacagcaaaatagattcgcagaaggactgttttcagctgctggcccttccaggaatagccctaaagagccagaagggcaaaggagtaacattgaccacatcatggtgatacaaggaaaccaagtgctacctcctggagcttctcttggaaatgggctcacaccagaggcagcaagagaccttggccttctccctgggattgcggtcgcagcttcactcattgatgcccatgcaggaggactaggagtgattggggcagatgtgagagggcacggcctcatctgtgaggggcagccagtgacgtcacggctggctgtcatctgtggaacgtcttcttgtcacatggggatcagcaaagacccgatttttgtaccaggcgtctgggggccttatttctcagccatggtacctgggttctggctgaatgaaggtggtcagagcgttactggaaaattgatagaccacatggtacaaggccatgctgcttttccagaactacaagtaaaggccacagccagatgccagagtatatatgcatatttgaacagtcacctggatctgattaagaaggctcagcctgtgggtttccttactgttgatttacatgtttggccagatttccatggcaaccggtctcccttagcagatctgacactaaagggcatgagaaccactggatatctgtatattccggctttggcagcgttgcactctcccagttctctactctcccctcaggtcaccggattgaaactgtctcaggaccttgatgatcttgccattctctacctggccacagttcaagccattgctttggggactcgcttcattatagaagccatggaggcagcagggcactcaatcagtactcttttcctatgtggaggcctcagcaagaatcccctttttgtgcaaatgcatgcggacattactggcatgcctgtggtcctgtcgcaagaggtggagtccgttcttgtgggtgctgctgttctgggtgcctgtgcctcaggggatttcgcttctgtacaggaagcaatggcaaaaatgagcaaagttgggaaagttgtgttcccgagactacaggataaaaaatactatgataagaaataccaagtattcctgaagctggttgaacaccagaaggagtatttggcgatcatgaatgatgactgaacagggcttgcaggtgctgatgccagaagcttctgtgccattgcattaaagacttgtcatttgatccatgttcaagacccttgagataaggaaaacgaagcacagagcaattaaataacttgcccaagatcgcccaagatcacccaagatgtccggctgaagttcttaaccattaccttacactaatcaacagcaacaataataataaccacctttctaggatgcaaattatgttccaagaactttcattatttcattacatctgcatagccccaagagtaaataatatcctgttctattgaagaagaaactgaggtcccaagacatgaaattacttgctcaaggtcacacactgccctcaactctgtgatgtcaaaattcccttctccataggtaacagatcctatctggctacttttcattattaaggagaatggagatgtctcggattttttgtgcacaaattgtcctcagaaccaaacaaaataaccagcataggagagaattcacaaagtaagagactcataaagtaaaatgttttgctttactttttgcctttttcatcctgctttgtttttcaacatgtgtaaatcattctgttactataaacttaataaagaagtaaaagagcaaagaccaaaaatgtaataa

SEQ ID NO: 7506 - DNA, 2172 bp, Homo sapiens
  source 1..2172: mol_type = unassigned DNA
gaggggggaaattttgcatgatcgcatggagaatggattttgttgctttatctgatattgtcctcagctcctcctgaatttgccgagatcttacagcagtcagtaaggtggaggaactgcaatgtctggtggagaacagaaaccagagaggtactatgtgggtgtggacgttggaacaggcagtgtccgtgcagctctggtggaccagagtggggtcctgttggcttttgcagaccagccaattaagaattgggagccccagttcaaccaccatgagcagtcctccgaggacatctgggctgcgtgctgtgttgtcacaaagaacttgagagagatttgctgggataaggcgggacatttctttgatctcccggacttcttatcgtggaaggcaacaggtgtcacagcacggtctctctgctccctggtgtgtaagtggacatattcagcagagaaaggctgggacgacagtttctggaaaatgattggtttggaagactttgttgcagataattacagcaaaataggaaaccaagtgctacctcctggagcttctcttggaaatgggctcacaccagaggcagcaagagaccttggccttctccctgggattgcggtcgcagcttcactcattgatgcccatgcaggaggactaggagtgattggggcagatgtgagagggcacggcctcatctgtgaggggcagccagtgacgtcacggctggctgtcatctgtggaacgtcttcttgtcacatggggatcagcaaagacccgatttttgtaccaggcgtctgggggccttatttctcagccatggtacctgggttctggctgaatgaaggtggtcagagcgttactggaaaattgatagaccacatggtacaaggccatgctgcttttccagaactacaagtaaaggccacagccagatgccagagtatatatgcatatttgaacagtcacctggatctgattaagaaggctcagcctgtgggtttccttactgttgatttacatgtttggccagatttccatggcaaccggtctcccttagcagatctgacactaaagggcatggtcaccggattgaaactgtctcaggaccttgatgatcttgccattctctacctggccacagttcaagccattgctttggggactcgcttcattatagaagccatggaggcagcagggcactcaatcagtactcttttcctatgtggaggcctcagcaagaatcccctttttgtgcaaatgcatgcggacattactggcatgcctgtggtcctgtcgcaagaggtggagtccgttcttgtgggtgctgctgttctgggtgcctgtgcctcaggggatttcgcttctgtacaggaagcaatggcaaaaatgagcaaagttgggaaagttgtgttcccgagactacaggataaaaaatactatgataagaaataccaagtattcctgaagctggttgaacaccagaaggagtatttggcgatcatgaatgatgactgaacagggcttgcaggtgctgatgccagaagcttctgtgccattgcattaaagacttgtcatttgatccatgttcaagacccttgagataaggaaaacgaagcacagagcaattaaataacttgcccaagatcgcccaagatcacccaagatgtccggctgaagttcttaaccattaccttacactaatcaacagcaacaataataataaccacctttctaggatgcaaattatgttccaagaactttcattatttcattacatctgcatagccccaagagtaaataatatcctgttctattgaagaagaaactgaggtcccaagacatgaaattacttgctcaaggtcacacactgccctcaactctgtgatgtcaaaattcccttctccataggtaacagatcctatctggctacttttcattattaaggagaatggagatgtctcggattttttgtgcacaaattgtcctcagaaccaaacaaaataaccagcataggagagaattcacaaagtaagagactcataaagtaaaatgttttgctttactttttgcctttttcatcctgctttgtttttcaacatgtgtaaatcattctgttactataaacttaataaagaagtaaaagagcaaagaccaaaaatgtaataatgaaataa

SEQ ID NO: 7507 - DNA, 4653 bp, Homo sapiens
  source 1..4653: mol_type = unassigned DNA
gaggggggaaattttgcatgatcgcatggagaatggattttgttgctttatctgatattgtcctcagctcctcctgaatttgccgagatcttacagcagtcagtaaggtggaggaactgcaatgtctggtggagaacagaaaccagagaggtactatgtgggtgtggacgttggaacaggcagtgtccgtgcagctctggtggaccagagtggggtcctgttggcttttgcagaccagccaattaagaattgggagccccagttcaaccaccatgagcagtcctccgaggacatctgggctgcgtgctgtgttgtcacaaagaaagttgtacaagggattgatttaaaccaaattcgaggacttgggtttgatgccacgtgttctctggttgttttggataagcagtttcacccattaccagtcaaccaggaaggtctctctgctccctggtgtgtaagtggacatattcagcagagaaaggctgggacgacagtttctggaaaatgattggtttggaagactttgttgcagataattacagcaaaataggaaaccaagtgctacctcctggagcttctcttggaaatgggctcacaccagaggcagcaagagaccttggccttctccctgggattgcggtcgcagcttcactcattgatgcccatgcaggaggactagatcagcaaagacccgatttttgtaccaggcgtctgggggccttatttctcagccatggtacctgggttctggctgaatgaaggtggtcagagcgttactggaaaattgatagaccacatggtacaaggccatgctgcttttccagaactacaagtaaaggccacagccaggtcaccggattgaaactgtctcaggaccttgatgatcttgccattctctacctggccacagttcaagccattgctttggggactcgcttcattatagaagccatggaggcagcagggcactcaatcagtactcttttcctatgtggaggcctcagcaagaatcccctttttgtgcaaatgcatgcggacattactggcatgcctgtggtcctgtcgcaagaggtggagtccgttcttgtgggtgctgctgttctgggtgcctgtgcctcaggggatttcgcttctgtacagataaggaaaacgaagcacagagcaattaaataacttgcccaagatcgcccaagatcacccaagatgtccggctgaagttcttaaccattaccttacactaatcaacagcaacaataataataaccacctttctaggatgcaaattatgttccaagaactttcattatttcattacatctgcatagccccaagagtaaataatatcctgttctattgaagaagaaactgaggtcccaagacatgaaattacttgctcaaggtcacacactgccctcaactctgtgatgtcaaaattcccttctccataggtaacagatcctatctggctacttttcattattaaggagaatggagatgtctcggattttttgtgcacaaattgtcctcagaaccaaacaaaataaccagcataggagagaattcacaaagtaagagactcataaagtaaaatgttttgctttactttttgcctttttcatcctgctttgtttttcaacatgtgtaaatcattctgttactataaacttaataaagaagtaaaagagcaaagaccaaaaatgtaataatgaaataaagtttttatcagttataattttttggcatgatcaggttatctttggtgtacacttcagggttttgtatttcaaacacaactcttcttaaaacttttcatgtgtcccagatgtgacctagtttccttctgggaaatgaatgctgagtgttgtacagacaagtcaaacagacatagctattttaggagtcattaatgtagtgcttatagaaaccaaatatgtaaacccacctggccaggaaaacctttattgagtatatactttgtgctgagtgatattccaggctccagaaatgaaaatacaaagggcaaggcccaatcttgaagagctcatgaactagtaaaagagaacaacaaacatgttacaaggcaaaaacaaattacaaatgtaaataataaagccaaagcataatatgtacaataatggaagcctgaaaaaggtaaagaagtattacataaaatggagccatttgttctgtcttaggagagctcaaaaaagccttcacagaaaaggtagaatccaagcaaattcaaaagtttaaagtccagtttggaaattttctttcaattaagtcatgacgtgtttatggacaaatatccacttgaatcaataagaaaaggaaaatgactagcataatgctgcacataaaataagaattaaaatgtttctgctctcttcgtgtatttttaaaattaaggtaaaattcagataacataaaatccacccttttagtcattttaaagtgtacaattttttagtacattttaaagtgtacaattcagtggtgtttagtacactcacaatgttttgcaaccattaccactacctaattctagaatatctttatcatccaaaaagaaaccctgtgcccattgagtagtcactggcctttccatttaccccaactcctccagcacgcgacaaccactaatttgctttctgtctctatgcctcttctggacactttatataaatacaaccatacaatatgtaggcatttgtgtctggcttctttcagttagcataatatttttgaggttcttccttgttatagcatgaatcagtactttattccttttcatagatgaataacatcccattgtatgtatatgccacatcttgttaatctgtttatcaattggaggacagtgggttgtttctacattttagctattgagaatagggctgcctccatatttgtgtacaagatttgtctgaactcttcttttcaattatcttaactatatacctaatgatatggtttgcctgtgtccccacccaaacctcatcttgaattgtagctcctataatccccatgtgttgtgggagggacctggtggcaggtaattgaatcccggtgtctggtttttcctgttctgttcttgtgacagtgaataagtctcatgaggtctgatggttttataatgggcagttctgcaaatgctgtctttcctgccaccatgtaagacgtgcctttgctcctccttcaccttccgccatgattgtgaggtcttcccagccatgggaactgtgagtccattaaacctctttttatttataaattacccagtcttgggtatttcttcatagcagcatgagaacaaatgaatacacctaggagtagcattgttgggtcttatgataacactaggtttaacttttcgaggaaccaccaaactattttttttcacgttggctgcaccattttacattcccaccagccatatatgaacgttccaatttctccacacctcaccaatattcatcacattctgttttgttttgttttgtattgttttgttttgtttactttttcccatcctagcgagtgtgaagtatctcattgtggttttcctttgtatttccctaatgactgatgatgctgactatctttttatgtgcttactggccatctgtatattttccttagagaaatgactattcagatcccttgcccatttttgaattaggttgtcttttgttatcgaattgtaagagttctgtataaattctggatataagtctcatcagatctataataggcaaatattttctcccattctgtaagttgtctatttttttgataaatcacccactccagtgacatagccaccatgtgctcacacacgcctcatcaggggcccaagcaccagcccattccagggtccactgccagtgaccctgttcattccagcagctgagtcactacacacctcacccagaggccagaggactggcccacccaaggcctgccactggtggcaacctcacccactccagtggccaagccactgaacatctgtgcaacacccaagacctaaggactggccgactcagagtctgacacctctggaaacctcacccactcagaaacagagctaccaaaggcctatagccctctcaggggccacagatctggcccactgggggcccactacactttgcaaagctgcaccatagcctccacaaactcttgcagcctaggccgctgaggcacttgcagacactgctaacattgaatacaccaaacagaatcacacagagactacactattgcacccacctggacccaaagccaaaacactacccaaccaacactaaaggacaaatctacaggaaaaattatttctttatgaaagttgctcaataaaatgagacaagacaactgctacaccagatgtgcagatatcaacataaggacacaagatgtatgcaaaagcaaggaaacctgacacctccaaaggaacataataattttccagtagcagactccaaaaaagaaaatctatgaaatgcctaaaaatgaactcaaaataattatcttaaaaaaactcagtgagatataagagaatacaaatagaccattcaatgaattcgggaaaacaattatcatcagaataagaaattcaacagagataggtactataaaatggaaccaaac

SEQ ID NO: 7508 - DNA, 1640 bp, Homo sapiens
  source 1..1640: mol_type = unassigned DNA
atgatcgcatggagaatggattttgttgctttatctgatattgtcctcagctcctcctgaatttgccgagatcttacagcagtcagtaaggtggaggaactgcaatgtctggtggagaacagaaaccagagaggtactatgtgggtgtggacgttggaacaggcagtgtccgtgcagctctggtggaccagagtggggtcctgttggcttttgcagaccagccaattaagaattgggagccccagttcaaccaccatgagcagtcctccgaggacatctgggctgcgtgctgtgttgtcacaaagaacttgagagagatttgctgggataaggcgggacatttctttgatctcccggacttcttatcgtggaaggcaacaggtgtcacagcacggtctctctgctccctggtgtgtaagtggacatattcagcagagaaaggctgggacgacagtttctggaaaatgattggtttggaagactttgttgcagataattacagcaaaataggaaaccaagtgctacctcctggagcttctcttggaaatgggctcacaccagaggcagcaagagaccttggccttctccctgggattgcggtcgcagcttcactcattgatgcccatgcaggaggactaggagtgattggggcagatgtgagagggcacggcctcatctgtgaggggcagccagtgacgtcacggctggctgtcatctgtggaacgtcttcttgtcacatggggatcagcaaagacccgatttttgtaccaggcgtctgggggccttatttctcagccatggtacctgggttctggctgaatgaaggtggtcagagcgttactggaaaattgatagaccacatggtacaaggccatgctgcttttccagaactacaagtaaaggccacagccagatgccagagtatatatgcatatttgaacagtcacctggatctgattaagaaggctcagcctgtgggtttccttactgttgatttacatgtttggccagatttccatggcaaccggtctcccttagcagatctgacactaaagggcatggtcaccggattgaaactgtctcaggaccttgatgatcttgccattctctacctggccacagttcaagccattgctttggggactcgcttcattatagaagccatggaggcagcagggcactcaatcagtactcttttcctatgtggaggcctcagcaagaatcccctttttgtgcaaatgcatgcggacattactggcatgcctgtggtcctgtcgcaagaggtggagtccgttcttgtgggtgctgctgttctgggtgcctgtgcctcaggggatttcgcttctgtacaggaagcaatggcaaaaatgagcaaagttgggaaagttgtgttcccgagactacaggataaaaaatactatgataagaaataccaagtattcctgaagctggttgaacaccagaaggagtatttggcgatcatgaatgatgactgaacagggcttgcaggtgctgatgccagaagcttctgtgccattgcattaaagacttgtcatttgatccatgttcaagacccttgaggtattgtttcatcatttctgtattgtctttcaataaagaaaacaaacatgtgcaaccag

SEQ ID NO: 7509 - DNA, 580 bp, Homo sapiens
  source 1..580: mol_type = unassigned DNA
gtttctaaagaggtgtttggacctttaattaacattgacagcctgtctgcttaggattttgctctgctgtctccatggaaaagtcaggtctctctgctccctggtgtgtaagtggacatattcagcagagaaaggctgggacgacagtttctggaaaatgattggtttggaagactttgttgcagataattacagcaaaataggaaaccaagtgctacctcctggagcttctcttggaaatgggctcacaccagaggcagcaagagaccttggccttctccctgggattgcggtcgcagcttcactcattgatgcccatgcaggaggactaggagtgattggggcagatgtgagagggcacggcctcatctgtgaggggcagccagtgacgtcacggctggctgtcatctgtggaacgtcttcttgtcacatggggatcagcaaagacccgatttttgtaccaggcgtctgggggccttatttctcagccatggtacctgggttctggctgaatgaaggtggtcagagcgttactggaaaattgatagaccacatggtacaaggccatgctgcttttcca

SEQ ID NO: 7510 - DNA, 603 bp, Homo sapiens
  source 1..603: mol_type = unassigned DNA
caagtgctacctcctggagcttctcttggaaatgggctcacaccagaggcagcaagagaccttggccttctccctgggattgcggtcgcagcttcactcattgatgcccatgcaggaggactaggagtgattggggcagatgtgagagggcacggcctcatctgtgaggggcagccagtgacgtcacggctggctgtcatctgtggaacgtcttcttgtcacatggggatcagcaaagacccgatttttgtaccaggcgtctgggggccttatttctcagccatggtacctgggttctggctgaatgaaggtggtcagagcgttactggaaaattgatagaccacatggtacaaggccatgctgcttttccagaactacaagtaaaggccacagccaggtcaccggattgaaactgtctcaggaccttgatgatcttgccattctctacctggccacagttcaagccattgctgtaagatactgtaatgccatttttaaagagacttagagccatcagtatactctaggccactggctccccaagatacagcacatgcttttgtgacagagattcttaattaaaagattgtttgcaaaaaaga

SEQ ID NO: 7511 - DNA, 1041 bp, Homo sapiens
  source 1..1041: mol_type = unassigned DNA
aaagcaaaatctgagcaggcttccgaggtttcctatgcaggagtgattggggcagatgtgagagggcacggcctcatctgtgaggggcagccagtgacgtcacggctggctgtcatctgtggaacgtcttcttgtcacatggggatcagcaaagacccgatttttgtaccaggcgtctgggggccttatttctcagccatggtacctgggttctggctgaatgaaggtggtcagagcgttactggaaaattgatagaccacatggtacaaggccatgctgcttttccagaactacaagtaaaggccacagccagatgccagagtatatatgcatatttgaacagtcacctggatctgattaagaaggctcagcctgtgggtttccttactgttgatttacatgtttggccagatttccatggcaaccggtctcccttagcagatctgacactaaagggcatggtcaccggattgaaactgtctcaggaccttgatgatcttgccattctctacctggccacagttcaagccattgctttggggactcgcttcattatagaagccatggaggcagcagggcactcaatcagtactcttttcctatgtggaggcctcagcaagaatcccctttttgtgcaaatgcatgcggacattactggcatgcctgtggtcctgtcgcaagaggtggagtccgttcttgtgggtgctgctgttctgggtgcctgtgcctcaggggatttcgcttctgtacaggaagcaatggcaaaaatgagcaaagttgggaaagttgtgttcccgagactacaggataaaaaatactatgataagaaataccaagtattcctgaagctggttgaacaccagaaggagtatttggcgatcatgaatgatgactgaacagggcttgcaggtgctgatgccagaagcttctgtgccattgcattaaagacttgtcatttgatccatgttcaagacccttgaggtattgtttcatcatttctgtattgtctttcaataaagaaaacaaacatgtgcaaccag

SEQ ID NO: 7512 - DNA, 669 bp, Homo sapiens
  source 1..669: mol_type = unassigned DNA
gcttttccagaactacaagtaaaggccacagccagatgccagagtatatatgcatatttgaacagtcacctggatctgattaagaaggctcagcctgtgggtttccttactgttgatttacatgtttggccagatttccatggcaaccggtctcccttagcagatctgacactaaagggcatggtcaccggattgaaactgtctcaggaccttgatgatcttgccattctctacctggccacagttcaagccattgctttggggactcgcttcattatagaagccatggaggcagcagggcactcaatcagtactcttttcctatgtggaggcctcagcaagaatcccctttttgtgcaaatgcatgcggacattactggaagcaatggcaaaaatgagcaaagttgggaaagttgtgttcccgagactacaggataaaaaatactatgataagaaataccaagtattcctgaagctggttgaacaccagaaggagtatttggcgatcatgaatgatgactgaacagggcttgcaggtgctgatgccagaagcttctgtgccattgcattaaagacttgtcatttgatccatgttcaagacccttgaggtattgtttcatcatttctgtattgtctttcaataaagaaaacaaacatgtgcaaccagaa

SEQ ID NO: 7513 - DNA, 756 bp, Homo sapiens
  source 1..756: mol_type = unassigned DNA
atgccagagtatatatgcatatttgaacagtcacctggatctgattaagaaggctcagcctgtgggtttccttactgttgatttacatgtttggccagatttccatggcaaccggtctcccttagcagatctgacactaaagggcatggtcaccggattgaaactgtctcaggaccttgatgatcttgccattctctacctggccacagttcaagccattgctttggggactcgcttcattatagaagccatggaggcagcagggcactcaatcagtactcttttcctatgtggaggcctcagcaagaatcccctttttgtgcaaatgcatgcggacattactggcatgcctgtggtcctgtcgcaagaggtggagtccgttcttgtgggtgctgctgttctgggtgcctgtgcctcaggggatttcgcttctgtacagagtgatccaagaacaggacctgttactttccatccattgtcatttcatagaccccttgaagcaacccagtggttggtagcagcaatctttgtgcagatgaggactctgaagctcagaaatgttgtataacttgtttaatacaaagcccacgctctttgtattccatcagaccatatcctgtagatacatatacattgctagggaagtacactatggcaactgagacacctctcacaaggtggtatcgtttataaaaaatagcattatgtatttgtcatcattgcttggttgagtgtccaacacagaaataaaaataa

SEQ ID NO: 7514 - DNA, 623 bp, Homo sapiens
  source 1..623: mol_type = unassigned DNA
gtcaccggattgaaactgtctcaggaccttgatgatcttgccattctctacctggccacagttcaagccattgctgaagcaatggcaaaaatgagcaaagttgggaaagttgtgttcccgagactacaggataaaaaactatttcctgtatgatatcctatgggaagccagaggtgttgtaatccagaaacacccattgttcaccaggactgcaggacacatgctttcagaattcaagggcatagttacaaataattaccatcaagaatttaaaatgaaggacatcgttgctaaacaagaaactaatgactgagtggagctgtgtaatgtaattatacttaagatgggacttctgacgaattacagaagaatctttgtgctgtctcatgtctccataaatacacttaactgctattgacagtaatagaagggagtcttgaatatgaaaagctttttttatccttttatgatttctagagggaaaacttaaaagaacaattatgtttttaaaaaagatgtttctcccagtacttctgaatatttgacaatcctataaaatttgtaaaactaaagtaactttaaaagcaaagacttctgctaataaatcccgacttctcagttta

SEQ ID NO: 7515 - DNA, 333 bp, Homo sapiens
  source 1..333: mol_type = unassigned DNA
gaatagcagggcacagtccgattcatctcagtattccctcggccagcagagcgcttaataaacatcagtggatctgaacttgaatcaaatggcaggtagcagcttgcagaagcctgaaaaacctgggcactgaggcatgcctgtggtcctgtcgcaagaggtggagtccgttcttgtgggtgctgctgttctgggtgcctgtgcctcaggggatttcgcttctgtacaggaagcaatggcaaaaatgagcaaagttgggaaagttgtgttcccgagactacaggataaaaaatactatgataagaaataccaagtattcctgaagctggttga

SEQ ID NO: 7516 - DNA, 492 bp, Homo sapiens
  source 1..492: mol_type = unassigned DNA
agtattccctcggccagcagagcgcttaataaacatcagtggatctgaacttgaatcaaatggcaggtagcagcttgcagaagcctgaaaaacctgggcactgaggtctcgcatgcctgtggtcctgtcgcaagaggtggagtccgttcttgtgggtgctgctgttctgggtgcctgtgcctcaggggatttcgcttctgtacaggaagcaatggcaaaaatgagcaaagttgggaaagttgtgttcccgagactacaggataaaaaatactatgataagaaataccaagtattcctgaagctggttgaacaccagaaggagtatttggcgatcatgaatgatgactgaacagggcttgcaggtgctgatgccagaagcttctgtgccattgcattaaagacttgtcatttgatccatgttcaagacccttgaggtattgtttcatcatttctgtattgtctttcaataaagaaaacaaacatgtgcaacca

SEQ ID NO: 7517 - DNA, 676 bp, Homo sapiens
  source 1..676: mol_type = unassigned DNA
tgtggagaaaggagggaagaattccctgatgtctgccgtttatgtgcacatctgttgcagtgggaaggaaaataacatttatggagtaccttctataatagaagtttcctggatcccacccatgagggcgatcctggaatgttgtctcaagtgtggggccaaagcacagccaggaggagcattccctgagggcagtttgaagattcagagctggcaatagaaggcaaggtcctccctaaagcacagcagagcacaactcaaggaagagacgaaaaggacaaaataagaatgagtggcacggttgatgatggggattgctgagaccatctcaacaataccccggcttgctctaagggaatcaggacttcgtctttgaaggaaactgttctggggaagcaatggcaaaaatgagcaaagttgggaaagttgtgttcccgagactacaggataaaaaatactatgataagaaataccaagtattcctgaagctggttgaacaccagaaggagtatttggcgatcatgaatgatgactgaacagggcttgcaggtgctgatgccagaagcttctgtgccattgcattaaagacttgtcatttgatccatgttcaagacccttgaggtattgtttcatcatttctgtattgtctttcaataaagaaaacaaacatgtgcaa

SEQ ID NO: 7518 - DNA, 6583 bp, Homo sapiens
  source 1..6583: mol_type = unassigned DNA
acaacggcgggaggctgcagcggtctgcgcgccgggagcgggggcgcgctggccgcgggtttggaagaggacagttgccctttattctggcggcagatagcagcaggtgaaaaagtgctacacaagtttgatgtttgtgtcttcttctccaaggccaagaaattatctccataggaggcaacagtactatgcatgttatgaattgtgtctccttggtcagtgataaagaaaatgggaatattgccacagcacctggattcatgattgggcagacacctcctccagcacctcctccacctcctcctccaccccctccatctccaccatgttcatgttcaagggaagagtgtccttcctcccctcctccacccccaccacctccacttcctggggagcctcccatcccacctcccccaccaggcctacccccaactactcacatgaacggctacagccaccttggtaagaaaaagcggatgagaagctttttttggaaaactattccggaggagcaagttcgaggcaaaaccaacatctggaccttggcagccaggcaggaacatcactaccaaattgatacaaagaccattgaggagctctttgggcagcaggaagacaccaccaagtcttcccttcctaggagaggaagaactttaaattcatccttcagagaagctcgagaagagattactattttggatgcaaaacggagcatgaacattgggatatttcttaagcaatttaagaagtctcctcggtccattgtagaagatattcatcaaggaaaaagtgagcattatggatcagagaccttgcgagaatttcttaagtttttgccagagtcagaagaggtaaagaagttaaaagcgtttagtggcgacgtgtcgaagctgtctctggcagattcctttctgtatggcttaattcaggtgccaaactattcacttcggattgaagccatggtgctaaagaaggaatttctaccttcttgctcttctctatatacagatataacagttttaagaactgctataaaagaactgatgtcatgtgaagagctacattcaatattacacttggtgctccaggctgggaatatcatgaatgcaggagggtatgccggcaatgcagtaggatttaaactgtcttctttgctcaaattggcagacacaaaagcaaacaaacctgggatgaatctcctgcactttgttgcacaggaagcccaaaagaaagataccattcttctaaacttttcagaaaaattgcatcatgttcagaagactgctagattatctctggagaacacggaggcagaactgcacttgctgtttgtcaggacaaaatcactaaaagaaaacatccagcgggatggtgaactttgtcagcagatggaagattttcttcagtttgccatagaaaagctgagggaactggaatgctggaaacaagagctccaggatgaggcctacacccttatagattttttctgtgaagacaaaaaaaccatgaaactggatgaatgctttcagatatttagagatttctgtaccaaattcaacaaagcagttaaggacaaccacgaccgggaggcgcaggagctgaggcagctgcagaggctgaaggagcaggagcagaagcagcgctcctgggcaactggggagctgggggcatttggccggagcagcagtgagaatgatgtggagctgctgaccaagaagggtgcagagggcctgctccctttcctgcaccccaggcccatcagcccctccagcccctcctaccggcccccgaacacccgccgctcccgcctctccctgggtccctctgctgaccgggagctgctgaccttcttggagagctccaccggcagccctgaggagcccaataagttccacagcctgccccggagcagcccccggcaggcccggcccacgatagcctgcctggagcctgcagaagtgaggcaccaggactccagctttgcacacaaacctcaggcctcggggggccaggaggaggcccccaacccaccctcagcacaggcgcaccagcttgcagccgcccagcctgagaaccatgcctctgccttccccagagctcggcgccagggcgtcagtgtcctccgaaagaggtacagtgagccggtgagcctgggctcagcacagtcccctcctctctcgccattggctctgggaattaaggagcatgagctggtgacagggctggcccagttcaacctccagggttcccagggcatggaggagacctcccagctgactctgagtgacttcagcccgatggagctagagtctgtggggcataggggcccgcagtccctcagtgccagcagcagcagcctgacacccatgggcagagatgccctggggagtctcagcccagcgctggaggatggcaaggctgcccccgatgagcctggaagtgcagctttgggatctgtgggtagcagcgaccctgagaacaaagatcctagacctctgttctgcatctcggacaccaccgactgctcactgaccctggactgctcagagggaaccgactccagacccagaggcggggacccggaggaaggcggggaaggggatggctccatgtcctctggggttggagaaatgggggacagccaagtctcctccaaccctacatccagcccccctggggaggctcctgcccccgtctctgtggatagtgagcccagctgcaagggcggcctgcccagggacaaacccaccaaaaggaaagatgttgtagcaccaaagagaggctccctgaaagaggcgtctcccggggcctccaagcccgggagcgcccggcggagccagggggcagtggccaagtctgtgcggaccctgaccgcctcagagaacgagagcatgcgcaaggtcatgcccatcaccaagtccagcagaggcgccggctggaggcgaccagagctgtcatcccgggggccctcccagaatccccccagcagcacagatactgtgtggtcacgccagaactccgtgcggagggcctccacaggcgccgaagagcagaggctgccgcgggggagcagcggctccagcagcacccgtccggggagggacgttcccctgcagcccaggggttctttcaagaagcccagtgccaaaccactcaggaacctccccagacagaagcctgaggaaaataagacctgccgcgcccactccgagggccctgagagtcccaaagaagagcccaagaccccgtcagtgcccagcgtcccccacgaactaccccgtgtcccgagctttgcccggaacacagtggcctcctcctctcgaagcatgagaacagatcttcctcccgtggccaaagcccccggcatcactcggacagtgtcgcagcggcagctgagggtgaaaggggaccccgaggatgccgctcccaaggacagcagcactttgaggcgagccagcagtgcccgggcccccaagaagcgcccagagtctgcggagggtcccagtgccaacacggaggcccctctgaaggccagaggggctggggaaagggcctccctccgtcggaaggactccagtcggaccacgctggggagaatcctcaatcccttacggaagtgatgggtgcctgtcctctcctgcctcctgggattcagacggtgaagactgacttctgggacgaggatggggaaagaggcagcatgtctttgttacagataaagcagccactggtgccactgctagtgacgctgttgggatggcacagtccaggaggcctgtggactgcagcctgctgtgctgagccctgctgcagtccagcgtccagatggatgcacgttcactactgtgacggccgcacctcccccatgcaccccaccctcccccaaagcccggatcccgagaaagatttagtaggagtgtaaagtgacattcttatgaaacaagtcaaaaaagtttttttcaggccagtttttatatatcaaagactttctttttaatataaaaattagctaggtgcagtggttcatgcctgtaatccagcactttgggaggctaagatgagtggattgcttgagcctaggagttcgagaccagcctaggcaacatggagaaaccccgtctctatcagaaatacaaaatttagccgagtgtggtggcacatgcctgtggccccagccactctgaacgctgagatgggaaggtcacttgagcccaggaccccaccactgcactccagcctggatgacagagtgagaccttgtctcaaacaaaacaaaacaaaaatgaaatgttctagttttggttccttttgcagagtgaaatgcctcccaggaaaaaaatacatatgtatttttttgcgacagggtcgtgctcttgtctcccagactggactgcagtggcacaatcatagctcactgcagctttgacctcccagacccaagtgatcctcccacctcagcctccctcagagctgggactacaggcgtgcaccaccacgcctggttaattgtttttttttaatttatcttttgtagagatgggatctcactatgttgctcaggctgatctcgagctcctgggctcaagtgatcctcccacctcagcctcccaaagtgctgggattacaggtgtgagccaccacacttggccagtatatcctcagtatgaagatatttttatcttcctgtgttctctggcttcagagtttcacctgcccacacagggtccgttgctggcaactggacttccccataagccttgggtatcctgtgatgggctgtgtctccctgaagattgtctggcttgcccacttctccgtgcatgactctgggtgtgagtctgtctaggaacaggagggaaagttggactcagacagaaatcagatgcttccatgtattcagggcgcgcattgtgagcagtggagtatgagccttgagggcctcatggttgcagggcaggcttccctgcagatgggtggcagcccctggtagaatgctggatttctctggaatctagaagtgccatattttagtggaaaggcatcagggctgtttgacagtgtgcgtctttccaatcccatgttcctccattcgtgtgtctgttataaaactgagtgaaggctgctatgacctgtgttcactctggttacagggaggtgcaaaccattctgtctcccagcctttcttctctctttgtgtgctcccagcacttccttcttttctaacatggcctggagagagtctctctctccttgtctctgtctcttaataatagtttttaacgtggacatctcttccttggtacagtggtttttaaatactgagaagaaccaagtcaggttttttaaagcagactaaaagcatgaaattgctttcagaagaatgtatatcatcgggaaaagttcgggggcagagtgggggaatcaggctttattcaaaagaaacagttgaaaacatgggactttttctacccaatgcccatttcacgactcctctgagactaattgggaaacggggaaattcttggaattttttttttaagaaacttttttgtgttttttttaattttaggtcacttattagtgaaacctcattttagatctgacattggtagatagatggatttaggcaaatatgatgcgtttgtggggaatccacgtggttgacgttagaacctcccttctgcagactgttgcctgtcatctaagcgaattggaaatgctgagcttccataagtcagctgagttttaaaggtaaacgttatggctgaaatagtaaagcacctgaccacaaaacctcttgtaaaaacagccctgagtaggtatttccagggctccacaaagttgcttatgggaatcctgagctgcttttcaccatctcaagaagcctaagaagttatatatttaatcaggtagacaaaacagttcaaagcataaggtccatggtggtggaaaatggatgcaagtgattctaagtttgtggatttgtggatagcagagggatcgggacctcttggaggaaccctgggtaccaagctcccaggcccttcctctatcatggatgctgggtgactttgggaagtcaccacctcttcccaagcctgtttcccatatcacagatgtggggccatggcctcgatgatggtctccacaggtctttccacctctgtgagtccaagtcaggtcaatcagcaaggacccatctctgccctgggtcagctcctcagaaccaacccccagcatctctaaagcaaaagcctcacctcaagggctgctcagaagagagcaccttcagcatgagttgttgctggaagatctaataagctgtgtttcctgggaagtggtgctttacttagccctgtggacaacttctctatgcatctgtgtgagcagatgatcattgtattaccttttatcggtagtaagcttggaaaaataatttaagaatacaatggagaaatgtaaataagtatctatgtaaatttgtttaaaataaactgaatgtatttaatggtccatttatatgttcttttatgtaacatgtagtttaataaagttcctgtttatgagagtcatgtttcatctc

SEQ ID NO: 7519 - DNA, 6480 bp, Homo sapiens
  source 1..6480: mol_type = unassigned DNA; mol_type = unassigned DNA
agtgctacacaagtttgatgtttgtgtcttcttctccaaggccaagaaattatctccataggaggcaacagtactatgcatgttatgaattgtgtctccttggtcagtgataaagaaaatgggaatattgccacagcacctggattcatgattgggcagacacctcctccagcacctcctccacctcctcctccaccccctccatctccaccatgttcatgttcaagggaagagtgtccttcctcccctcctccacccccaccacctccacttcctggggagcctcccatcccacctcccccaccaggcctacccccaactactcacatgaacggctacagccaccttggtaagaaaaagcggatgagaagctttttttggaaaactattccggaggagcaagttcgaggcaaaaccaacatctggaccttggcagccaggcaggaacatcactaccaaattgatacaaagaccattgaggagctctttgggcagcaggaagacaccaccaagtcttcccttcctaggagaggaagaactttaaattcatccttcagagaagctcgagaagagattactattttggatgcaaaacggagcatgaacattgggatatttcttaagcaatttaagaagtctcctcggtccattgtagaagatattcatcaaggaaaaagtgagcattatggatcagagaccttgcgagaatttcttaagtttttgccagagtcagaagaggtaaagaagttaaaagcgtttagtggcgacgtgtcgaagctgtctctggcagattcctttctgtatggcttaattcaggtgccaaactattcacttcggattgaagccatggtgctaaagaaggaatttctaccttcttgctcttctctatatacagatataacagttttaagaactgctataaaagaactgatgtcatgtgaagagctacattcaatattacacttggtgctccaggctgggaatatcatgaatgcaggagggtatgccggcaatgcagtaggatttaaactgtcttctttgctcaaattggcagacacaaaagcaaacaaacctgggatgaatctcctgcactttgttgcacaggaagcccaaaagaaagataccattcttctaaacttttcagaaaaattgcatcatgttcagaagactgctagattatctctggagaacacggaggcagaactgcacttgctgtttgtcaggacaaaatcactaaaagaaaacatccagcgggatggtgaactttgtcagcagatggaagattttcttcagtttgccatagaaaagctgagggaactggaatgctggaaacaagagctccaggatgaggcctacacccttatagattttttctgtgaagacaaaaaaaccatgaaactggatgaatgctttcagatatttagagatttctgtaccaaattcaacaaagcagttaaggacaaccacgaccgggaggcgcaggagctgaggcagctgcagaggctgaaggagcaggagcagaagcagcgctcctgggcaactggggagctgggggcatttggccggagcagcagtgagaatgatgtggagctgctgaccaagaagggtgcagagggcctgctccctttcctgcaccccaggcccatcagcccctccagcccctcctaccggcccccgaacacccgccgctcccgcctctccctgggtccctctgctgaccgggagctgctgaccttcttggagagctccaccggcagccctgaggagcccaataagttccacagcctgccccggagcagcccccggcaggcccggcccacgatagcctgcctggagcctgcagaagtgaggcaccaggactccagctttgcacacaaacctcaggcctcggggggccaggaggaggcccccaacccaccctcagcacaggcgcaccagcttgcagccgcccagcctgagaaccatgcctctgccttccccagagctcggcgccagggcgtcagtgtcctccgaaagaggtacagtgagccggtgagcctgggctcagcacagtcccctcctctctcgccattggctctgggaattaaggagcatgagctggtgacagggctggcccagttcaacctccagggttcccagggcatggaggagacctcccagctgactctgagtgacttcagcccgatggagctagagtctgtggggcataggggcccgcagtccctcagtgccagcagcagcagcctgacacccatgggcagagatgccctggggagtctcagcccagcgctggaggatggcaaggctgcccccgatgagcctggaagtgcagctttgggatctgtgggtagcagcgaccctgagaacaaagatcctagacctctgttctgcatctcggacaccaccgactgctcactgaccctggactgctcagagggaaccgactccagacccagaggcggggacccggaggaaggcggggaaggggatggctccatgtcctctggggttggagaaatgggggacagccaagtctcctccaaccctacatccagcccccctggggaggctcctgcccccgtctctgtggatagtgagcccagctgcaagggcggcctgcccagggacaaacccaccaaaaggaaagatgttgtagcaccaaagagaggctccctgaaagaggcgtctcccggggcctccaagcccgggagcgcccggcggagccagggggcagtggccaagtctgtgcggaccctgaccgcctcagagaacgagagcatgcgcaaggtcatgcccatcaccaagtccagcagaggcgccggctggaggcgaccagagctgtcatcccgggggccctcccagaatccccccagcagcacagatactgtgtggtcacgccagaactccgtgcggagggcctccacaggcgccgaagagcagaggctgccgcgggggagcagcggctccagcagcacccgtccggggagggacgttcccctgcagcccaggggttctttcaagaagcccagtgccaaaccactcaggaacctccccagacagaagcctgaggaaaataagacctgccgcgcccactccgagggccctgagagtcccaaagaagagcccaagaccccgtcagtgcccagcgtcccccacgaactaccccgtgtcccgagctttgcccggaacacagtggcctcctcctctcgaagcatgagaacagatcttcctcccgtggccaaagcccccggcatcactcggacagtgtcgcagcggcagctgagggtgaaaggggaccccgaggatgccgctcccaaggacagcagcactttgaggcgagccagcagtgcccgggcccccaagaagcgcccagagtctgcggagggtcccagtgccaacacggaggcccctctgaaggccagaggggctggggaaagggcctccctccgtcggaaggactccagtcggaccacgctggggagaatcctcaatcccttacggaagtgatgggtgcctgtcctctcctgcctcctgggattcagacggtgaagactgacttctgggacgaggatggggaaagaggcagcatgtctttgttacagataaagcagccactggtgccactgctagtgacgctgttgggatggcacagtccaggaggcctgtggactgcagcctgctgtgctgagccctgctgcagtccagcgtccagatggatgcacgttcactactgtgacggccgcacctcccccatgcaccccaccctcccccaaagcccggatcccgagaaagatttagtaggagtgtaaagtgacattcttatgaaacaagtcaaaaaagtttttttcaggccagtttttatatatcaaagactttctttttaatataaaaattagctaggtgcagtggttcatgcctgtaatccagcactttgggaggctaagatgagtggattgcttgagcctaggagttcgagaccagcctaggcaacatggagaaaccccgtctctatcagaaatacaaaatttagccgagtgtggtggcacatgcctgtggccccagccactctgaacgctgagatgggaaggtcacttgagcccaggaccccaccactgcactccagcctggatgacagagtgagaccttgtctcaaacaaaacaaaacaaaaatgaaatgttctagttttggttccttttgcagagtgaaatgcctcccaggaaaaaaatacatatgtatttttttgcgacagggtcgtgctcttgtctcccagactggactgcagtggcacaatcatagctcactgcagctttgacctcccagacccaagtgatcctcccacctcagcctccctcagagctgggactacaggcgtgcaccaccacgcctggttaattgtttttttttaatttatcttttgtagagatgggatctcactatgttgctcaggctgatctcgagctcctgggctcaagtgatcctcccacctcagcctcccaaagtgctgggattacaggtgtgagccaccacacttggccagtatatcctcagtatgaagatatttttatcttcctgtgttctctggcttcagagtttcacctgcccacacagggtccgttgctggcaactggacttccccataagccttgggtatcctgtgatgggctgtgtctccctgaagattgtctggcttgcccacttctccgtgcatgactctgggtgtgagtctgtctaggaacaggagggaaagttggactcagacagaaatcagatgcttccatgtattcagggcgcgcattgtgagcagtggagtatgagccttgagggcctcatggttgcagggcaggcttccctgcagatgggtggcagcccctggtagaatgctggatttctctggaatctagaagtgccatattttagtggaaaggcatcagggctgtttgacagtgtgcgtctttccaatcccatgttcctccattcgtgtgtctgttataaaactgagtgaaggctgctatgacctgtgttcactctggttacagggaggtgcaaaccattctgtctcccagcctttcttctctctttgtgtgctcccagcacttccttcttttctaacatggcctggagagagtctctctctccttgtctctgtctcttaataatagtttttaacgtggacatctcttccttggtacagtggtttttaaatactgagaagaaccaagtcaggttttttaaagcagactaaaagcatgaaattgctttcagaagaatgtatatcatcgggaaaagttcgggggcagagtgggggaatcaggctttattcaaaagaaacagttgaaaacatgggactttttctacccaatgcccatttcacgactcctctgagactaattgggaaacggggaaattcttggaattttttttttaagaaacttttttgtgttttttttaattttaggtcacttattagtgaaacctcattttagatctgacattggtagatagatggatttaggcaaatatgatgcgtttgtggggaatccacgtggttgacgttagaacctcccttctgcagactgttgcctgtcatctaagcgaattggaaatgctgagcttccataagtcagctgagttttaaaggtaaacgttatggctgaaatagtaaagcacctgaccacaaaacctcttgtaaaaacagccctgagtaggtatttccagggctccacaaagttgcttatgggaatcctgagctgcttttcaccatctcaagaagcctaagaagttatatatttaatcaggtagacaaaacagttcaaagcataaggtccatggtggtggaaaatggatgcaagtgattctaagtttgtggatttgtggatagcagagggatcgggacctcttggaggaaccctgggtaccaagctcccaggcccttcctctatcatggatgctgggtgactttgggaagtcaccacctcttcccaagcctgtttcccatatcacagatgtggggccatggcctcgatgatggtctccacaggtctttccacctctgtgagtccaagtcaggtcaatcagcaaggacccatctctgccctgggtcagctcctcagaaccaacccccagcatctctaaagcaaaagcctcacctcaagggctgctcagaagagagcaccttcagcatgagttgttgctggaagatctaataagctgtgtttcctgggaagtggtgctttacttagccctgtggacaacttctctatgcatctgtgtgagcagatgatcattgtattaccttttatcggtagtaagcttggaaaaataatttaagaatacaatggagaaatgtaaataagtatctatgtaaatttgtttaaaataaactgaatgtatttaatggtccatttatatgttcttttatgtaacatgtagtttaataaagttcctgtttatgagagtcatgtttcatctcagcttcttcc

SEQ ID NO: 7520 - DNA, 1468 bp, Homo sapiens
  source 1..1468: mol_type = unassigned DNA; mol_type = unassigned DNA
ggtccgtctgcagtcggcagcctcgccggcagctcgctcggcccccgcttggcccggcccgcaggtaggagccgccgagggacgcggcgcccggttcccggccccgcctgcgccgcgcgctccccgctcccgccgcccgcttcgaggagctgttctatgaagaccgccatttccacgagggctgcttccgctgctgccgctgccagcgctcactagccgatgaacccttcacctgccaggacagtgagctgctctgcaatgactgctactgcagtgcgttttcctcgcagtgctccgcttgtggggagactgtcatgcctgggtcccggaagctggaatatggaggccagacatggcatgagcactgcttcctgtgcagtggctgtgaacagccactgggctcccgttcttttgtgcccgacaagggtgctcactactgcgtgccctgctatgagaacaagtttgctcctcgctgcgcccgctgcagcaagacgctgacacagggtggagtgacataccgtgatcagccgtggcatcgagaatgtctggtctgtaccggatgccagacgcccctggcagggcagcagttcacctcccgggatgaagatccctactgtgtggcctgttttggagaactctttgcacctaagtgcagcagctgcaagcgccccatcgtaggactcggtggaggcaagtatgtgtcctttgaagaccgacactggcaccacaactgcttctcctgcgcccgctgctctacctccctggtgggccagggcttcgtaccggatggagaccaagtgctctgccagggctgtagccaggcagggccctaagccagggctcctggacccaggctttcccataccacgggcccaggactgtggctccttttctaaaccacctctgggactcagctccccccgccaaaaaaaatgggtctccttctgggctccaggattgtctccccactccagcatccccaaactggtactccctgacccagggccccaaacctgggctcttacagagcctccatgagtcaagccccctccccacacctggactccagaattcaccctctcccctgcagtctgggttcccagactgagtcctctccccaaatcagggctctagacccgagccctccaaacctggactctgggacttaggcccccttaaatctagacttctctttataggtttcaggtctcctatgggtgcctgggaagtccttgaaagtggactgttctcaggcttgacctgccccaccccatccccgcggttgaggctgtgggggcagcagatcaggagcccactgataaggggccctagggtacagggtgctgcccagcaggtcgccaccgagtgtcttctcattttatttcagctccattttgcccatagatgggcagaggggtgagattggctcatcccccttccagattctgcaataaagcggtgtgaggaa

SEQ ID NO: 7521 - DNA, 1647 bp, Homo sapiens
  source 1..1647: mol_type = unassigned DNA; mol_type = unassigned DNA
cacggtccgtctgcagtcggcagcctcgccggcagctcgctcggcccccgcttggcccggcccgcaggtaggagccgccgagggacgcggcgcccggttcccggccccgcctgcgccgcgcgctccccgctcccgccgcccgcttcgagggttctctccccttgccaccatgagcgagtcatttgactgtgcaaaatgcaacgagtccctgtatggacgcaagtacatccagacagacagcggcccctactgtgtgccctgctatgacaatacctttgccaacacctgtgctgagtgccagcagcttatcgggcatgactcgagggagctgttctatgaagaccgccatttccacgagggctgcttccgctgctgccgctgccagcgctcactagccgatgaacccttcacctgccaggacagtgagctgctctgcaatgactgctactgcagtgcgttttcctcgcagtgctccgcttgtggggagactgtcatgcctgggtcccggaagctggaatatggaggccagacatggcatgagcactgcttcctgtgcagtggctgtgaacagccactgggctcccgttcttttgtgcccgacaagggtgctcactactgcgtgccctgctatgagaacaagtttgctcctcgctgcgcccgctgcagcaagacgctgacacagggtggagtgacataccgtgatcagccgtggcatcgagaatgtctggtctgtaccggatgccagacgcccctggcagggcagcagttcacctcccgggatgaagatccctactgtgtggcctgttttggagaactctttgcacctaagtgcagcagctgcaagcgccccatcgtaggactcggtggaggcaagtatgtgtcctttgaagaccgacactggcaccacaactgcttctcctgcgcccgctgctctacctccctggtgggccagggcttcgtaccggatggagaccaagtgctctgccagggctgtagccaggcagggccctaagccagggctcctggacccaggctttcccataccacgggcccaggactgtggctccttttctaaaccacctctgggactcagctccccccgccaaaaaaaatgggtctccttctgggctccaggattgtctccccactccagcatccccaaactggtactccctgacccagggccccaaacctgggctcttacagagcctccatgagtcaagccccctccccacacctggactccagaattcaccctctcccctgcagtctgggttcccagactgagtcctctccccaaatcagggctctagacccgagccctccaaacctggactctgggacttaggcccccttaaatctagacttctctttataggtttcaggtctcctatgggtgcctgggaagtccttgaaagtggactgttctcaggcttgacctgccccaccccatccccgcggttgaggctgtgggggcagcagatcaggagcccactgataaggggccctagggtacagggtgctgcccagcaggtcgccaccgagtgtcttctcattttatttcagctccattttgcccatagatgggcagaggggtgagattggctcatcccccttccagattctgcaataaagcggtgtgaggaa

SEQ ID NO: 7522 - DNA, 882 bp, Homo sapiens
  source 1..882: mol_type = unassigned DNA; mol_type = unassigned DNA
ggtccgtctgcagtcggcagcctcgccggcagctcgctcggcccccgcttggcccggcccgcaggtaggagccgccgagggacgcggcgcccggttcccggccccgcctgcgccgcgcgctccccgctcccgccgcccgcttcgaggagctgttctatgaagaccgccatttccacgagggctgcttccgctgctgccgctgccagcgctcactagccgatgaacccttcacctgccaggacagtgagctgctctgcaatgactgctactgcagtgcgttttcctcgcagtgctccgcttgtggggagactgtcatgcctgacgctgacacagggtggagtgacataccgtgatcagccgtggcatcgagaatgtctggtctgtaccggatgccagacgcccctggcagggcagcagttcacctcccgggatgaagatccctactgtgtggcctgttttggagaactctttgcacctaagtgcagcagctgcaagcgccccatcgtaggactcggtggaggcaagtatgtgtcctttgaagaccgacactggcaccacaactgcttctcctgcgcccgctgctctacctccctggtgggccagggcttcgtaccggatggagaccaagtgctctgccagggctgtagccaggcagggccctaagccagggctcctggacccaggctttcccataccacgggcccaggactgtggctccttttctaaaccacctctgggactcagctccccccgccaaaaaaaatgggtctccttctgggctccaggattgtctccccactccagcatccccaaactggtactccctgacccagggccccaaacctgggctcttacagagcctccatgagtcaagccccctcc

SEQ ID NO: 7523 - DNA, 1091 bp, Homo sapiens
  source 1..1091: mol_type = unassigned DNA; mol_type = unassigned DNA
ggcccccgcggcgggctggggggccgggggcggggtccgggcggggcgggcccgcgctcacttcctcggggaggggttggggccgcgctcccactcgcccacacggtccgtctgcagtcggcagcctcgccggcagctcgctcggcccccgcttggcccggcccgcagggttctctccccttgccaccatgagcgagtcatttgactgtgcaaaatgcaacgagtccctgtatggacgcaagtacatccagacagacagcggcccctactgtgtgccctgctatgacaatacctttgccaacacctgtgctgagtgccagcagcttatcgggcatgactcgagggagctgttctatgaagaccgccatttccacgagggctgcttccgctgctgccgctgccagcgctcactagccgatgaacccttcacctgccaggacagtgagctgctctgcaatgactgctactgcagtgcgttttcctcgcagtgctccgcttgtggggagactgtcatgcctgggtcccggaagctggaatatggaggccagacatggcatgagcactgcttcctgtgcagtggctgtgaacagccactgggctcccgttcttttgtgcccgacaagggtgctcactactgcgtgccctgctatgagaacaagtttgctcctcgctgcgcccgctgcagcaagacgctgacacagggtggagtgacataccgtgatcagccgtggcatcgagaatgtctggtctgtaccggatgccagacgcccctggcagggcagcagttcacctcccgggatgaagatccctactgtgtggcctgttttggagaactctttgcacctaagtgcagcagctgcaagcgccccatcgtaggactcggtggaggcaagtatgtgtcctttgaagaccgacactggcaccacaactgcttctcctgcgcccgctgctctacctccctggtgggccagggcttcgtaccggatggagaccaagtgctctgccagggctgtagccaggcagggccctaagccagggctcctggacccaggctttcccataccacgggcccaggactgtggctccttttc

SEQ ID NO: 7524 - DNA, 607 bp, Homo sapiens
  source 1..607: mol_type = unassigned DNA; mol_type = unassigned DNA
ggttctctccccttgccaccatgagcgagtcatttgactgtgcaaaatgcaacgagtccctgtatggacgcaagtacatccagacagacagcggcccctactgtgtgccctgctatgacaatacctttgccaacacctgtgctgagtgccagcagcttatcgggcatgactcgagggagctgttctatgaagaccgccatttccacgagggctgcttccgctgctgccgctgccagcgctcactagccgatgaacccttcacctgccaggacagtgagctgctctgcaatgactgctactgcagtgcgttttcctcgcagtgctccgcttgtggggagactgtcatgcctggtatgtgttcaggggctcatcttgtgtgagaactggcatctgcgtagggtctttgcatgtgtctgtctgatacatggagacttggtctgtgtaaagacctgcatacacagcatgtttctggaaatttagtatatacgggatctgtttgcctggtatactcctgggggctactatgtacaggcagattgacacatgtgatacatacttgggggcttagcatgtgtgaatatctgcatgtttagtacaggtaggaact

SEQ ID NO: 7525 - DNA, 779 bp, Homo sapiens
  source 1..779: mol_type = unassigned DNA; mol_type = unassigned DNA
tgcaagtccagagagcagggaactaccttgagtattctactcaaacttatgtctcagagttccccaatttcccaagaagggagagatagaggccacaatccagggggccatctcttaaggtaccaataattttgcaggatcaaaccaaaatgacaactgctcacttttactgtcaatactgcacagcatcacttcttgggaagaaatatgtactaaaggatgacagtccatactgtgttacatgttatgatcgtgtattttctaactattgcgaggaatgcaaaaaaccaattgaatctgattctaaggatctttgttacaaagaccggcactggcatgaaggatgcttcaagtgcaccaaatgcaatcactctttggtggaaaagccttttgctgccaaggatgagcgcctgctgtgcacggagtgctattctaacgagtgctcctccaagtgcttccactgcaagaggaccatcatgcctggttcccgcaaaatggaatttaagggaaactactggcatgaaacctgttttgtgtgtgagaattgccgacaacctatagggacaaagcctttgatctccaaagagagtggcaattattgtgtgccatgttttgagaaggagtttgctcactactgcaacttttgtaagaaggtgataacttcaggtgggataacattttgtgaccagctatggcataaagagtgttttctgtgtagtggctgtaggaaagatctctgtgaagaacagttcatgtccagagacgactatccattctgc

SEQ ID NO: 7526 - DNA, 2031 bp, Homo sapiens
  source 1..2031: mol_type = unassigned DNA
tgcaagtccagagagcagggaactaccttgagtattctactcaaacttatgtctcagagttccccaatttcccaagaagggagagatagaggccacaatccagggggccatctcttaaggtaccaataattttgcagcccagtaggagtcatgtacacggtataagacttggaggaaatgcagggacccttctgttttctcctgcaaagttgaaaaagctgcatgcagttggaagggatcttcagatggtgctggtgactttctgttccttttggagttgacatgcatgtggattggaggaaaaataatcaacatatattctcctttcgtactgtttaaatcacaggaagaagcggctttaagacaaagatcaaaccaaaatgacaactgctcacttttactgtcaatactgcacagcatcacttcttgggaagaaatatgtactaaaggatgacagtccatactgtgttacatgttatgatcgtgtattttctaactattgcgaggaatgcaaaaaaccaattgaatctgattctaaggatctttgttacaaagaccggcactggcatgaaggatgcttcaagtgcaccaaatgcaatcactctttggtggaaaagccttttgctgccaaggatgagcgcctgctgtgcacggagtgctattctaacgagtgctcctccaagtgcttccactgcaagaggaccatcatgcctggttcccgcaaaatggaatttaagggaaactactggcatgaaacctgttttgtgtgtgagaattgccgacaacctatagggacaaagcctttgatctccaaagagagtggcaattattgtgtgccatgttttgagaaggagtttgctcactactgcaacttttgtaagaaggtgataacttcaggtgggataacattttgtgaccagctatggcataaagagtgttttctgtgtagtggctgtaggaaagatctctgtgaagaacagttcatgtccagagacgactatccattctgcgtggactgctacaaccatctttatgccaacaagtgtgtagcctgttccaaacccattagtggtctcacaggtgccaagtttatctgctttcaagacagccagtggcatagcgaatgctttaactgcgggaaatgctctgtctccttggtgggtaaaggcttcctgacccagaacaaggaaatcttctgccaaaaatgtggctccggaatggacactgacatctaggagacagtccttgcccacctaaaatccattttgccttcgttgtcactaaagccagaactcagttgcggtcttatttttgacttaagttttagaaaatattcatgtagtttagagtggaaaagtttttgcacacattttgatcgaactatattctaagcacacaaaaagcacagtagaacagaaatgaatatatgctaaatcacaaagacaactctccttgcaaaatactgcactctgctgttagaagcagaggaaaatatctcttcataatcaaatatatgacatatacctaggagctgtggatgtaattactgaagaatgaggtttttcatacctgaagagtaaaagaaaaactaagagatcaaactgagaggtatacatgaggctagtgtttgcattcctggttatatgtaatgtgataaattagctatgaatggtaaaagaacaaaactgatcagagtaaattcattagcaattatcacatttaagaattgttatcatttaaaaatcatcctttttttcacacatactgactgtagaattaaaaaacaaagctacaatttgccctcatacacactgcttccacagcttgctagttctgtgtttactcaatggaatatgagaactgaggacattatggctctcataatctgcataggtataaagaggatcatttctacctagggatagccaaagcatgggtttcaacacgttttgtattaaatatattttcaaagtccacagtgatttttctaaacgcttacagattccatgaaataaaagtctattctttcaa

SEQ ID NO: 7527 - DNA, 1904 bp, Homo sapiens
  source 1..1904: mol_type = unassigned DNA; mol_type = unassigned DNA
aggaagcaggcagagcggggaaggctgagtccacactgcaagtccagagagcagggaactaccttgagtattctactcaaacttatgtctcagagttccccaatttcccaagaagggagagatagaggccacaatccagggggccatctcttaaggtaccaataattttgcaggatcaaaccaaaatgacaactgctcacttttactgtcaatactgcacagcatcacttcttgggaagaaatatgtactaaaggatgacagtccatactgtgttacatgttatgatcgtgtattttctaactattgcgaggaatgcaaaaaaccaattgaatctgattctaaggatctttgttacaaagaccggcactggcatgaaggatgcttcaagtgcaccaaatgcaatcactctttggtggaaaagccttttgctgccaaggatgagcgcctgctgtgcacggagtgctattctaacgagtgctcctccaagtgcttccactgcaagaggaccatcatgcctggttcccgcaaaatggaatttaagggaaactactggcatgaaacctgttttgtgtgtgagaattgccgacaacctatagggacaaagcctttgatctccaaagagagtggcaattattgtgtgccatgttttgagaaggagtttgctcactactgcaacttttgtaagaaggtgataacttcaggtgggataacattttgtgaccagctatggcataaagagtgttttctgtgtagtggctgtaggaaagatctctgtgaagaacagttcatgtccagagacgactatccattctgcgtggactgctacaaccatctttatgccaacaagtgtgtagcctgttccaaacccattagtggtctcacaggtgccaagtttatctgctttcaagacagccagtggcatagcgaatgctttaactgcgggaaatgctctgtctccttggtgggtaaaggcttcctgacccagaacaaggaaatcttctgccaaaaatgtggctccggaatggacactgacatctaggagacagtccttgcccacctaaaatccattttgccttcgttgtcactaaagccagaactcagttgcggtcttatttttgacttaagttttagaaaatattcatgtagtttagagtggaaaagtttttgcacacattttgatcgaactatattctaagcacacaaaaagcacagtagaacagaaatgaatatatgctaaatcacaaagacaactctccttgcaaaatactgcactctgctgttagaagcagaggaaaatatctcttcataatcaaatatatgacatatacctaggagctgtggatgtaattactgaagaatgaggtttttcatacctgaagagtaaaagaaaaactaagagatcaaactgagaggtatacatgaggctagtgtttgcattcctggttatatgtaatgtgataaattagctatgaatggtaaaagaacaaaactgatcagagtaaattcattagcaattatcacatttaagaattgttatcatttaaaaatcatcctttttttcacacatactgactgtagaattaaaaaacaaagctacaatttgccctcatacacactgcttccacagcttgctagttctgtgtttactcaatggaatatgagaactgaggacattatggctctcataatctgcataggtataaagaggatcatttctacctagggatagccaaagcatgggtttcaacacgttttgtattaaatatattttcaaagtccacagtgatttttctaaacgcttacagattccatgaaataaaagtctattctttcaagtggagctaaccaggataatctttgtccccaaaggcaaacctttaaaataaatagatcattaaatctt

SEQ ID NO: 7528 - DNA, 4967 bp, Homo sapiens
  source 1..4967: mol_type = unassigned DNA; mol_type = unassigned DNA
agcctgcgagtccgcgagccagcgagctgcggctgcggcctcccctgcgcgcagctacccgggcgtcccggcccgcggccccgctaaccccggggcccgcgcccccgcggcagggatgcatcatggccacgctggcttgccgggtgcagttcttggacgacacggaccctttcaacagcaccaacttccccgagcccagccggccgccgctgttcacgttccgcgaggacctcgcgctcggcacccagctggcgggggtccataggctgctgcaggcgccgcacaagctggatgactgtactctgcagctctctcacaatggcgcctacctggatttggaggccaccctggcagagcagcgggatgagttggaaggcttccaggatgacgccgggcggggcaagaagcacagcatcatcctaaggacgcagctgtctgtgagggtccatgcctgcatcgaaaaactatacaactccagcggacgagatttgagaagggccctcttctccctgaagcagatatttcaggatgacaaggatttggtgcatgaatttgtagtggctgaaggtctgacatgtttgatcaaggtgggagctgaggctgatcagaactatcagaactacatcttaagggctttgggccagattatgttgtatgtggatggaatgaatggagtaataaaccgcaatgaaaccattcagtggctgtacactctcattgggtcaaagttccgcctggtggtgaagacagccctgaagctgctgctcgtctttgtagagtactcggagtccaacgcacctctcctaattcaggctgtcactgctgttgacacgaaaagaggggtcaaaccttggtcaaatatcatggaaatcctggaggaaaaagatggagttgatacggagctactggtttatgcaatgactttggtgaacaagacgttatcaggactaccagaccaagacaccttctacgacgtcgtggactgcctggaggagctgggcattgctgctgtgtcccagaggcacttgaacaagaaagggactgacctggacttagtggagcaactcaacatttatgaggtggcgctcaggcacgaggatggcgatgagaccacggagccaccccccagtgggtgccgggaccggaggagggccagcgtgtgttccagtggcggaggcgagcaccggggcctggaccgcagaaggagccgcaggcactcggtgcagagcatcaagagcaccctgtcggcccccaccagtccctgctcccagtcagctcccagcttcaagcccaaccaagtgcgagatctgcgtgaaaaatacagcaattttggcaataactcttatcactcctcaagaccctcatctggatccagtgtgcccaccacccccacatcatccgtctcacccccacaggaggccaggttggaaaggtcatcaccgagtggtcttctcacatcatccttcaggcagcaccaagagtcactggcagcagagagagagaggcggcggcaggagagagaagaaaggttgcagagaatagagcgggaagaaagaaacaaattcagccgagattatttagacaaaagagaggagcaaaggcaagcaagagaagaaagatacaaatacttggaacagttggcagctgaggagcacgagaaggagctgagaagccggagtgtgagccggggcagagccgacctctccttggacctgacctcgccagcagccccagcctgcctggctcctctgagccatagcccctcatcttcagactctcaagaggctctcacggtgtctgcctcctccccaggaacccctcaccatccccaagcaagtgccggggatcctgaacccgaatcagaggcagaaccggaagcagaggcaggggcggggcaggttgctgatgaagctggccaggacatagcctctgcccacgagggtgcagagactgaagtggagcaggcactagagcaagagccggaagaaagagcctccctcagtgaaaaagagaggcagaacgagggggtgaacgagagggacaactgctctgcctccagcgtctcgtcctccagcagcacgttggagagggaggagaaggaggacaagctctccagggacaggacaactggtttgtggcccgcaggtgtccaggatgcaggtgtaaatggacagtgtggcgacatcctcaccaacaaacggttcatgcttgacatgctgtatgcccataacaggaagtctccggatgatgaggagaagggggatggggaggctgggaggacccagcaggaggcagaggcggtagccagccttgctaccaggatatccaccctgcaggccaactctcagacccaggatgagagtgtcaggagggtggatgtcggctgtttggacaatcggggcagtgtgaaagcatttgctgagaaattcaacagtggggacctggggagaggttccatctcccctgatgctgagcccaatgacaaggtcccagaaacagcgccggtgcagccgaagacagagtctgattacatctgggaccagctcatggccaatccaagagagctcagaatccaagacatggatttcactgacctgggggaggaggatgacattgatgtcctagatgtggacctgggtcacagggaggcccctgggccacctcccccacccccacccacctttctgggtttgccgcccccaccccctccgcccctgttggacagcattcctccccctcctgtccctggtaatttattggttcctcctcctccagtgttcaacgctcctcagggcttagggtggtcccaggtacccaggggtcagcccacattcactaagaaaaagaagaccatccgtttgttctggaatgaagttcggccttttgactggccatgtaaaaacaaccgacgctgcagagaattcctgtggtcaaaactggaacccattaaggtggacacttccagactggagcacctgtttgagtctaaatccaaggaactgtctgtctcaaagaaaactgctgcagatggaaaaaggcaagagatcattgttctggattccaagaggagtaacgccatcaatattggtctgacggtgctgccccctccaaggacgattaagatcgccattttgaattttgatgagtatgccttaaacaaagaaggaatcgagaaaattctaacgatgattcccaccgatgaggagaagcagaaaatccaggaagctcagctggccaaccctgaaatccccctgggcagtgcagagcagttcctcctcaccctgtcctccatcagcgagctctctgcacgacttcacctctgggcattcaaaatggattatgaaactacagaaaaggaagtagcagaaccactcctggacctgaaggaaggaatagaccagttggagaacaataaaaccttgggctttatcctgtctactctcttagccattgggaactttctaaatggaactaatgccaaagcgtttgagttaagctacctcgagaaggttccagaagtcaaagacacagtgcacaagcagtcgcttctccaccatgtgtgcaccatggtggtagaaaacttcccagacagctccgatctgtactcggagatcggggccatcaccaggtcagccaaggttgactttgatcaacttcaggataatttatgtcagatggagagaagatgcaaagcttcatgggatcacctcaaggcaattgcaaaacatgaaatgaaaccagttttaaaacaacggatgtcagagttcctgaaagactgtgcagagcgaattataattttaaagattgtccatagaaggataatcaacagattccactcctttttactctttatgggccatccaccttatgcaattcgggaagtgaacataaacaaattctgcaggattattagtgaatttgcactagagtatcgcacaaccagggaaagggttttgcagcagaaacagaaacgggccaaccacagagagagaaataagaccagagggaagatgatcaccgattctggcaagttctccggcagttctccggcgcccccaagccagccgcagggtctgagctatgcggaggacgcggctgagcacgagaacatgaaggctgtgctgaaaacctcgtccccctccgtggaggacgccacccccgcgctgggcgtccgcacacgcagccgagcaagccgaggatccactagttcctggactatgggaactgatgactcgcccaatgtcacagatgatgcagctgatgagatcatggaccgcatcgtcaagtcagccacccaagtgcccagtcagcgagtggtgccgagggagaggaaacgatcccgggccaaccggaaatctttgcgaagaaccctgaagagcggcctgaccccagaagaagccagagccctgggcttggttggcacctcggagttgcagctgtgacactcataggttactcccaggagtgtgctgagcagaaggcaagctcttgctggatgaaacccctccaggtggggttggggagacttgatattcacatccaacagtttgaaaagggagagctcaattcccagcgtcaccccatggcttgtgttgcctgctacgcattgacttggatctccaggagtcccctgcacataccttctccatcgtgtcagctgtgtttctcttgattccgtgacacccggtttattagttcaaaagtgtgacaccttttctgggcaaggaacagcccctttaaggagcaaatcacttctgtcacagttattatggtaatatgaggcaatctgattagcttcacagactgagtctccacaacaccaaaatatccagatgtaaaccccaaacttgtacacaaaagaaagcacagattgtttacctgttgtggattttagatgtaacaaatgtttatacaaatacatacatgtacaccatgtttcaaatactaaataaatagagtttaatgcc

SEQ ID NO: 7529 - DNA, 4154 bp, Homo sapiens
  source 1..4154: mol_type = unassigned DNA
ctgcgagtccgcgagccagcgagctgcggctgcggcctcccctgcgcgcagctacccgggcgtcccggcccgcggccccgctaaccccggggcccgcgcccccgcggcagggatgcatcatggccacgctggcttgccgggtgcagttcttggacgacacggaccctttcaacagcaccaacttccccgagcccagccggccgccgctgttcacgttccgcgaggacctcgcgctcggcacccagctggcgggggtccataggctgctgcaggcgccgcacaagctggatgactgtactctgcagctctctcacaatggcgcctacctggatttggaggccaccctggcagagcagcgggatgagttggaaggcttccaggatgacgccgggcggggcaagaagcacagcatcatcctaaggacgcagctgtctgtgagggtccatgcctgcatcgaaaaactatacaactccagcggacgagatttgagaagggccctcttctccctgaagcagatatttcaggatgacaaggatttggtgcatgaatttgtagtggctgaaggtctgacatgtttgatcaaggtgggagctgaggctgatcagaactatcagaactacatcttaagggctttgggccagattatgttgtatgtggatggaatgaatggagtaataaaccgcaatgaaaccattcagtggctgtacactctcattgggtcaaagttccgcctggtggtgaagacagccctgaagctgctgctcgtctttgtagagtactcggagtccaacgcacctctcctaattcaggctgtcactgctgttgacacgaaaagaggggtcaaaccttggtcaaatatcatggaaatcctggaggaaaaagatggagttgatacggagctactggtttatgcaatgactttggtgaacaagacgttatcaggactaccagaccaagacaccttctacgacgtcgtggactgcctggaggagctgggcattgctgctgtgtcccagaggcacttgaacaagaaagggactgacctggacttagtggagcaactcaacatttatgaggtggcgctcaggcacgaggatggcgatgagaccacggagccaccccccagtgggtgccgggaccggaggagggccagcgtgtgttccagtggcggaggcgagcaccggggcctggaccgcagaaggagccgcaggcactcggtgcagagcatcaagagcaccctgtcggcccccaccagtccctgctcccagtcagctcccagcttcaagcccaaccaagtgcgagatctgcgtgaaaaatacagcaattttggcaataactcttatcactcctcaagaccctcatctggatccagtgtgcccaccacccccacatcatccgtctcacccccacaggaggccaggttggaaaggtcatcaccgagtggtcttctcacatcatccttcaggcagcaccaagagtcactggcagcagagagagagaggcggcggcaggagagagaagaaaggttgcagagaatagagcgggaagaaagaaacaaattcagatacaaatacttggaacagttggcagctgaggagcacgagaaggagctgagaagccggagtgtgagccggggcagagccgacctctccttggacctgacctcgccagcagccccagcctgcctggctcctctgagccatagcccctcatcttcagactctcaagaggctctcacggtgtctgcctcctccccaggaacccctcaccatccccaagcaagtgccggggatcctgaacccgaatcagaggcagaaccggaagcagaggcaggggcggggcaggttgctgatgaagctggccaggacatagcctctgcccacgagggtgcagagactgaagtggagcaggcactagagcaagagccggaagaaagagcctccctcagtgaaaaagagaggcagaacgagggggtgaacgagagggacaactgctctgcctccagcgtctcgtcctccagcagcacgttggagagggaggagaaggaggacaagctctccagggacaggacaactggtaaatgaagccccttgtttcagtcggcatgtgccagggaggcctggggtgcaggggctggttctctaagagcttgtccacaggctggcctctgaggtgacctgggtcaacccactcatgtggctgtgtcacccagtgtctggggacaaggagtgtggccacgctggcagccagccagcagccttctgccctgtagaaagacagcccccaaactgtctgccacaccatcacattcatcacctccacacctggggaaaagggccccgataaggagggcttttcctgaggaataagccccagaagagaaacctctcacttccccctgactgttccattgtgaataatagtaaggttgataatagtaaggctttttccgtttttgatataagtttagaaactgtcacattgtcatctattcctttaaaaatgtgtttactgaagtgtgttaatcattttgactggacatttcagactgggaaagatttgtttaaatggattgaatgagtatttccaaaaaattgtacacagtttactgaggtcaatttgatgtactggaatatagataatttgttttctatattacactcataactattcttttctttgtataaagtatatgcttttccttatggaagtatatctttttgatgttacacttaatactcattcagttctcctatgaatggtaactttagaattagggaccaaatggaatgttagattataggtttggtttagcctgaaagaacctcaccaaggacttgagaagggtgccacagagggttataggaatcgtgaataattcatatgatctgtgacaccacaggattacttttcctacccatgacttgtgtgctatcaaggtggtagaatgcctccttcctcaacaaacactcctaaccagtggagtcatgtcttatgggccagcctttcttaagctacatatgagtggcacccactcgagtcgatgtcttaggcccaaagggcaatatgacacctctacaaaggcctgccaaccagtgccatgacccatgaatggcttattcattcctagattaaaaatacattgtctcagaagcatggatgaacgaatgaatgaaaccagaatgtcttccaatagacctgtcagtcaatggcgtagtctaaaatagttactatttggattttttcccagttagaatatactactagattttatgctttatattgctggtcactatgatgcagtaaaaacaagaagataaaagactttattagtttacatcttaggaattattgcattgaaaatccagtgtcttcatttggttgaatatgtatgtgccaagaggtattatatatactgatatttacttaatttctttcaaagtcagattacagttagtcccccaaattcttcttatcattcatattaatgtaattattgtcataatactgggtgtagggtaagtcttattgatcagattggtcttaaatcatgttttatttattaggaatagctttaagaattattaatcataactgggtttagcaggcctaaaacatatcaagaaattggattagtaaaaatataccaggcgacagggctttcttggatcagattgtccaatattcttccaaagaaggacaattttccaaaagtggaaaccgttcccagtgaagaaccactgactttctaccaaagtgggcaatgtccaagtatttagaagcagaaattagggctttgcaatgatttttctgctttgcttcagtgctgttatgagagttggtcatgtttatttactgtagcttattggttcctaaaaaatctcactgctcacaggcatcatcagccactgtggagtccgggcagctatgtcattatagctcttgcttttcagagtgctgtcaaatcacagagcaaccttagagataaaaaattattctcaaacgtatttctaatgattatgtcaaaaatgaatttgtaggacttgaaaaagtctcattccagttatgtggtttaatttttctttgtttaatgtgttctactttagggcatgcatgtgagaagctttatcataacatacattttacttttttgt

SEQ ID NO: 7530 - DNA, 4869 bp, Homo sapiens
  source 1..4869: mol_type = unassigned DNA
atggccacgctggcttgccgggtgcagttcttggacgacacggaccctttcaacagcaccaacttccccgagcccagccggccgccgctgttcacgttccgcgaggacctcgcgctcggcacccagctggcgggggtccataggctgctgcaggcgccgcacaagctggatgactgtactctgcagctctctcacaatggcgcctacctggatttggaggccaccctggcagagcagcgggatgagttggaaggcttccaggatgacgccgggcggggcaagaagcacagcatcatcctaaggacgcagctgtctgtgagggtccatgcctgcatcgaaaaactatacaactccagcggacgagatttgagaagggccctcttctccctgaagcagatatttcaggatgacaaggatttggtgcatgaatttgtagtggctgaaggtctgacatgtttgatcaaggtgggagctgaggctgatcagaactatcagaactacatcttaagggctttgggccagattatgttgtatgtggatggaatgaatggagtaataaaccgcaatgaaaccattcagtggctgtacactctcattgggtcaaagttccgcctggtggtgaagacagccctgaagctgctgctcgtctttgtagagtactcggagtccaacgcacctctcctaattcaggctgtcactgctgttgacacgaaaagaggggtcaaaccttggtcaaatatcatggaaatcctggaggaaaaagatggagttgatacggagctactggtttatgcaatgactttggtgaacaagacgttatcaggactaccagaccaagacaccttctacgacgtcgtggactgcctggaggagctgggcattgctgctgtgtcccagaggcacttgaacaagaaagggactgacctggacttagtggagcaactcaacatttatgaggtggcgctcaggcacgaggatggcgatgagaccacggagccaccccccagtgggtgccgggaccggaggagggccagcgtgtgttccagtggcggaggcgagcaccggggcctggaccgcagaaggagccgcaggcactcggtgcagagcatcaagagcaccctgtcggcccccaccagtccctgctcccagtcagctcccagcttcaagcccaaccaagtgcgagatctgcgtgaaaaggaggaggaggaggaagaggagcagccaatcacggagcccagttccgaagaagagagagaggatgatgcttcctgtcagggcaaggacagcaaggtcggcgctgcctcagggcagagccccactggaagggatgctgctcccaagagctctgccctccctgctgtctcgaatgccagctcgcagggaaagccgcttctggttggcactgcaggcgggaccacctggcacagtgggtcctctgggtctgaggccaccccatctgccctcctgtcaccccctgcctcagctgctcggccctcctccgccacaccaggctccctgaaggtgtcaccgaccatagacaagctgccctacgtgccccacagccccttccacctcttctcctatgactttgaggactcctccctgtccaccaaggagaaggaagcagagtcccagaaggaaaacagttcctctgattctttctctttgagcacatattctgcctctgagccttaccacttccgatctttctcttctaatagatacagcaattttggcaataactcttatcactcctcaagaccctcatctggatccagtgtgcccaccacccccacatcatccgtctcacccccacaggaggccaggttggaaaggtcatcaccgagtggtcttctcacatcatccttcaggcagcaccaagagtcactggcagcagagagagagaggcggcggcaggagagagaagaaaggttgcagagaatagagcgggaagaaagaaacaaattcagccgagattatttagacaaaagagaggagcaaaggcaagcaagagaagaaagatacaaatacttggaacagttggcagctgaggagcacgagaaggagctgagaagccggagtgtgagccggggcagagccgacctctccttggacctgacctcgccagcagccccagcctgcctggctcctctgagccatagcccctcatcttcagactctcaagaggctctcacggtgtctgcctcctccccaggaacccctcaccatccccaagcaagtgccggggatcctgaacccgaatcagaggcagaaccggaagcagaggcaggggcggggcaggttgctgatgaagctggccaggacatagcctctgcccacgagggtgcagagactgaagtggagcaggcactagagcaagagccggaagaaagagcctccctcagtgaaaaagagaggcagaacgagggggtgaacgagagggacaactgctctgcctccagcgtctcgtcctccagcagcacgttggagagggaggagaaggaggacaagctctccagggacaggacaactggtttgtggcccgcaggtgtccaggatgcaggtgtaaatggacagtgtggcgacatcctcaccaacaaacggttcatgcttgacatgctgtatgcccataacaggaagtctccggatgatgaggagaagggggatggggaggctgggaggacccagcaggaggcagaggcggtagccagccttgctaccaggatatccaccctgcaggccaactctcagacccaggatgagagtgtcaggagggtggatgtcggctgtttggacaatcggggcagtgtgaaagcatttgctgagaaattcaacagtggggacctggggagaggttccatctcccctgatgctgagcccaatgacaaggtcccagaaacagcgccggtgcagccgaagacagagtctgattacatctgggaccagctcatggccaatccaagagagctcagaatccaagacatggatttcactgacctgggggaggaggatgacattgatgtcctagatgtggacctgggtcacagggaggcccctgggccacctcccccacccccacccacctttctgggtttgccgcccccaccccctccgcccctgttggacagcattcctccccctcctgtccctggtaatttattggttcctcctcctccagtgttcaacgctcctcagggcttagggtggtcccaggtacccaggggtcagcccacattcactaagaaaaagaagaccatccgtttgttctggaatgaagttcggccttttgactggccatgtaaaaacaaccgacgctgcagagaattcctgtggtcaaaactggaacccattaaggtggacacttccagactggagcacctgtttgagtctaaatccaaggaactgtctgtctcaaagaaaactgctgcagatggaaaaaggcaagagatcattgttctggattccaagaggagtaacgccatcaatattggtctgacggtgctgccccctccaaggacgattaagatcgccattttgaattttgatgagtatgccttaaacaaagaaggaatcgagaaaattctaacgatgattcccaccgatgaggagaagcagaaaatccaggaagctcagctggccaaccctgaaatccccctgggcagtgcagagcagttcctcctcaccctgtcctccatcagcgagctctctgcacgacttcacctctgggcattcaaaatggattatgaaactacagaaaaggaagtagcagaaccactcctggacctgaaggaaggaatagaccagttggagaacaataaaaccttgggctttatcctgtctactctcttagccattgggaactttctaaatggaactaatgccaaagcgtttgagttaagctacctcgagaaggttccagaagtcaaagacacagtgcacaagcagtcgcttctccaccatgtgtgcaccatggtggtagaaaacttcccagacagctccgatctgtactcggagatcggggccatcaccaggtcagccaaggttgactttgatcaacttcaggataatttatgtcagatggagagaagatgcaaagcttcatgggatcacctcaaggcaattgcaaaacatgaaatgaaaccagttttaaaacaacggatgtcagagttcctgaaagactgtgcagagcgaattataattttaaagattgtccatagaaggataatcaacagattccactcctttttactctttatgggccatccaccttatgcaattcgggaagtgaacataaacaaattctgcaggattattagtgaatttgcactagagtatcgcacaaccagggaaagggttttgcagcagaaacagaaacgggccaaccacagagagagaaataagaccagagggaagatgatcaccgatactgatgaggaggaggaagttgagtctggcaagttctccggcagttctccggcgcccccaagccagccgcagggtctgagctatgcggaggacgcggctgagcacgagaacatgaaggctgtgctgaaaacctcgtccccctccgtggaggacgccacccccgcgctgggcgtccgcacacgcagccgagcaagccgaggatccactagttcctggactatgggaactgatgactcgcccaatgtcacagatgatgcagctgatgagatcatggaccgcatcgtcaagtcagccacccaagtgcccagtcagcgagtggtgccgagggagaggaaacgatcccgggccaaccggaaatctttgcgaagaaccctgaagagcggcctgaccccagaagaagccagagccctgggcttggttggcacctcggagttgcagctgtga

SEQ ID NO: 7531 - DNA, 4518 bp, Homo sapiens
  source 1..4518: mol_type = unassigned DNA
atggccacgctggcttgccgggtgcagttcttggacgacacggaccctttcaacagcaccaacttccccgagcccagccggccgccgctgttcacgttccgcgaggacctcgcgctcggcacccagctggcgggggtccataggctgctgcaggcgccgcacaagctggatgactgtactctgcagctctctcacaatggcgcctacctggatttggaggccaccctggcagagcagcgggatgagttggaaggcttccaggatgacgccgggcggggcaagaagcacagcatcatcctaaggacgcagctgtctgtgagggtccatgcctgcatcgaaaaactatacaactccagcggacgagatttgagaagggccctcttctccctgaagcagatatttcaggatgacaaggatttggtgcatgaatttgtagtggctgaaggtctgacatgtttgatcaaggtgggagctgaggctgatcagaactatcagaactacatcttaagggctttgggccagattatgttgtatgtggatggaatgaatggagtaataaaccgcaatgaaaccattcagtggctgtacactctcattgggtcaaagttccgcctggtggtgaagacagccctgaagctgctgctcgtctttgtagagtactcggagtccaacgcacctctcctaattcaggctgtcactgctgttgacacgaaaagaggggtcaaaccttggtcaaatatcatggaaatcctggaggaaaaagatggagttgatacggagctactggtttatgcaatgactttggtgaacaagacgttatcaggactaccagaccaagacaccttctacgacgtcgtggactgcctggaggagctgggcattgctgctgtgtcccagaggcacttgaacaagaaagggactgacctggacttagtggagcaactcaacatttatgaggtggcgctcaggcacgaggatggcgatgagaccacggagccaccccccagtgggtgccgggaccggaggagggccagcgtgtgttccagtggcggaggcgagcaccggggcctggaccgcagaaggagccgcaggcactcggtgcagagcatcaagagcaccctgtcggcccccaccagtccctgctcccagtcagctcccagcttcaagcccaaccaagtgcgagatctgcgtgaaaaatacagcaattttggcaataactcttatcactcctcaagaccctcatctggatccagtgtgcccaccacccccacatcatccgtctcacccccacaggaggccaggttggaaaggtcatcaccgagtggtcttctcacatcatccttcaggcagcaccaagagtcactggcagcagagagagagaggcggcggcaggagagagaagaaaggttgcagagaatagagcgggaagaaagaaacaaattcagatacaaatacttggaacagttggcagctgaggagcacgagaaggagctgagaagccggagtgtgagccggggcagagccgacctctccttggacctgacctcgccagcagccccagcctgcctggctcctctgagccatagcccctcatcttcagactctcaagaggctctcacggtgtctgcctcctccccaggaacccctcaccatccccaagcaagtgccggggatcctgaacccgaatcagaggcagaaccggaagcagaggcaggggcggggcaggttgctgatgaagctggccaggacatagcctctgcccacgagggtgcagagactgaagtggagcaggcactagagcaagagccggaagaaagagcctccctcagtgaaaaagagaggcagaacgagggggtgaacgagagggacaactgctctgcctccagcgtctcgtcctccagcagcacgttggagagggaggagaaggaggacaagctctccagggacaggacaactggtttgtggcccgcaggtgtccaggatgcaggtgtaaatggacagtgtggcgacatcctcaccaacaaacggttcatgcttgacatgctgtatgcccataacaggaagtctccggatgatgaggagaagggggatggggaggctgggaggacccagcaggaggcagaggcggtagccagccttgctaccaggatatccaccctgcaggccaactctcagacccaggatgagagtgtcaggagggtggatgtcggctgtttggacaatcggggcagtgtgaaagcatttgctgagaaattcaacagtggggacctggggagaggttccatctcccctgatgctgagcccaatgacaaggtcccagaaacagcgccggtgcagccgaagacagagtctgattacatctgggaccagctcatggccaatccaagagagctcagaatccaagacatggatttcactgacctgggggaggaggatgacattgatgtcctagatgtggacctgggtcacagggaggcccctgggccacctcccccacccccacccacctttctgggtttgccgcccccaccccctccgcccctgttggacagcattcctccccctcctgtccctggtaatttattggttcctcctcctccagtgttcaacgctcctcagggcttagggtggtcccaggtacccaggggtcagcccacattcactaagaaaaagaagaccatccgtttgttctggaatgaagttcggccttttgactggccatgtaaaaacaaccgacgctgcagagaattcctgtggtcaaaactggaacccattaaggtggacacttccagactggagcacctgtttgagtctaaatccaaggaactgtctgtctcaaagaaaactgctgcagatggaaaaaggcaagagatcattgttctggattccaagaggagtaacgccatcaatattggtctgacggtgctgccccctccaaggacgattaagatcgccattttgaattttgatgagtatgccttaaacaaagaaggaatcgagaaaattctaacgatgattcccaccgatgaggagaagcagaaaatccaggaagctcagctggccaaccctgaaatccccctgggcagtgcagagcagttcctcctcaccctgtcctccatcagcgagctctctgcacgacttcacctctgggcattcaaaatggattatgaaactacagaaaaggaagtagcagaaccactcctggacctgaaggaaggaatagaccagttggagaacaataaaaccttgggctttatcctgtctactctcttagccattgggaactttctaaatggaactaatgccaaagcgtttgagttaagctacctcgagaaggttccagaagtcaaagacacagtgcacaagcagtcgcttctccaccatgtgtgcaccatggtggtagaaaacttcccagacagctccgatctgtactcggagatcggggccatcaccaggtcagccaaggttgactttgatcaacttcaggataatttatgtcagatggagagaagatgcaaagcttcatgggatcacctcaaggcaattgcaaaacatgaaatgaaaccagttttaaaacaacggatgtcagagttcctgaaagactgtgcagagcgaattataattttaaagattgtccatagaaggataatcaacagattccactcctttttactctttatgggccatccaccttatgcaattcgggaagtgaacataaacaaattctgcaggattattagtgaatttgcactagagtatcgcacaaccagggaaagggttttgcagcagaaacagaaacgggccaaccacagagagagaaataagaccagagggaagatgatcaccgattctggcaagttctccggcagttctccggcgcccccaagccagccgcagggtctgagctatgcggaggacgcggctgagcacgagaacatgaaggctgtgctgaaaacctcgtccccctccgtggaggacgccacccccgcgctgggcgtccgcacacgcagccgagcaagccgaggatccactagttcctggactatgggaactgatgactcgcccaatgtcacagatgatgcagctgatgagatcatggaccgcatcgtcaagtcagccacccaagtgcccagtcagcgagtggtgccgagggagaggaaacgatcccgggccaaccggaaatctttgcgaagaaccctgaagagcggcctgaccccagaagaagccagagccctgggcttggttggcacctcggagttgcagctgtgacactcataggttactcccaggagtgtgctgagcagaaggcaagctcttgctggatgaaacccctccaggtggggttggggagacttgatattcacatccaacagtttgaaaagggagagctcaattcccagcgtcaccccatggcttgtgttgcctgctacgcattgacttggatctccaggagtcccctgcacataccttctccatcgtgtcagctgtgtttctcttgattccgtgacacccggttta

SEQ ID NO: 7532 - DNA, 3035 bp, Homo sapiens
  source 1..3035: mol_type = unassigned DNA
agtcggctccctcactgcctctggacttgccaaagttttgttgaggtggagaggtcgccacaggctgaaagcattaaggagaaccaccctggcatgcggagcagtcggtgtgctttggaggaaaacatacaaaccagctttgggccagattatgttgtatgtggatggaatgaatggagtaataaaccgcaatgaaaccattcagtggctgtacactctcattgggtcaaagttccgcctggtggtgaagacagccctgaagctgctgctcgtctttgtagagtactcggagtccaacgcacctctcctaattcaggctgtcactgctgttgacacgaaaagaggggtcaaaccttggtcaaatatcatggaaatcctggaggaaaaagatggagttgatacggagctactggtttatgcaatgactttggtgaacaagacgttatcaggactaccagaccaagacaccttctacgacgtcgtggactgcctggaggagctgggcattgctgctgtgtcccagaggcacttgaacaagaaagggactgacctggacttagtggagcaactcaacatttatgaggtggcgctcaggcacgaggatggcgatgagaccacggagccaccccccagtgggtgccgggaccggaggagggccagcgtgtgttccagtggcggaggcgagcaccggggcctggaccgcagaaggagccgcaggcactcggtgcagagcatcaagagcaccctgtcggcccccaccagtccctgctcccagtcagctcccagcttcaagcccaaccaagtgcgagatctgcgtgaaaaatacagcaattttggcaataactcttatcactcctcaagaccctcatctggatccagtacccaggggtcagcccacattcactaagaaaaagaagaccatccgtttgttctggaatgaagttcggccttttgactggccatgtaaaaacaaccgacgctgcagagaattcctgtggtcaaaactggaacccattaaggtggacacttccagactggagcacctgtttgagtctaaatccaaggaactgtctgtctcaaagaaaactgctgcagatggaaaaaggcaagagatcattgttctggattccaagaggagtaacgccatcaatattggtctgacggtgctgccccctccaaggacgattaagatcgccattttgaattttgatgagtatgccttaaacaaagaaggaatcgagaaaattctaacgatgattcccaccgatgaggagaagcagaaaatccaggaagctcagctggccaaccctgaaatccccctgggcagtgcagagcagttcctcctcaccctgtcctccatcagcgagctctctgcacgacttcacctctgggcattcaaaatggattatgaaactacagaaaaggaagtagcagaaccactcctggacctgaaggaaggaatagaccagttggagaacaataaaaccttgggctttatcctgtctactctcttagccattgggaactttctaaatggaactaatgccaaagcgtttgagttaagctacctcgagaaggttccagaagtcaaagacacagtgcacaagcagtcgcttctccaccatgtgtgcaccatggtggtagaaaacttcccagacagctccgatctgtactcggagatcggggccatcaccaggtcagccaaggttgactttgatcaacttcaggataatttatgtcagatggagagaagatgcaaagcttcatgggatcacctcaaggcaattgcaaaacatgaaatgaaaccagttttaaaacaacggatgtcagagttcctgaaagactgtgcagagcgaattataattttaaagattgtccatagaaggataatcaacagattccactcctttttactctttatgggccatccaccttatgcaattcgggaagtgaacataaacaaattctgcaggattattagtgaatttgcactagagtatcgcacaaccagggaaagggttttgcagcagaaacagaaacgggccaaccacagagagagaaataagaccagagggaagatgatcaccgattctggcaagttctccggcagttctccggcgcccccaagccagccgcagggtctgagctatgcggaggacgcggctgagcacgagaacatgaaggctgtgctgaaaacctcgtccccctccgtggaggacgccacccccgcgctgggcgtccgcacacgcagccgagcaagccgaggatccactagttcctggactatgggaactgatgactcgcccaatgtcacagatgatgcagctgatgagatcatggaccgcatcgtcaagtcagccacccaagtgcccagtcagcgagtggtgccgagggagaggaaacgatcccgggccaaccggaaatctttgcgaagaaccctgaagagcggcctgaccccagaagaagccagagccctgggcttggttggcacctcggagttgcagctgtgacactcataggttactcccaggagtgtgctgagcagaaggcaagctcttgctggatgaaacccctccaggtggggttggggagacttgatattcacatccaacagtttgaaaagggagagctcaattcccagcgtcaccccatggcttgtgttgcctgctacgcattgacttggatctccaggagtcccctgcacataccttctccatcgtgtcagctgtgtttctcttgattccgtgacacccggtttattagttcaaaagtgtgacaccttttctgggcaaggaacagcccctttaaggagcaaatcacttctgtcacagttattatggtaatatgaggcaatctgattagcttcacagactgagtctccacaacaccaaaatatccagatgtaaaccccaaacttgtacacaaaagaaagcacagattgtttacctgttgtggattttagatgtaacaaatgtttatacaaatacatacatgtacaccatgtttcaaatactaaataaatagagtttaatgcc

SEQ ID NO: 7533 - DNA, 4126 bp, Homo sapiens
  source 1..4126: mol_type = unassigned DNA
gttccgcctggtggtgaagacagccctgaagctgctgctcgtctttgtagagtactcggagtccaacgcacctctcctaattcaggctgtcactgctgttgacacgaaaagaggggtcaaaccttggtcaaatatcatggaaatcctggaggaaaaagatggagttgatacggagctactggtttatgcaatgactttggtgaacaagacgttatcaggactaccagaccaagacaccttctacgacgtcgtggactgcctggaggagctgggcattgctgctgtgtcccagaggcacttgaacaagaaagggactgacctggacttagtggagcaactcaacatttatgaggtggcgctcaggcacgaggatggcgatgagaccacggagccaccccccagtgggtgccgggaccggaggagggccagcgtgtgttccagtggcggaggcgagcaccggggcctggaccgcagaaggagccgcaggcactcggtgcagagcatcaagagcaccctgtcggcccccaccagtccctgctcccagtcagctcccagcttcaagcccaaccaagtgcgagatctgcgtgaaaagtcatcaccgagtggtcttctcacatcatccttcaggcagcaccaagagtcactggcagcagagagagagaggcggcggcaggagagagaagaaaggttgcagagaatagagcgggaagaaagaaacaaattcagccgagattatttagacaaaagagaggagcaaaggcaagcaagagaagaaagatacaaatacttggaacagttggcagctgaggagcacgagaaggagctgagaagccggagtgtgagccggggcagagccgacctctccttggacctgacctcgccagcagccccagcctgcctggctcctctgagccatagcccctcatcttcagactctcaagaggctctcacggtgtctgcctcctccccaggaacccctcaccatccccaagcaagtgccggggatcctgaacccgaatcagaggcagaaccggaagcagaggcaggggcggggcaggttgctgatgaagctggccaggacatagcctctgcccacgagggtgcagagactgaagtggagcaggcactagagcaagagccggaagaaagagcctccctcagtgaaaaagagaggcagaacgagggggtgaacgagagggacaactgctctgcctccagcgtctcgtcctccagcagcacgttggagagggaggagaaggaggacaagctctccagggacaggacaactggtttgtggcccgcaggtgtccaggatgcaggtgtaaatggacagtgtggcgacatcctcaccaacaaacggttcatgcttgacatgctgtatgcccataacaggaagtctccggatgatgaggagaagggggatggggaggctgggaggacccagcaggaggcagaggcggtagccagccttgctaccaggatatccaccctgcaggccaactctcagacccaggatgagagtgtcaggagggtggatgtcggctgtttggacaatcggggcagtgtgaaagcatttgctgagaaattcaacagtggggacctggggagaggttccatctcccctgatgctgagcccaatgacaaggtcccagaaacagcgccggtgcagccgaagacagagtctgattacatctgggaccagctcatggccaatccaagagagctcagaatccaagacatggatttcactgacctgggggaggaggatgacattgatgtcctagatgtggacctgggtcacagggaggcccctgggccacctcccccacccccacccacctttctgggtttgccgcccccaccccctccgcccctgttggacagcattcctccccctcctgtccctggtaatttattggttcctcctcctccagtgttcaacgctcctcagggcttagggtggtcccaggtacccaggggtcagcccacattcactaagaaaaagaagaccatccgtttgttctggaatgaagttcggccttttgactggccatgtaaaaacaaccgacgctgcagagaattcctgtggtcaaaactggaacccattaaggtggacacttccagactggagcacctgtttgagtctaaatccaaggaactgtctgtctcaaagaaaactgctgcagatggaaaaaggcaagagatcattgttctggattccaagaggagtaacgccatcaatattggtctgacggtgctgccccctccaaggacgattaagatcgccattttgaattttgatgagtatgccttaaacaaagaaggaatcgagaaaattctaacgatgattcccaccgatgaggagaagcagaaaatccaggaagctcagctggccaaccctgaaatccccctgggcagtgcagagcagttcctcctcaccctgtcctccatcagcgagctctctgcacgacttcacctctgggcattcaaaatggattatgaaactacagaaaaggaagtagcagaaccactcctggacctgaaggaaggaatagaccagttggagaacaataaaaccttgggctttatcctgtctactctcttagccattgggaactttctaaatggaactaatgccaaagcgtttgagttaagctacctcgagaaggttccagaagtcaaagacacagtgcacaagcagtcgcttctccaccatgtgtgcaccatggtggtagaaaacttcccagacagctccgatctgtactcggagatcggggccatcaccaggtcagccaaggttgactttgatcaacttcaggataatttatgtcagatggagagaagatgcaaagcttcatgggatcacctcaaggcaattgcaaaacatgaaatgaaaccagttttaaaacaacggatgtcagagttcctgaaagactgtgcagagcgaattataattttaaagattgtccatagaaggataatcaacagattccactcctttttactctttatgggccatccaccttatgcaattcgggaagtgaacataaacaaattctgcaggattattagtgaatttgcactagagtatcgcacaaccagggaaagggttttgcagcagaaacagaaacgggccaaccacagagagagaaataagaccagagggaagatgatcaccgattctggcaagttctccggcagttctccggcgcccccaagccagccgcagggtctgagctatgcggaggacgcggctgagcacgagaacatgaaggctgtgctgaaaacctcgtccccctccgtggaggacgccacccccgcgctgggcgtccgcacacgcagccgagcaagccgaggatccactagttcctggactatgggaactgatgactcgcccaatgtcacagatgatgcagctgatgagatcatggaccgcatcgtcaagtcagccacccaagtgcccagtcagcgagtggtgccgagggagaggaaacgatcccgggccaaccggaaatctttgcgaagaaccctgaagagcggcctgaccccagaagaagccagagccctgggcttggttggcacctcggagttgcagctgtgacactcataggttactcccaggagtgtgctgagcagaaggcaagctcttgctggatgaaacccctccaggtggggttggggagacttgatattcacatccaacagtttgaaaagggagagctcaattcccagcgtcaccccatggcttgtgttgcctgctacgcattgacttggatctccaggagtcccctgcacataccttctccatcgtgtcagctgtgtttctcttgattccgtgacacccggtttattagttcaaaagtgtgacaccttttctgggcaaggaacagcccctttaaggagcaaatcacttctgtcacagttattatggtaatatgaggcaatctgattagcttcacagactgagtctccacaacaccaaaatatccagatgtaaaccccaaacttgtacacaaaagaaagcacagattgtttacctgttgtggattttagatgtaacaaatgtttatacaaatacatacatgtacaccatgtttcaaatactaaataaatagagtttaatgcc

SEQ ID NO: 7534 - DNA, 885 bp, Homo sapiens
  source 1..885: mol_type = unassigned DNA; mol_type = unassigned DNA
gtgtgatgctgccatttcccccaatttgcttggttatgagtgacgtgggatttttaatcattagcatcttggctttgctgggtgtttttggcaggctgactctccagccagccctgcactgtgctgtgtgcatcaggaaaccggctcattctgcaggtgtttcatccataaacaagcatcagccacaggctcctctttcgtttgacggaaaccctttggaatttaactttcagatacaaatacttggaacagttggcagctgaggagcacgagaaggagctgagaagccggagtgtgagccggggcagagccgacctctccttggacctgacctcgccagcagccccagcctgcctggctcctctgagccatagcccctcatcttcagactctcaagaggctctcacggtgtctgcctcctccccaggaacccctcaccatccccaagcaagtgccggggatcctgaacccgaatcagaggcagaaccggaagcagaggcaggggcggggcaggttgctgatgaagctggccaggacatagcctctgcccacgagggtgcagagactgaagtggagcaggcactagagcaagagccggaagaaagagcctccctcagtgaaaaagagaggcagaacgagggggtgaacgagagggacaactgctctgcctccagcgtctcgtcctccagcagcacgttggagagggaggagaaggaggacaagctctccagggacaggacaactggtttgtggcccgcaggtgtccaggatgcaggtgtaaatggacagtgtggcgacatcctcaccaacaaacggttcatgcttgacatgctgtatgcccataacaggaagtctccggatgatgaggagaagggggatggggag

SEQ ID NO: 7535 - DNA, 2112 bp, Homo sapiens
  source 1..2112: mol_type = unassigned DNA; mol_type = unassigned DNA
cgtttgttctggaatgaagttcggccttttgactggccatgtaaaaacaaccgacgctgcagagaattcctgtggtcaaaactggaacccattaaggtggacacttccagactggagcacctgtttgagtctaaatccaaggaactgtctgtctcaaagaaaactgctgcagatggaaaaaggcaagagatcattgttctggattccaagaggagtaacgccatcaatattggtctgacggtgctgccccctccaaggacgattaagatcgccattttgaattttgatgagtatgccttaaacaaagaaggaatcgagaaaattctaacgatgattcccaccgatgaggagaagcagaaaatccaggaagctcagctggccaaccctgaaatccccctgggcagtgcagagcagttcctcctcaccctgtcctccatcagcgagctctctgcacgacttcacctctgggcattcaaaatggattatgaaactacagaaaaggaagtagcagaaccactcctggacctgaaggaaggaatagaccagttggagaacaataaaaccttgggctttatcctgtctactctcttagccattgggaactttctaaatggaactaatgccaaagcgtttgagttaagctacctcgagaaggttccagaagtcaaagacacagtgcacaagcagtcgcttctccaccatgtgtgcaccatggtggtagaaaacttcccagacagctccgatctgtactcggagatcggggccatcaccaggtcagccaaggttgactttgatcaacttcaggataatttatgtcagatggagagaagatgcaaagcttcatgggatcacctcaaggcaattgcaaaacatgaaatgaaaccagttttaaaacaacggatgtcagagttcctgaaagactgtgcagagcgaattataattttaaagattgtccatagaaggataatcaacagattccactcctttttactctttatgggccatccaccttatgcaattcgggaagtgaacataaacaaattctgcaggattattagtgaatttgcactagagtatcgcacaaccagggaaagggttttgcagcagaaacagaaacgggccaaccacagagagagaaataagaccagagggaagatgatcaccgattctggcaagttctccggcagttctccggcgcccccaagccagccgcagggtctgagctatgcggaggacgcggctgagcacgagaacatgaaggctgtgctgaaaacctcgtccccctccgtggaggacgccacccccgcgctgggcgtccgcacacgcagccgagcaagccgaggatccactagttcctggactatgggaactgatgactcgcccaatgtcacagatgatgcagctgatgagatcatggaccgcatcgtcaagtcagccacccaagtgcccagtcagcgagtggtgccgagggagaggaaacgatcccgggccaaccggaaatctttgcgaagaaccctgaagagcggcctgaccccagaagaagccagagccctgggcttggttggcacctcggagttgcagctgtgacactcataggttactcccaggagtgtgctgagcagaaggcaagctcttgctggatgaaacccctccaggtggggttggggagacttgatattcacatccaacagtttgaaaagggagagctcaattcccagcgtcaccccatggcttgtgttgcctgctacgcattgacttggatctccaggagtcccctgcacataccttctccatcgtgtcagctgtgtttctcttgattccgtgacacccggtttattagttcaaaagtgtgacaccttttctgggcaaggaacagcccctttaaggagcaaatcacttctgtcacagttattatggtaatatgaggcaatctgattagcttcacagactgagtctccacaacaccaaaatatccagatgtaaaccccaaacttgtacacaaaagaaagcacagattgtttacctgttgtggattttagatgtaacaaatgtttatacaaatacatacatgtacaccatgtttcaaatactaaataaatagagtttaatgcc

SEQ ID NO: 7536 - DNA, 1720 bp, Homo sapiens
  source 1..1720: mol_type = unassigned DNA; mol_type = unassigned DNA
acgccatcaatattggtctgacggtgctgccccctccaaggacgattaagatcgccattttgaattttgatgagtatgccttaaacaaagaaggaatcgagaaaattctaacgatgattcccaccgatgaggagaagcagaaaatccaggaagctcagctggccaaccctgaaatccccctgggcagtgcagagcagttcctcctcaccctgtcctccatcagcgagctctctgcacgacttcacctctgggcattcaaaatggattatgaaactacagaaaaggaagtagcagaaccactcctggacctgaaggaaggaatagaccagttggagaacaataaaaccttgggctttatcctgtctactctcttagccattgggaactttctaaatggaactaatgccaaagcgtttgagttaagctacctcgagaaggttccagaagtcaaagacacagtgcacaagcagtcgcttctccaccatgtgtgcaccatggtggtagaaaacttcccagacagctccgatctgtactcggagatcggggccatcaccaggtcagccaaggttgactttgatcaacttcaggataatttatgtcagatggagagaagatgcaaagcttcatgggatcacctcaaggcaattgcaaaacatgaaatgaaaccagttttaaaacaacggatgtcagagttcctgaaagactgtgcagagcgaattataattttaaagattgtccatagaaggataatcaacagattccactcctttttactctttatgggccatccaccttatgcaattcgggaagtgaacataaacaaattctgcaggattattagtgaatttgcactagagtatcgcacaaccagggaaagggttttgcagcagaaacagaaacgggccaaccacagagagagaaataagaccagagggaagatgatcaccgatgatccactagttcctggactatgggaactgatgactcgcccaatgtcacagatgatgcagctgatgagatcatggaccgcatcgtcaagtcagccacccaagtgcccagtcagcgagtggtgccgagggagaggaaacgatcccgggccaaccggaaatctttgcgaagaaccctgaagagcggcctgaccccagaagaagccagagccctgggcttggttggcacctcggagttgcagctgtgacactcataggttactcccaggagtgtgctgagcagaaggcaagctcttgctggatgaaacccctccaggtggggttggggagacttgatattcacatccaacagtttgaaaagggagagctcaattcccagcgtcaccccatggcttgtgttgcctgctacgcattgacttggatctccaggagtcccctgcacataccttctccatcgtgtcagctgtgtttctcttgattccgtgacacccggtttattagttcaaaagtgtgacaccttttctgggcaaggaacagcccctttaaggagcaaatcacttctgtcacagttattatggtaatatgaggcaatctgattagcttcacagactgagtctccacaacaccaaaatatccagatgtaaaccccaaacttgtacacaaaagaaagcacagattgtttacctgttgtggattttagatgtaacaaatgtttatacaaatacatacatgtacaccatgtttcaaatactaaataaatagagtttaatgcc

SEQ ID NO: 7537 - DNA, 1938 bp, Homo sapiens
  source 1..1938: mol_type = unassigned DNA; mol_type = unassigned DNA
tcccgggagcaaggggaaactccgagaggagggcaacagagccagcatcttgccagggccccggaggaggggttccccgctacgcctgtgccggaggagttccagtcaccgagcgaggggcgcaagggtgggtgcatcctgcgctgcggcgggcgcgctacccagacgctggtgtgcagagccacatgaagcctgctggggactgggggccagggagcagcaagccagctgggactgaggcggacgctgtctcagggagacgctgactcgcaaagacactcccttccttgtgcctgggtaaaaagtctcctcctggggtccctggccatcctgaatatccagaatggtgtttctgaagttcttctgcatgagtttcttctgccacctgtgtcaaggctacttcgatggccccctctacccagagatgtccaatgggactctgcaccactacttcgtgcccgatggggactatgaggagaacgatgaccccgagaagtgccagctgctcttcagggtgagtgaccacaggcgctgctcccagggggaggggagccaggttggcagcctgctgagcctcaccctgcgggaggagttcaccgtgctgggccgccaggtggaggatgctgggcgcgtgctggagggcatcagcaaaagcatctcctacgacctagacggggaagagagctatggcaagtacctgcggcgggagtcccaccagatcggggatgcctactccaactcggacaaatccctcactgagctggagagcaagttcaagcagggccaggaacaggacagccggcaggagagcaggctcaacgaggactttctgggaatgctggtccacaccaggtccctgctgaaggagacactggacatctctgtggggctcagggacaaatacgagctgctggccctcaccattaggagccatgggacccgactaggtcggctgaaaaatgattatcttaaagtataggtggaaggatacaaatgctagaaagagggaatcaaatcagccccgttttggagggtgggggacagaagatggggctacatttcccccatacctactatttttttatatcccgatttgcactttgagaatacatctaaggtcatctttcaaaagagaaaaattggacacttgagtgactttgtttttagttttgtttttgtacattatttatgtgattgttatggaattgtcacctggaaagaacaattttaagcaatgtcatttctagatgggtttctaattctgcagagacacccgtttcagccacatctaaaagagcacagtttatgtggtgcggaattaaacttccccatcctgcagattatgtggaaatacccaaagataatagtgcatagctcctttcagcctctagccttcactcctgggctccaaaagctatcccagttgcctgtttttcaaatgaggttcaaggtgctgctttgcatgcctgccaacccatggaagttgtttcttacttcttttctctcttatttattaaccatggtctgagagttgtttttgttctatgtaacagtattgccacaaaactataggcaaatcgtgtttgcagggagatttctgatgcctctgtgggtgtgtgtaagttaaagtggccacatttaagaaggccaagctttgtagtggttgcacagtcacactgatatgctgatttgctctttctcattgtatgtctatgctttgtcatcagtgctatagtaaattacaaagaaataggtagattgtatgaacatacccacaaatgcctatgatttaggttaccaatgtattctttctcatttggggttttgcttctgtctgtctgtttattggaaacttgtacttcaagtagggggaatcctaattctaataactccttagctaagttttattattcaggcaataaacatgttttcatgtaa

SEQ ID NO: 7538 - DNA, 746 bp, Homo sapiens
  source 1..746: mol_type = unassigned DNA; mol_type = unassigned DNA
agctgttttgggtttgaaattccaacatggcagaggctgcagtccgtcttcccttcaaaaacttggaatgatttcaaatcataggcaccttcacttaaccctagcttccattcatcagcaaacacatcggatcgatgctacgctaacctatcgggttctctctccgcgcgttcaggttaaatgaatacctgacgaaagggcccacgtttcaaggcagtgacatttgatagctgagaggaaaagtggctttaatgaaaagcaacctttggaattcctgcttgtgagaaatccaattcagctttttgtgctgccagcaagaaatgatcagtagcaccagtgtttatgcaacatggagacaatgttttcctgcattcttcattccagaagctgatggaggaaaggccctatgagctgtgggctggctctataggccccactgtactttagggaattccagtagcaaaggaataaaatcattttagtcactatgcactaatgtttccgttggtaaaacctctagccttcagttctatttgtacagtctttaatagtcaacctcatttttcttattttgaaaaaaatgttcttccctctaccttgtctttaaacccagtctatttcctgggacaggtctacatcattaaactgcagatggttctttttctattaagcagcaggtatcattcttgtcctgacaggaggaggctccacctgctgccggcccaccaatacttccagctgactgc

SEQ ID NO: 7539 - DNA, 9536 bp, Homo sapiens
  source 1..9536: mol_type = unassigned DNA; mol_type = unassigned DNA
ttttgggtttgaaattccaacatggcagaggctgcagtccgtcttcccttcaaaaacttggaatgatttcaaatcataggcaccttcacttaaccctagcttccattcatcagcaaacacatcggatcgatgctacgctaacctatcgggttctctctccgcgcgttcaggttaaatgaatacctgacgaaagggcccacgtttcaaggcagtgacatttgatagctgagaggaaaagtggctttaatgaaaagcaacctttggaattcctgcttgtgagaaatccaattcagctttttgtgctgccagcaagaaatgatcagtagcaccagtgtttatggcttgaagatgcagtggacgccagagcatgcccagtggccagaacagcactttgacatcacctcaaccactcggtctcctgcccacaaagttgaagcctacagaggtcatctgcagcgcacctatcagtacgcctgggcgaatgatgacatatctgctctgactgcatccaacctactaaaaaaatatgcagagaagtattccggcattttggaaggtcctgtggaccgacccgtactcagcaactattcggacacaccatcaggactagtgaacggtcggaaaaatgaaagtgaaccctggcagccttccttgaattcagaagctgtttatcccatgaactgtgttccggatgttatcactgccagcaaagctggagtcagttcagccctccctccagcagatgtctctgcgagtataggaagctctcctggggtagccagcaacctgacagaacctagttattcaagtagtacctgtggaagccacactgtacccagtcttcatgcagggctcccatctcaggaatatgccccaggatacaacggatcatatttgcattctacttatagtagccagccagcacctgcacttccttcacctcatccgtctcctttgcatagctctgggctactacagcccccaccaccacctcctccgccaccagccttggtcccaggctacaatgggacttctaacctctccagttacagctatccgtctgctagctatcctcctcagactgctgtggggtctgggtacagccctgggggggcaccgcctccgccttcagcgtacctgccttcaggaattcctgctcccacccccctaccccccaccactgttcctggctacacctaccagggccatggtttgacacctattgcaccgtcggctctgacaaacagttcagcaagttctctcaaaaggaaagctttctacatggcagggcaaggagatatggactccagttatggaaattacagctatggccaacagagatctacacagagtcctatgtacagaatgcccgacaacagcatttcaaacacaaatcgggggaatggctttgacagaagtgctgaaacatcatccttagcatttaagccaacgaagcagctaatgtcctctgaacagcaaaggaaattcagcagccagtccagtagggctctgacccctccttcctacagtactgctaaaaattcattgggatcaagatccagtgaatcctttgggaagtacacatcgccagtaatgagtgagcatggggacgagcacaggcagctcctctctcacccaatgcaaggccctggactccgtgcagctacctcatccaaccactctgtggacgagcaactgaagaatactgacacgcacctcatcgacctggtaaccaatgagattatcacccaaggacctccagtggactggaatgacattgctggtctcgacctggtgaaggctgtcattaaagaggaggttttatggccagtgttgaggtcagacgcgttcagtggactgacggccttacctcggagcatccttttatttggacctcgggggacaggcaaaacattattgggcagatgcatcgctagtcagctgggggccacatttttcaaaattgccggttctggactagtcgccaagtggttaggagaagcagagaaaattatccatgcctcttttcttgtggccaggtgtcgccagccctcggtgatttttgttagtgacattgacatgcttctctcctctcaagtgaatgaggaacatagtccagtcagtcggatgagaaccgaatttctgatgcaactggacactgtactaacttcggctgaggaccaaatcgtagtaatttgtgccaccagtaaaccagaagaaatagatgaatcccttcggaggtacttcatgaaacgacttttaatcccacttcctgacagcacagcgaggcaccagataatagtacaactgctctcacagcacaattactgtctcaatgacaaggagtttgcactgctcgtccagcgcacagaaggcttttctggactagatgtggctcatttgtgtcaggaagcagtggtgggccccctccatgccatgccagccacagacctttcagccattatgcccagccagttgaggcccgttacatatcaagactttgaaaatgctttctgcaagattcagcctagcatatctcaaaaggagcttgatatgtatgttgaatggaacaaaatgtttggttgcagtcagtgataacttctttagaaaaaaaaaatgtaatgaatgttggcacacacacataaaacctgctacatagggaatagagcccctttccagtagagtttaaattgcaaagggtactggggaagatgacgattaagttgcatctttagagtcagggtagatttggaggaaaagtgcatcaaatgagagcttctgatttgaaagccccagatgacagaaagcatatgtggatgctcagttctgttcaagctagacaacactcaccaaggagcaaggtgcaagtgtgttgatttcagaaggacatgaacctcgtgtgttgattccattctgctgttctcgagatttagttgctgtcaagtgcctggagtggtgctttattttttgtttgcctcacaattacattggtggcatgtgctaatataaagagctttaacttcaaacattattggactaaagagatgaacagttgtgttatgacagaaaaccagatttttgccattttaagagcaacagtattcctcaatcctgtctgttctgcagtattaagctaagaacaggtaaaacagggtaacggtaatctggaccttaatttctgcagttcatttcttttaatgttcttgtctgcaaaaactcaggaaagtgattgtgatttgtacagtacctcaaaggaatgtgttgaaagcactatgtactgctgagagtaataggataggcttcaatgttactttatattaaaatgtatgtttacctcaacaattggaaaatagcaaggaaaattactttgaatgtatccagaaaaatactgaagtgtgatacaactgaatatttacagtttaaagtagaaatggaaggatttttttaagttcttttactaattatggggaattaaccagagcagaataattctttatgtcaataactgcaagagttcttagtacattgctccttgataattaagtgaaaatgttcttaaaaggtacactggttaattgaaagctacttattcagtttgtgttagtgtctagacctgtcagccacaagacctgtttaggaccctgaaagtcacagtacctaaaaactatgactgcctttttattgcataggtggtagtggtggtgatggtggtggtagtttgcaagttatctcttaaaactgctgggaatggtgtcattctattcactaatctagcttatagacttgccgtgctgtttgatagaatgcagaggatagcaaccaaaacaaatacacaaataaataaaaacaaaaaccaaccaacaaaccaacttacatacacatatatatatccacaaagaacctctccatctcctccccttctttttgactccactcttgtcagtgcaattttgcttctcattttgaaatctgggctgtagtgctcctgctttatttctacctcagttttgttacatttctcttggaaagtaaagtagaaaattggaagtggacacacacactgcaatgtagcttgccaaacatgttactttgttttcttccatctttcaccgtaaatctagtttccaaagacatcagcatttgtgcttacttccacctcagtctaccagccccacccctacccatggcataagtggcatttttcttaatttcctatttttctcctgctctctgtcaagttgttctttgtatcctttaatgctttatgtgcaacctttcattgatagtgggctgatgtttggcaatgcttctgaactgtcacagagcaggctgtagctttccacagccactgcccatgcataagcagaacagcctggccttttgaatgtattttcctgggttttttccccttttctttttttagtttagagatgcagtaacaaaactgttgcaaagcactggcattttatgtattcaataaataagtgatgtacatttttaaaaaaatttaaataaatgcaatgagaagccccaagaaaggcctttctgttttttttttcttacaaaaatttttaccgatcttatccacaatatccaattctctgaaacacttaacatagagaaagctcatgagggatttcttatctctgaaattttatgatgcttgatctttactcccctttttttattttttatgttgctaaaaactgagcaattgaaccagaatttaatttactgtgacattctgtcaattaaagctgtgcttaaatataaatattccatattaaaaagcagtgcctttcattaaggatacaaaaaataatacttaaatacgccctctgcttttcgcaagtgaataaatgctacaatcgtgttctgggtctaccctgtgcatcccttgtaaggaaattctaatatccacattaacttgtaggttcatattgatctcactgacaagtttacttttgcacagtgctgacctattttctgacttttagacattatatttcatttccgccaacatgctgtgttcacttgaaagcgtctggcaagttttgacaaacccagtcttatttagacaactttggaaaatccaatattgacccacatttttttgtggctagtaagatttaatgccaaatatatgactgcactattgtgttttacactcatttataaaactgaaaataaattgaagtcatacatcttggcttttagctttaagtgacttaaaaattagaactctgagtgacttaaaaattaatttgagatgcaagtggtcaaaaatccatgtatttagacagaagctgaagtcgtatgtgattttcatttagcctcacaaaatccaagatttgatctcttaggaaattgggcatgttgaagaaatgaagatctgttggaggagatatggctgacctttgagtagatagtgctctcctgtgattctttgattctgcatggcagcattatgagctcttctataaactagcttaataatgagctctattctgaccatctattctggaacttggagtgggggtggggtaccacatcctcagaagtgaatgtgtacagtcggtgatagtacaactgagtaatggggcttcatacccttggcctctttttgactgctaagaatttggagaaggctattaatgaaggtaaggtaatgagccagtccaaatccctcactgtctggctaagagattgagccattccactttacagcccctaattcccttcttcccaactgcagcaacatttccaacagggacaaaaaggaagtgaaggaaaccacttcagtattgggatcaatagaaattcaagaggtagttcataatgaccttatatgtgacacaaatggaaatactctacacttctggcatgcttctctcccaaatatttagaacattagtgacaatatgaaaaactttgctgactgagctgatcaatggaatgtgaaggcagtatactttaaggctatttactttcacacagaatgtttatctattagtcagtttgtattctactcaaatgcagatagacgggtataatgttttcttgtgcatttgaaacctatcaaggagaaaataaaccattccactaaaatacataggccaaacaccatctgggaaagtgataaaagctatccagaggctatgctatgtaaaatagcaaggtcaatttacatgggttgcatagtacttggctatgcagttttcaaaagaacacatccaaaaaaaaaaaaaatccaaattagttcctataataggtctttgtaaatttaaatatatttgtgggttggaaaatacgtttttagagacatttagaatttctttctctaaaaatgtatccaactccaagcagaaagagacttctgtactcacattctcatgtttcttagaattgggtagcatgatcattgaatctgtattttgcaaagtgaaagggacgcagcttgttgaactattgaggccactaaagtaaagttctaatatatatatataaatataaaattagtgtgtgtgtttgtatgtgtgtatgtgtgtgtgttctttcatcaccacctagttgaactttaaaacagacgtctacttttcattattcagaagcaacttgttacttcctttcttcatatgtgcagagatacacatgatcatgttacaatttgaagtgttttaatgtgtttttttttcttttgaaacgtaaagccttcagttgttgaatcatctgccgatttttatatgaagcacattagcaaacctggagctattagtatttcagaattcacaaccagctgtacttgtgactaaccaacacatgaactgaagctcacactttgctaagacctttggttgacattcgattttgaacctgccagatgcatttgtgtgaaccagggatactgcatctttaatgaacaagtctctcctctttcccctgtttttaaatacaacacaagcagtgtagcactaggcactgcaattgtcaaagacaattagactggaagcaggaaaatttcacctccctgtctcagtgatatgtagaatgtcggcagcatgggtcagccttgccacagagttgtgtgagaatatatgaatcagtcctatagaatgttaaatatttataaaatggttctgtagtacaccaaggttgggagcacattcattccttcttgttgtcttatgatacaaaaaaaaaaaaaaaaaaagcaaaagtttatttctgggcttaaaactctccctctaatatctctctctcttttacccccattccccaaccattcttctctccatccctctcctctcctcttcctctctcttctctctctctctctctctctctgtctctaactctcgctctctcttgtatgtgggtgtgtgtgtgtatgagtttccactgtggattatatacacttgctagagaatattcatttcttttttttcttttttcatctgatgtatattcaaacattgttctttataaccatttctacctcattgctacatattgtacatgtagtatttatttgttgtctttttttgaatgtcatgcatttcgtaagaaaaagacttgtccttgaacttgaacagtctacctcagaaagactgtctttacactgaacagtattagcaacctaaatgataagacgcattagtgaagtgtggcagggtagataatgcacgagtacttgggatactgatggacttttaattgtattcataacacaagactgcttaaaagaacttaaaagaaattatgcactgtgtaggtcttcatcgaggtcccatttgggacattatatacagaatagagctttattcctatgtgcccatctctgagaaatgtgttagcattcccaagtattttacactggcaatctggctacttaagacaaacaaattcaaacaacatttttatattttgactgacaccctcagctcctaaatttaagagaaataatggtacttaactattttcaactatagtcttcagtgattgaaaatgccttcattttaattctgtgactcctgatataaattaagaaaaacaatgcagttgcaagggcctgcacaacactgaaaataaaccaaaaattaaaaatggcacttcccaaaggaattaacaaacgtggagtcatggtgcttgcaagttccataactgaaagcattttgtttctgatttccctttataacatgtatttgtttattgaagcaattgtacaactaatggcacattgaattactttgtatgaagtgttttatattatactatttattttagcattcgttctttttcttcaccagctctatattacagtagcaaaagaacacttagttttaaaaaatgctgaaaggggttcaccacccacccaatcgatgaatggacttttgaagttgcttgtcagcaaattgtggatattttacaaaagcaaatgaactgtgacaatccacaactcccacagatgtgaattcagaaatgcatctgaaactccggtatgcctgacaatctattctttaagtttcattaacaaagtggcatccaatcctttcacttacaattccttgcaggaatgtattgtctagaggctgtctagtagtgattaagagagggtttttgttttgttttatttgtttactgtattaggtgaggaatgccatatttcttgtcagccaacagtacttgtctgagacagaaatttaaaaaaagaaaaagaaacctaactaattaaaatttctgtgcactttgcttccctgaccatattgattttatttgcttaaattgaaacaatacgctggatttgaccagattttgaccccttgaaagaagaaaagccctatatagtacatgtttctttgggttattctagtactgtttccttatttgttctgcaaatttcaaatcatttttttgtgtgcattattttacatctgctgaaactaaatgtgttattattgcactcattaaaaatgaaacaatccatttctcttggaaaaaaatgacaagctttagatgatgaaagcttaaattatccatcacttgcaaaatgaattcatataatttgtgaacattattaatgtaaatgagacatttctgcttagattttttttattttgatgggatcattatatggttgatcatatgtgtgtaggaagctgctgtacaattaacttggagatctgaaaatgctttttgtcctcattgttgcagtttcaattgtaatccattgcatctcattttcttgggtgttggcactgtaatatattaaaaaaaaattcagtgctcagtattgtaacaactgtccctactgaatattccttttcataaatacttgctaccacagggaaattaagttttcatatagaataactagtttcagtagtaaccattgaagaattaaaaatgtggttcaaggcagatatttttatgaaaagttttctctattgtaaaatttgttgtatatggctatgctactatcatggaataagaaaagaacaagcatacctcaaataaaaaaaaattctgagttaaaaaaa

SEQ ID NO: 7540 - DNA, 600 bp, Homo sapiens
  source 1..600: mol_type = unassigned DNA; mol_type = unassigned DNA
ggcagaggctgcagtccgtcttcccttcaaaaacttggaatgatttcaaatcataggcaccttcacttaaccctagcttccattcatcagcaaacacatcggatcgatgctacgctaacctatcgggttctctctccgcgcgttcaggcttgaagatgcagtggacgccagagcatgcccagtggccagaacagcactttgacatcacctcaaccactcggtctcctgcccacaaagttgaagcctacagaggtcatctgcagcgcacctatcagtacgcctgggcgaatgatgacatatctgctctgactgcatccaacctactaaaaaaatatgcagagaagtattccggcattttggaaggtcctgtggaccgacccgtactcagcaactattcggacacaccatcaggactagtgaacggtcggaaaaatgaaagtgaaccctggcagccttccttgaattcagaagctgtttatcccatgaactgtgttccggatgttatcactgccagcaaagctggagtcagttcagccctccctccagcagatgtctctgcgagtataggaagctctcctggggtagccagcaacctgacag

SEQ ID NO: 7541 - DNA, 567 bp, Homo sapiens
  source 1..567: mol_type = unassigned DNA; mol_type = unassigned DNA
gcattgttcgggcgactctcggagcgcgcacagtcggctcgcagcgcggcactacagcggccccggcccggcccccgcccggccccggcgcaggcagttcagatcaaggaggtatgcaagcagagaatcccagcacggatccctaaaccgaaatctacaggcatcaccaagatttccactaaagcccccacagtgcctatggataagcctatttaccaaaatggctgtgggaagctacacatcgtgagaactgtcacctccaacaccttcctccacgtgggagggagaaggtaactcataccaatgcactgcctggatacattcatctacagaaatatgtggaaagctaaaattaccactatgaaaggccaaaggaccatctctccaggaaatggtgaagcagctttgtggacctgatgaagatcatcccccaaaaagcagcacgtctacaattattttacttctatatgtgtatatgcacacacaaacactcgcaggcctagacccacacccaaatctacccatttcctcatccgacatataatctaacccaaagatgaactatct

SEQ ID NO: 7542 - DNA, 445 bp, Homo sapiens
  source 1..445: mol_type = unassigned DNA; mol_type = unassigned DNA
ccaacagaaatcagtgccaagcatgcgatattcagagtctccccagaccggcagtcatcatggcagtttcagcgttcaaacagcaatagctcaagtgtgataactactgaggataataaaatccacattcacttaggaagtccttacatgcaagctgtagccagccctgtgagacctgccagcccttcagcaccactgcaggataaccgaactcaaggcttaattaacggggcactaaacaaaacaaccaataaagtcaccagcagtattactatcacaccaacagccacacctcttcctcgacaatcacaaattacaatcaaggaggtatgcaagcagagaatcccagcacggatccctaaaccgaaatctacaggcatcaccaagatttccactaaagcccccacagtgcctatggataagcctatttaccaaaatggctgtg

SEQ ID NO: 7543 - DNA, 3970 bp, Homo sapiens
  source 1..3970: mol_type = unassigned DNA; mol_type = unassigned DNA
acacacacacacacacacagacgtgctcacggagcctgtgcctgcctctacttgtctgctctgcgcagatggttcctggcttttgggtcacctcatcctgcagcccagtccagttagaacctttcttccacagagactggcaagctgtggggtaagagttttggtaaggctgcctgtcttcagagcatgaaggacactgcccggagagggaagagggcaatatttagtgtttgggcctacttgttgttgggctccccactgcctctcctttgcagagctatcactggcccctggttgcaaactctcggtggctttcaagcctacaaaacaaaaactgagagggtgtccaaaaagagaagaagaaaacgttgttgttggtcctggattccactgttggattttggtggggatgagaagaaggaattaccaggtgtgatcaacacctgcacggtacctgcacggctttaaagaatgcgttccagaggcagtgataccgagggctcagcccaaaagaaatttccaagacatactaaaggccacagtttccaagggcctaaaaacatgaagcatagacagcaagacaaagactcccccagtgagtcggatgtaatacttccgtgtcccaaggcagagaagccacacagtggtaatggccaccaagcagaagacctctcaagagatgacctgttatttctcctcagcattctggagggagaactgcaggctcgagatgaggtcataggcattttaaaggctgaaaaaatggacctggctttgctggaagctcagtatgggtttgtcactccaaaaaaggtgttagaggctctccagagagatgcttttcaagcgaaatctaccccttggcaggaggacatctatgagaaaccaatgaatgagttggacaaagttgtggaaaaacataaagaatcttacagacgaatcctgggacagcttttagtggcagaaaaatcccgtaggcaaaccatattggagttggaggaagaaaagagaaaacataaagaatacatggagaagagtgatgaattcatatgcctactagaacaggaatgtgaaagattaaagaagctaattgatcaagaaatcaagtctcaggaggagaaggagcaagaaaaggagaaaagggtcaccaccctgaaagaggagctgaccaagctgaagtcttttgctttgatggtggtggatgaacagcaaaggctgacggcacagctcacccttcaaagacagaaaatccaagagctgaccacaaatgcaaaggaaacacataccaaactagcccttgctgaagccagagttcaggaggaagagcagaaggcaaccagactagagaaggaactgcaaacgcagaccacaaagtttcaccaagaccaagacacaattatggcgaagctcaccaatgaggacagtcaaaatcgccagcttcaacaaaagctggcagcactcagccggcagattgatgagttagaagagacaaacaggtctttacgaaaagcagaagaggagctgcaagatataaaagaaaaaatcagtaagggagaatatggaaacgctggtatcatggctgaagtggaagagctcaggaaacgtgtgctagatatggaagggaaagatgaagagctcataaaaatggaggagcagtgcagagatctcaataagaggcttgaaagggagacgttacagagtaaagactttaaactagaggttgaaaaactcagtaaaagaattatggctctggaaaagttagaagacgctttcaacaaaagcaaacaagaatgctactctctgaaatgcaatttagaaaaagaaaggatgaccacaaagcagttgtctcaagaactggagagtttaaaagtaaggatcaaagagctagaagccattgaaagtcggctagaaaagacagaattcactctaaaagaggatttaactaaactgaaaacattaactgtgatgtttgtagatgaacggaaaacaatgagtgaaaaattaaagaaaactgaagataaattacaagctgcttcttctcagcttcaagtggagcaaaataaagtaacaacagttactgagaagttaattgaggaaactaaaagggcgctcaagtccaaaaccgatgtagaagaaaagatgtacagcgtaaccaaggagagagatgatttaaaaaacaaattgaaagcggaagaagagaaaggaaatgatctcctgtcaagagttaatatgttgaaaaataggcttcaatcattggaagcaattgagaaagatttcctaaaaaacaaattaaatcaagactctgggaaatccacaacagcattacaccaagaaaacaataagattaaggagctctctcaagaagtggaaagactgaaactgaagctaaaggacatgaaagccattgaggatgacctcatgaaaacagaagatgaatatgagactctagaacgaaggtatgctaatgaacgagacaaagctcaatttttatctaaagagctagaacatgttaaaatggaacttgctaagtacaagttagcagaaaagacagagaccagccatgaacaatggcttttcaaaaggcttcaagaagaagaagctaagtcagggcacctctcaagagaagtggatgcattaaaagagaaaattcatgaatacatggcaactgaagacctaatatgtcacctccagggagatcactcagtcctgcaaaaaaaactaaatcaacaagaaaacaggaacagagatttaggaagagagattgaaaacctcactaaggagttagagaggtaccggcatttcagtaagagcctcaggcctagtctcaatggaagaagaatttccgatcctcaagtattttctaaagaagttcagacagaagcagtagacaatgaaccacctgattacaagagcctcattcctctggaacgtgcagtcatcaatggtcagttatatgaggagagtgagaatcaagacgaggaccctaatgatgagggatctgtgctgtccttcaaatgcagccagtctactccatgtcctgttaacagaaagctatggattccctggatgaaatccaaggagggccatcttcagaatggaaaaatgcaaactaaacccaatgccaactttgtgcaacctggagatctagtcctaagccacacacctgggcagccacttcatataaaggttactccagaccatgtacaaaacacagccactcttgaaatcacaagtccaaccacagagagtcctcactcttacacgagtactgcagtgataccgaactgtggcacgccaaagcaaaggataaccatcctccaaaacgcctccataacaccagtaaagtccaaaacctctaccgaagacctcatgaatttagaacaaggcatgtccccaattaccatggcaacctttgccagagcacagaccccagagtcttgtggttctctaactccagaaaggacaatgtcccctattcaggttttggctgtgactggttcagctagctctcctgagcagggacgctccccagaaccaacagaaatcagtgccaagcatgcgatattcagagtctccccagaccggcagtcatcatggcagtttcagcgttcaaacagcaatagctcaagtgtgataactactgaggataataaaatccacattcacttaggaagtccttacatgcaagctgtagccagccctgtgagacctgccagcccttcagcaccactgcaggataaccgaactcaaggcttaattaacggggcactaaacaaaacaaccaataaagtcaccagcagtattactatcacaccaacagccacacctcttcctcgacaatcacaaattacagtggaaccacttcttctgcctcattgaactcaacatccttcagacttttaaggcattccaaatcccagtcttcatgttgaactgggttaagcatttattaaaaaatcgttttcttcta

SEQ ID NO: 7544 - DNA, 2321 bp, Homo sapiens
  source 1..2321: mol_type = unassigned DNA; mol_type = unassigned DNA
ttcagattaaagaagctaattgatcaagaaatcaagtctcaggaggagaaggagcaagaaaaggagaaaagggtcaccaccctgaaagaggagctgaccaagctgaagtcttttgctttgatggtggtggatgaacagcaaaggttgaaaaactcagtaaaagaattatggctctggaaaagttagaagacgctttcaacaaaagcaaacaagaatgctactctctgaaatgcaatttagaaaaagaaaggatgaccacaaagcagttgtctcaagaactggagagtttaaaagtaaggatcaaagagctagaagccattgaaagtcggctagaaaagacagaattcactctaaaagaggatttaactaaactgaaaacattaactgtgatgtttgtagatgaacggaaaacaatgagtgaaaaattaaagaaaactgaagataaattacaagctgcttcttctcagcttcaagtggagcaaaataaagtaacaacagttactgagaagttaattgaggaaactaaaagggcgctcaagtccaaaaccgatgtagaagaaaagatgtacagcgtaaccaaggagagagatgatttaaaaaacaaattgaaagcggaagaagagaaaggaaatgatctcctgtcaagagttaatatgttgaaaaataggcttcaatcattggaagcaattgagaaagatttcctaaaaaacaaattaaatcaagactctgggaaatccacaacagcattacaccaagaaaacaataagattaaggagctctctcaagaagtggaaagactgaaactgaagctaaaggacatgaaagccattgaggatgacctcatgaaaacagaagatgaatatgagactctagaacgaaggtatgctaatgaacgagacaaagctcaatttttatctaaagagctagaacatgttaaaatggaacttgctaagtacaagttagcagaaaagacagagaccagccatgaacaatggcttttcaaaaggcttcaagaagaagaagctaagtcagggcacctctcaagagaagtggatgcattaaaagagaaaattcatgaatacatggcaactgaagacctaatatgtcacctccagggagatcactcagtcctgcaaaaaaaactaaatcaacaagaaaacaggaacagagatttaggaagagagattgaaaacctcactaaggagttagagaggtaccggcatttcagtaagagcctcaggcctagtctcaatggaagaagaatttccgatcctcaagtattttctaaagaagttcagacagaagcagtagacaatgaaccacctgattacaagagcctcattcctctggaacgtgcagtcatcaatggtcagttatatgaggagagtgagaatcaagacgaggaccctaatgatgagggatctgtgctgtccttcaaatgcagccagtctactccatgtcctgttaacagaaagctatggattccctggatgaaatccaaggagggccatcttcagaatggaaaaatgcaaactaaacccaatgccaactttgtgcaacctggagatctagtcctaagccacacacctgggcagccacttcatataaaggttactccagaccatgtacaaaacacagccactcttgaaatcacaagtccaaccacagagagtcctcactcttacacgagtactgcagtgataccgaactgtggcacgccaaagcaaaggataaccatcctccaaaacgcctccataacaccagtaaagtccaaaacctctaccgaagacctcatgaatttagaacaaggcatgtccccaattaccatggcaacctttgccagagcacagaccccagagtcttgtggttctctaactccagaaaggacaatgtcccctattcaggttttggctgtgactggttcagctagctctcctgagcagggacgctccccagaaccaacagaaatcagtgccaagcatgcgatattcagagtctccccagaccggcagtcatcatggcagtttcagcgttcaaacagcaatagctcaagtgtgataactactgaggataataaaatccacattcacttaggaagtccttacatgcaagctgtagccagccctgtgagacctgccagcccttcagcaccactgcaggataaccgaactcaaggcttaattaacggggcactaaacaaaacaaccaataaagtcaccagcagtattactatcacaccaacagccacacctcttcctcgacaatcacaaattacagtggaaccacttcttctgcctcattgaactcaacatccttcagac

SEQ ID NO: 7545 - DNA, 2854 bp, Homo sapiens
  source 1..2854: mol_type = unassigned DNA; mol_type = unassigned DNA
ggcccccgcccggccccggcgcaggcagttcagattaaagaagctaattgatcaagaaatcaagtctcaggaggagaaggagcaagaaaaggagaaaagggtcaccaccctgaaagaggagctgaccaagctgaagtcttttgctttgatggtggtggatgaacagcaaaggctgacggcacagctcacccttcaaagacagaaaatccaagagctgaccacaaatgcaaaggaaacacataccaaactagcccttgctgaagccagagttcaggaggaagagcagaaggcaaccagactagagaaggaactgcaaacgcagaccacaaagtttcaccaagaccaagacacaattatggcgaagctcaccaatgaggacagtcaaaatcgccagcttcaacaaaagctggcagcactcagccggcagattgatgagttagaagagacaaacaggtctttacgaaaagcagaagaggagctgcaagatataaaagaaaaaatcagtaagggagaatatggaaacgctggtatcatggctgaagtggaagagctcaggaaacgtgtgctagatatggaagggaaagatgaagagctcataaaaatggaggagcagtgcagagatctcaataagaggcttgaaagggagacgttacagagtaaagactttaaactagaggttgaaaaactcagtaaaagaattatggctctggaaaagttagaagacgctttcaacaaaagcaaacaagaatgctactctctgaaatgcaatttagaaaaagaaaggatgaccacaaagcagttgtctcaagaactggagagtttaaaagtaaggatcaaagagctagaagccattgaaagtcggctagaaaagacagaattcactctaaaagaggatttaactaaactgaaaacattaactgtgatgtttgtagatgaacggaaaacaatgagtgaaaaattaaagaaaactgaagataaattacaagctgcttcttctcagcttcaagtggagcaaaataaagtaacaacagttactgagaagttaattgaggaaactaaaagggcgctcaagtccaaaaccgatgtagaagaaaagatgtacagcgtaaccaaggagagagatgatttaaaaaacaaattgaaagcggaagaagagaaaggaaatgatctcctgtcaagagttaatatgttgaaaaataggcttcaatcattggaagcaattgagaaagatttcctaaaaaacaaattaaatcaagactctgggaaatccacaacagcattacaccaagaaaacaataagattaaggagctctctcaagaagtggaaagactgaaactgaagctaaaggacatgaaagccattgaggatgacctcatgaaaacagaagatgaatatgagactctagaacgaaggtatgctaatgaacgagacaaagctcaatttttatctaaagagctagaacatgttaaaatggaacttgctaagtacaagttagcagaaaagacagagaccagccatgaacaatggcttttcaaaaggcttcaagaagaagaagctaagtcagggcacctctcaagagaagtggatgcattaaaagagaaaattcatgaatacatggcaactgaagacctaatatgtcacctccagggagatcactcagtcctgcaaaaaaaactaaatcaacaagaaaacaggaacagagatttaggaagagagattgaaaacctcactaaggagttagagaggtaccggcatttcagtaagagcctcaggcctagtctcaatggaagaagaatttccgatcctcaagtattttctaaagaagttcagacagaagcagtagacaatgaaccacctgattacaagagcctcattcctctggaacgtgcagtcatcaatggtcagttatatgaggagagtgagaatcaagacgaggaccctaatgatgagggatctgtgctgtccttcaaatgcagccagtctactccatgtcctgttaacagaaagctatggattccctggatgaaatccaaggagggccatcttcagaatggaaaaatgcaaactaaacccaatgccaactttgtgcaacctggagatctagtcctaagccacacacctgggcagccacttcatataaaggttactccagaccatgtacaaaacacagccactcttgaaatcacaagtccaaccacagagagtcctcactcttacacgagtactgcagtgataccgaactgtggcacgccaaagcaaaggataaccatcctccaaaacgcctccataacaccagtaaagtccaaaacctctaccgaagacctcatgaatttagaacaaggcatgtccccaattaccatggcaacctttgccagagcacagaccccagagtcttgtggttctctaactccagaaaggacaatgtcccctattcaggttttggctgtgactggttcagctagctctcctgagcagggacgctccccagaaccaacagaaatcagtgccaagcatgcgatattcagagtctccccagaccggcagtcatcatggcagtttcagcgttcaaacagcaatagctcaagtgtgataactactgaggataataaaatccacattcacttaggaagtccttacatgcaagctgtagccagccctgtgagacctgccagcccttcagcaccactgcaggataaccgaactcaaggcttaattaacggggcactaaacaaaacaaccaataaagtcaccagcagtattactatcacaccaacagccacacctcttcctcgacaatcacaaattacagtggaaccacttcttctgcctcattgaactcaacatccttcagac

SEQ ID NO: 7546 - DNA, 4219 bp, Homo sapiens
  source 1..4219: mol_type = unassigned DNA; mol_type = unassigned DNA
acacacacacacacacacagacgtgctcacggagcctgtgcctgcctctacttgtctgctctgcgcagatggttcctggcttttgggtcacctcatcctgcagcccagtccagttagaacctttcttccacagagactggcaagctgtggggtaagagttttggtaaggctgcctgtcttcagagcatgaaggacactgcccggagagggaagagggcaatatttagtgtttgggcctacttgttgttgggctccccactgcctctcctttgcagagctatcactggcccctggttgcaaactctcggtggctttcaagcctacaaaacaaaaactgagagggtgtccaaaaagagaagaagaaaacgttgttgttggtcctggattccactgttggattttggtggggatgagaagaaggaattaccaggtgtgatcaacacctgcacggtacctgcacggctttaaagaatgcgttccagaggcagtgataccgagggctcagcccaaaagaaatttccaagacatactaaaggccacagtttccaagggcctaaaaacatgaagcatagacagcaagacaaagactcccccagtgagtcggatgtaatacttccgtgtcccaaggcagagaagccacacagtggtaatggccaccaagcagaagacctctcaagagatgacctgttatttctcctcagcattctggagggagaactgcaggctcgagatgaggtcataggcattttaaaggctgaaaaaatggacctggctttgctggaagctcagtatgggtttgtcactccaaaaaaggtgttagaggctctccagagagatgcttttcaagcgaaatctaccccttggcaggaggacatctatgagaaaccaatgaatgagttggacaaagttgtggaaaaacataaagaatcttacagacgaatcctgggacagcttttagtggcagaaaaatcccgtaggcaaaccatattggagttggaggaagaaaagagaaaacataaagaatacatggagaagagtgatgaattcatatgcctactagaacaggaatgtgaaagattaaagaagctaattgatcaagaaatcaagtctcaggaggagaaggagcaagaaaaggagaaaagggtcaccaccctgaaagaggagctgaccaagctgaagtcttttgctttgatggtggtggatgaacagcaaaggctgacggcacagctcacccttcaaagacagaaaatccaagagctgaccacaaatgcaaaggaaacacataccaaactagcccttgctgaagccagagttcaggaggaagagcagaaggcaaccagactagagaaggaactgcaaacgcagaccacaaagtttcaccaagaccaagacacaattatggcgaagctcaccaatgaggacagtcaaaatcgccagcttcaacaaaagctggcagcactcagccggcagattgatgagttagaagagacaaacaggtctttacgaaaagcagaagaggagctgcaagatataaaagaaaaaatcagtaagggagaatatggaaacgctggtatcatggctgaagtggaagagctcaggaaacgtgtgctagatatggaagggaaagatgaagagctcataaaaatggaggagcagtgcagagatctcaataagaggcttgaaagggagacgttacagagtaaagactttaaactagaggttgaaaaactcagtaaaagaattatggctctggaaaagttagaagacgctttcaacaaaagcaaacaagaatgctactctctgaaatgcaatttagaaaaagaaaggatgaccacaaagcagttgtctcaagaactggagagtttaaaagtaaggatcaaagagctagaagccattgaaagtcggctagaaaagacagaattcactctaaaagaggatttaactaaactgaaaacattaactgtgatgtttgtagatgaacggaaaacaatgagtgaaaaattaaagaaaactgaagataaattacaagctgcttcttctcagcttcaagtggagcaaaataaagtaacaacagttactgagaagttaattgaggaaactaaaagggcgctcaagtccaaaaccgatgtagaagaaaagatgtacagcgtaaccaaggagagagatgatttaaaaaacaaattgaaagcggaagaagagaaaggaaatgatctcctgtcaagagttaatatgttgaaaaataggcttcaatcattggaagcaattgagaaagatttcctaaaaaacaaattaaatcaagactctgggaaatccacaacagcattacaccaagaaaacaataagattaaggagctctctcaagaagtggaaagactgaaactgaagctaaaggacatgaaagccattgaggatgacctcatgaaaacagaagatgaatatgagactctagaacgaaggtatgctaatgaacgagacaaagctcaatttttatctaaagagctagaacatgttaaaatggaacttgctaagtacaagttagcagaaaagacagagaccagccatgaacaatggcttttcaaaaggcttcaagaagaagaagctaagtcagggcacctctcaagagaagtggatgcattaaaagagaaaattcatgaatacatggcaactgaagacctaatatgtcacctccagggagatcactcagtcctgcaaaaaaaactaaatcaacaagaaaacaggaacagagatttaggaagagagattgaaaacctcactaaggagttagagaggtaccggcatttcagtaagagcctcaggcctagtctcaatggaagaagaatttccgatcctcaagtattttctaaagaagttcagacagaagcagtagacaatgaaccacctgattacaagagcctcattcctctggaacgtgcagtcatcaatggtcagttatatgaggagagtgagaatcaagacgaggaccctaatgatgagggatctgtgctgtccttcaaatgcagccagtctactccatgtcctgttaacagaaagctatggattccctggatgaaatccaaggagggccatcttcagaatggaaaaatgcaaactaaacccaatgccaactttgtgcaacctggagatctagtcctaagccacacacctgggcagccacttcatataaaggttactccagaccatgtacaaaacacagccactcttgaaatcacaagtccaaccacagagagtcctcactcttacacgagtactgcagtgataccgaactgtggcacgccaaagcaaaggataaccatcctccaaaacgcctccataacaccagtaaagtccaaaacctctaccgaagacctcatgaatttagaacaaggcatgtccccaattaccatggcaacctttgccagagcacagaccccagagtcttgtggttctctaactccagaaaggacaatgtcccctattcaggttttggctgtgactggttcagctagctctcctgagcagggacgctccccagaaccaacagaaatcagtgccaagcatgcgatattcagagtctccccagaccggcagtcatcatggcagtttcagcgttcaaacagcaatagctcaagtgtgataactactgaggataataaaatccacattcacttaggaagtccttacatgcaagctgtagccagccctgtgagacctgccagcccttcagcaccactgcaggataaccgaactcaaggcttaattaacggggcactaaacaaaacaaccaataaagtcaccagcagtattactatcacaccaacagccacacctcttcctcgacaatcacaaattacagtaagtaatatatataactgaccacgctcaccctcatccagtccatactgatatttttgcaaggaactcaatccttttttaatcatccctccatatcccccaagactgactgaactcgtactttgggaaggtttgtgcatgaactatacaagagtatctgaaactaactgttgcctgcatagtcatatcgagtgtgcacttactgtatatcttttcatttacatacttgtatggaaaatatttagtctgcacttgtataaatacatctttatgtatttcattttccataactcactttaatttgactgcaacttgtcttggtgaaatactttaacattataaaacagtaaataatttgttattttta

SEQ ID NO: 7547 - DNA, 2898 bp, Homo sapiens
  source 1..2898: mol_type = unassigned DNA; mol_type = unassigned DNA
acagtcggctcgcagcgcggcactacagcggccccggcccggcccccgcccggccccggcgcaggcagttcagggaagcccaccataatgagaagagcggggccaacacccatgtcactgtggagaagtacagaatatgcaatggaagagttgtttatctgatataagcggtaattggaaactgaaaaattcctgctctggaaaaaagatattctgctcttctgaatctaacagaggaagagacaaacagaaaccatcaattattgtttcagattaaagaagctaattgatcaagaaatcaagtctcaggaggagaaggagcaagaaaaggagaaaagggtcaccaccctgaaagaggagctgaccaagctgaagtcttttgctttgatggtggtggatgaacagcaaaggctgacggcacagctcacccttcaaagacagaaaatccaagagctgaccacaaatgcaaaggaaacacataccaaactagcccttgctgaagccagagttcaggaggaagagcagaaggcaaccagactagagaaggaactgcaaacgcagaccacaaagtttcaccaagaccaagacacaattatggcgaagctcaccaatgaggacagtcaaaatcgccagcttcaacaaaagctggcagcactcagccggcagattgatgagttagaagagacaaacaggtctttacgaaaagcagaagaggagctgcaagatataaaagaaaaaatcagtaagggagaatatggaaacgctggtatcatggctgaagtggaagagctcaggaaacgtgtgctagatatggaagggaaagatgaagagctcataaaaatggaggagcagtgcagagatctcaataagaggcttgaaagggagacgttacagagtaaagactttaaactagaggttgaaaaactcagtaaaagaattatggctctggaaaagttagaagacgctttcaacaaaagcaaacaagaatgctactctctgaaatgcaatttagaaaaagaaaggatgaccacaaagcagttgtctcaagaactggagagtttaaaagtaaggatcaaagagctagaagccattgaaagtcggctagaaaagacagaattcactctaaaagaggatttaactaaactgaaaacattaactgtgatgtttgtagatgaacggaaaacaatgagtgaaaaattaaagaaaactgaagataaattacaagctgcttcttctcagcttcaagtggagcaaaataaagtaacaacagttactgagaagttaattgaggaaactaaaagggcgctcaagtccaaaaccgatgtagaagaaaagatgtacagcgtaaccaaggagagagatgatttaaaaaacaaattgaaagcggaagaagagaaaggaaatgatctcctgtcaagagttaatatgttgaaaaataggcttcaatcattggaagcaattgagaaagatttcctaaaaaacaaattaaatcaagactctgggaaatccacaacagcattacaccaagaaaacaataagattaaggagctctctcaagaagtggaaagactgaaactgaagctaaaggacatgaaagccattgaggatgacctcatgaaaacagaagatgaatatgagactctagaacgaaggtatgctaatgaacgagacaaagctcaatttttatctaaagagctagaacatgttaaaatggaacttgctaagtacaagttagcagaaaagacagagaccagccatgaacaatggcttttcaaaaggcttcaagaagaagaagctaagtcagggcacctctcaagagaagtggatgcattaaaagagaaaattcatgaatacatggcaactgaagacctaatatgtcacctccagggagatcactcagtcctgcaaaaaaaactaaatcaacaagaaaacaggaacagagatttaggaagagagattgaaaacctcactaaggagttagagaggtaccggcatttcagtaagagcctcaggcctagtctcaatggaagaagaatttccgatcctcaagtattttctaaagaagttcagacagaagcagtagacaatgaaccacctgattacaagagcctcattcctctggaacgtgcagtcatcaatggtcagttatatgaggagagtgagaatcaagacgaggaccctaatgatgagggatctgtgctgtccttcaaatgcagccagtctactccatgtcctgttaacagaaagctatggattccctggatgaaatccaaggagggccatcttcagaatggaaaaatgcaaactaaacccaatgccaactttgtgcaacctggagatctagtcctaagccacacacctgggcagccacttcatataaaggttactccagaccatgtacaaaacacagccactcttgaaatcacaagtccaaccacagagagtcctcactcttacacgagtactgcagtgataccgaactgtggcacgccaaagcaaaggataaccatcctccaaaacgcctccataacaccagtaaagtccaaaacctctaccgaagacctcatgaatttagaacaaggcatgtccccaattaccatggcaacctttgccagagcacagaccccagagtcttgtggttctctaactccagaaaggacaatgtcccctattcaggttttggctgtgactggttcagctagctctcctgagcagggacgctccccagaaccaacagaaatcagtgccaagcatgcgatattcagagtctccccagaccggcagtcatcatggcagtttcagcgttcaaacagcaatagctcaagtgtgataactactgaggataataaaatccacattcacttaggaagtccttacatgcaagctgtagccagccct

SEQ ID NO: 7548 - DNA, 1712 bp, Homo sapiens
  source 1..1712: mol_type = unassigned DNA; mol_type = unassigned DNA
acacacacacacacacacagacgtgctcacggagcctgtgcctgcctctacttgtctgctctgcgcagatggttcctggcttttgggtcacctcatcctgcagcccagtccagttagaacctttcttccacagagactggcaagctgtggggtaagagttttggtaaggctgcctgtcttcagagcatgaaggacactgcccggagagggaagagggcaatatttagtgtttgggcctacttgttgttgggctccccactgcctctcctttgcagagctatcactggcccctggttgcaaactctcggtggctttcaagcctacaaaacaaaaactgagagggtgtccaaaaagagaagaagaaaacgttgttgttggtcctggattccactgttggattttggtggggatgagaagaaggaattaccaggtgtgatcaacacctgcacggtacctgcacggctttaaagaatgcgttccagaggcagtgataccgagggctcagcccaaaagaaatttccaagacatactaaaggccacagtttccaagggcctaaaaacatgaagcatagacagcaagacaaagactcccccagtgagtcggatgtaatacttccgtgtcccaaggcagagaagccacacagtggtaatggccaccaagcagaagacctctcaagagatgacctgttatttctcctcagcattctggagggagaactgcaggctcgagatgaggtcataggcattttaaaggctgaaaaaatggacctggctttgctggaagctcagtatgggtttgtcactccaaaaaaggtgttagaggctctccagagagatgcttttcaagcgaaatctaccccttggcaggaggacatctatgagaaaccaatgaatgagttggacaaagttgtggaaaaacataaagaatcttacagacgaatcctgggacagcttttagtggcagaaaaatcccgtaggcaaaccatattggagttggaggaagaaaagagaaaacataaagaatacatggagaagagtgatgaattcatatgcctactagaacaggaatgtgaaagatggagtctagctctgctgccgaggctggagtgcaatggcatgatcttggctcactgcaatctctgcctcctgggttcaagtgattctcctgcctcagcattccaagtagctgggattacaggcacccgccatcatgcccagctagtttttgtatttttgtagagacagagtttcaccatgttggccaggctagtcttgaacccctgacctcaggtgatccacccacctcggcctcccaaagtgctgggataacaggcatgagccaacgcgcttgacttgcacatatatttttaatgtgtgagtgggtgcatgtcataattccagatggaaatttgtcaccacaaaacataatttttatttagctgatctttccaggtttctatttataatggaatgaaaagatgaagttgggcttatgaatcaagacaaacacaggccctggtcattgtgtaattccatatagtataatttgtttgcaatctttcattccatacacctacaatacagctctaaaaataatgctacctacaatataaagatatactttttttccaaataaccttcaaaaatgtcaaaatatgcaacaaaaatattgtatcatatctaaaccctcaaataagctacatttaaaccaa

SEQ ID NO: 7549 - DNA, 336 bp, Homo sapiens
  source 1..336: mol_type = unassigned DNA; mol_type = unassigned DNA
ggctccccactgcctctcctttgcagagctatcactggcccctggttgcaaactctcggtggctttcaagcctacaaaacaaaaactgagagggtgtccaaaaagagaagaagaaaacgttgttgttggtcctggattccactgttggattttggtggggatgagaagaaggaattaccaggtgtgatcaacacctgcacggtacctgcacgatgacatctcctaatctttcttcttcgaacaagaaaaaaaatggttgccaacagtttgaagggaaaagaagataaaagaaaacagagtctgccatcagtgggtataggagacagttaaaaaaaa

SEQ ID NO: 7550 - DNA, 3280 bp, Homo sapiens
  source 1..3280: mol_type = unassigned DNA; mol_type = unassigned DNA
cataggccgggcgcgctcagcgccccgctcgcattgttcgggcgactctcggagcgcgcacagtcggctcgcagcgcggcactacagcggccccggcccggcccccgcccggccccggcgcaggcagttcagattaaagaagctaattgatcaagaaatcaagtctcaggaggagaaggagcaagaaaaggagaaaagggtcaccaccctgaaagaggagctgaccaagctgaagtcttttgctttgatggtggtggatgaacagcaaaggctgacggcacagctcacccttcaaagacagaaaatccaagagctgaccacaaatgcaaaggaaacacataccaaactagcccttgctgaagccagagttcaggaggaagagcagaaggcaaccagactagagaaggaactgcaaacgcagaccacaaagtttcaccaagaccaagacacaattatggcgaagctcaccaatgaggacagtcaaaatcgccagcttcaacaaaagctggcagcactcagccggcagattgatgagttagaagagacaaacaggtctttacgaaaagcagaagaggagctgcaagatataaaagaaaaaatcagtaagggagaatatggaaacgctggtatcatggctgaagtggaagagctcaggaaacgtgtgctagatatggaagggaaagatgaagagctcataaaaatggaggagcagtgcagagatctcaataagaggcttgaaagggagacgttacagagtaaagactttaaactagaggttgaaaaactcagtaaaagaattatggctctggaaaagttagaagacgctttcaacaaaagcaaacaagaatgctactctctgaaatgcaatttagaaaaagaaaggatgaccacaaagcagttgtctcaagaactggagagtttaaaagtaaggatcaaagagctagaagccattgaaagtcggctagaaaagacagaattcactctaaaagaggatttaactaaactgaaaacattaactgtgatgtttgtagatgaacggaaaacaatgagtgaaaaattaaagaaaactgaagataaattacaagctgcttcttctcagcttcaagtggagcaaaataaagtaacaacagttactgagaagttaattgaggaaactaaaagggcgctcaagtccaaaaccgatgtagaagaaaagatgtacagcgtaaccaaggagagagatgatttaaaaaacaaattgaaagcggaagaagagaaaggaaatgatctcctgtcaagagttaatatgttgaaaaataggcttcaatcattggaagcaattgagaaagatttcctaaaaaacaaattaaatcaagactctgggaaatccacaacagcattacaccaagaaaacaataagattaaggagctctctcaagaagtggaaagactgaaactgaagctaaaggacatgaaagccattgaggatgacctcatgaaaacagaagatgaatatgagactctagaacgaaggtatgctaatgaacgagacaaagctcaatttttatctaaagagctagaacatgttaaaatggaacttgctaagtacaagttagcagaaaagacagagaccagccatgaacaatggcttttcaaaaggcttcaagaagaagaagctaagtcagggcacctctcaagagaagtggatgcattaaaagagaaaattcatgaatacatggcaactgaagacctaatatgtcacctccagggagatcactcagtcctgcaaaaaaaactaaatcaacaagaaaacaggaacagagatttaggaagagagattgaaaacctcactaaggagttagagaggtaccggcatttcagtaagagcctcaggcctagtctcaatggaagaagaatttccgatcctcaagtattttctaaagaagttcagacagaagcagtagacaatgaaccacctgattacaagagcctcattcctctggaacgtgcagtcatcaatggtcagttatatgaggagagtgagaatcaagacgaggaccctaatgatgagggatctgtgctgtccttcaaatgcagccagtctactccatgtcctgttaacagaaagctatggattccctggatgaaatccaaggagggccatcttcagaatggaaaaatgcaaactaaacccaatgccaactttgtgcaacctggagatctagtcctaagccacacacctgggcagccacttcatataaaggttactccagaccatgtacaaaacacagccactcttgaaatcacaagtccaaccacagagagtcctcactcttacacgagtactgcagtgataccgaactgtggcacgccaaagcaaaggataaccatcctccaaaacgcctccataacaccagtaaagtccaaaacctctaccgaagacctcatgaatttagaacaaggcatgtccccaattaccatggcaacctttgccagagcacagaccccagagtcttgtggttctctaactccagaaaggacaatgtcccctattcaggttttggctgtgactggttcagctagctctcctgagcagggacgctccccagaaccaacagaaatcagtgccaagcatgcgatattcagagtctccccagaccggcagtcatcatggcagtttcagcgttcaaacagcaatagctcaagtgtgataactactgaggataataaaatccacattcacttaggaagtccttacatgcaagctgtagccagccctgtgagacctgccagcccttcagcaccactgcaggataaccgaactcaaggcttaattaacggggcactaaacaaaacaaccaataaagtcaccagcagtattactatcacaccaacagccacacctcttcctcgacaatcacaaattacagtaagtaatatatataactgaccacgctcaccctcatccagtccatactgatatttttgcaaggaactcaatccttttttaatcatccctccatatcccccaagactgactgaactcgtactttgggaaggtttgtgcatgaactatacaagagtatctgaaactaactgttgcctgcatagtcatatcgagtgtgcacttactgtatatcttttcatttacatacttgtatggaaaatatttagtctgcacttgtataaatacatctttatgtatttcattttccataactcactttaatttgactgcaacttgtcttggtgaaatactttaacattataaaacagtaaataatttgttatttttaccatt

SEQ ID NO: 7551 - DNA, 2450 bp, Homo sapiens
  source 1..2450: mol_type = unassigned DNA; mol_type = unassigned DNA
acagcgaaatacaaaagcagctgggaagcggcggggactcgagttcccagcgccgggcggagcgccggacagagccccgcagcgccccgcggccgcgatggggccgaagcgcccgaagccccggagcccacaaactgccgggcccgcctcgccgccgggacccgggtgcctgggctcggcttgaagcggcggcggcgcaccggcacagccgcgggagcatgggcaggaggatgcggggcgccgccgccaccgcggggctctggctgctggcgctgggctcgctgctggcgctgtggggagggctcctgccgccgcggaccgagctgcccgcctcccggccgcccgaagaccgactcccacggcgcccggcccggagcggcggccccgcgcccgcgcctcgcttccctctgcccccgcccctggcgtgggacgcccgcggcggctccctgaaaactttccgggcgctgctcaccctggcggccggcgcggacggcccgccccggcagtcccggagcgagcccaggtggcacgtgtcagccaggcagccccggccggaggagagcgccgcggtgcacgggggcgtcttctggagccgcggcctggaggagcaggtgcccccgggcttttcggaggcccaggcggcggcgtggctggaggcggctcgcggcgcccggatggtggccctggagcgcgggggttgcgggcgcagctccaaccgactggcccgttttgccgacggcacccgcgcctgcgtgcgctacggcatcaacccggagcagattcagggcgaggccctgtcttactatctggcgcgcctgctgggcctccagcgccacgtgccgccgctggcactggctcgggtggaggctcggggcgcgcagtgggcgcaggtgcaggaggagctgcgcgctgcgcactggaccgagggcagcgtggtgagcctgacacgctggctgcccaacctcacggacgtggtggtgcccgcgccctggcgctcggaggacggccgtctgcgccccctccgggatgccgggggtgagctggccaacctcagccaggcggagctggtggacctagtacaatggaccgacttaatccttttcgactacctgacggccaacttcgaccggctcgtaagcaacctcttcagcctgcagtgggacccgcgcgtcatgcagcgtgccaccagcaacctgcaccgcggtccgggcggggcgctggtctttctggacaatgaggcgggcttggtgcacggctaccgggtagcaggcatgtgggacaagtataacgagccgctgttgcagtcagtgtgcgtgttccgcgagcggaccgcgcggcgcgtcctggagctgcaccgcggacaggacgccgcggcccggctgctgcgcctctaccggcgccacgagcctcgcttccccgagctggccgcccttgcagacccccacgctcagctgctacagcgccgcctcgacttcctcgccaagcacattttgcactgtaaggccaagtacggccgccggtctgggacttagtgtcaccgggaggaaaagagagagatctggggctggggtatggatgatggggggaagggcggtcgcctctgccactgtcagggaccagccggccaacgcccacccgcaaaggtgtctaaaaacttcagcttttcacccacctgcccctttctttcaatcccacgctgtttcctttcaaagttctgggaggacgaactcaccgaggcgagaagtgtaacattctctccacccagcttataaaaggattctttactgtgccagcacggggattggatccgaagaaactggctactggggtttggcccccgagtggccgtccctgtgggagatgcaccccattcttgggccccccctcattccctttccgaaaaaggaaaacttgcgtttgagccgttgagctaattctgcaattttctaccaaacagagcgctggtggccccggagcagggctgtgacattggctggtggagcccccttcctgtgttctccctttgttccagcgccgcgatggtgagatcactgttccaagcagggggacggctcgcgataggacaaagagagcaggacctccagactctggggagccctgcagaccttgacaatttgcctgactcattcctgacctcttgtcattttggcctgaaggctacaaattcagggtcagctgtatgcactaagtcaaataatgaatttcttcctccctctcgcaaccgaccaaaattttgacaacgatgatgttcaccagaaggaaaaaaaaaaatcagttttatgcactttattttgttttgattttcattttttattaagaaaaaattttattttacagaatttaccttctctgtatatatgtgcataaagtgtggtgtaaatatactaaacaaacttatatttcaataaaagggagtttaaaatttataa

SEQ ID NO: 7552 - DNA, 851 bp, Homo sapiens
  source 1..851: mol_type = unassigned DNA; mol_type = unassigned DNA
gcatgtgggacaagtataacgagccgctgttgcagtcagtgtgcgtgttccgcgagcggaccgcgcggcgcgtcctggagctgcaccgcggacaggacgccgcggcccggctgctgcgcctctaccggcgccacgagcctcgcttccccgagctggccgcccttgcagacccccacgctcagctgctacagcgccgcctcgacttcctcgccaagcacattttgcactgtaaggccaagtacggccgccggtctgggacttagtgtcaccgggaggaaaagagagagatctggggctggggtatggatgatggggggaagggcggtcgcctctgccactgtcagggaccagccggccaacgcccacccgcaaagagcgctggtggccccggagcagggctgtgacattggctggtggagcccccttcctgtgttctccctttgttccagcgccgcgatggtgagatcactgttccaagcagggggacggctcgcgataggacaaagagagcaggacctccagactctggggagccctgcagaccttgacaatttgcctgactcattcctgacctcttgtcattttggcctgaaggctacaaattcagggtcagctgtatgcactaagtcaaataatgaatttcttcctccctctcgcaaccgaccaaaattttgacaacgatgatgttcaccagaaggaaaaaaaaaaatcagttttatgcactttattttgttttgattttcattttttattaagaaaaaattttattttacagaatttaccttctctgtatatatgtgcataaagtgtggtgtaaatatactaaacaaacttatatttcaataaaaggg

SEQ ID NO: 7553 - DNA, 3732 bp, Homo sapiens
  source 1..3732: mol_type = unassigned DNA; mol_type = unassigned DNA
gagccgctcctgacccacctaccccagctctcgcgccgcgtgcagaggtgctcaagcctcctcgcggtccgcagtcagtgccgccgcgcccggcctcccgcacgccccgcaggtagcgcccccgcccgcggcccagagtgcgctcgcgccggcaccagctcccggataaacggcgcgccgcgcggagatgacagccgaggagatgaaggcgaccgagagcggggcgcagtcggcgccgctgcccatggagggagtggacatcagccccaaacaggacgaaggcgtgctgaaggtcatcaagagagagggcacaggtacagagatgcccatgattggggaccgagtctttgtccactacactggctggctattagatggcacaaagtttgactccagtctggatcgcaaggacaaattctcctttgacctgggaaaaggggaggtcatcaaggcttgggacattgccatagccaccatgaaggtgggggaggtgtgccacatcacctgcaaaccagaatatgcctacggttcagcaggcagtcctccaaagattccccccaatgccacgcttgtatttgaggtggagttgtttgagtttaagggagaagatctgacggaagaggaagatggcggaatcattcgcagaatacagactcgcggtgaaggctatgctaagcccaatgagggtgctatcgtggaggttgcactggaagggtactacaaggacaagctctttgaccagcgggagctccgctttgagattggcgagggggagaacctggatctgccttatggtctggagagggccattcagcgcatggagaaaggagaacattccatcgtgtacctcaagcccagctatgcttttggcagtgttgggaaggaaaagttccaaatcccaccaaatgctgagctgaaatatgaattacacctcaagagttttgaaaaggccaaggagtcttgggagatgaattcagaagagaagctggaacagagcaccatagtgaaagagcggggcactgtgtacttcaaggaaggtaaatacaagcaagctttactacagtataagaagatcgtgtcttggctggaatatgagtctagtttttccaatgaggaagcacagaaagcacaggcccttcgactggcctctcacctcaacctggccatgtgtcatctgaaactacaggccttctctgctgccattgaaagctgtaacaaggccctagaactggacagcaacaacgagaagggcctcttccgccggggagaggcccacctggccgtgaatgactttgaactggcacgggctgatttccagaaggtcctgcagctctaccccaacaacaaagccgccaagacccagctggctgtgtgccagcagcggatccgaaggcagcttgcccgggagaagaagctctatgccaatatgtttgagaggctggctgaggaggagaacaaggccaaggcagaggcttcctcaggagaccatcccactgacacagagatgaaggaggagcagaagagcaacacggcagggagccagtctcaggtggagacagaagcatagcccctctccaccagccctactcctgcggctgcctgccccccagtctccccactccaccctgttagttttgtaaaaactgaagaattttgagtgaattagacctttatttttctatctggttggatggtggctttaggggaagggggaaaggtgtaggctgggggattgaggtggggaatcattttagctggtgtcagcccctcttcccttcctccattgcacatgaacatatgtccatccatatatattcatcagaatgttaatttattttgctccctctgttaggtccattttctaagggtagaagaggcaagtggtagggatgaggtctgataagaacccagggtggagagggagactcctgggcagccgttttcctcatcctttccctctcccagtccatttccaaatgtggcctccatgtgggtgctagggacatgggaaaaaccactgctatgccatttcttctctctgttcccttcctcacccccgacggtgtggctgatgatgtcttctggtgtcatggtgaccaccccctgttccctgttctggtatttcccctgtcagtttcccctctcggccaggttgtgtcccaaaatcccctcagcctcttctctgcacgttgctgaaggtccaggcttgcctcaagttccatgcttgagcaataaagtggaaacaataaaacctgggtgtcagacaaccctttctgttcagccttggagtggtgggtatgggtgggtacataatgggtagtagcacaatcaaggggtcacccacttagttccagttgagcttaaataagtgagcatctcatgtagatgccatagttgggcaggaagcagccccaccatgcatggcttcctgagcactgcacaggctgccgctgggatttgtgtctatggcttcgcccaaggttcccagcactccctccctccagcaacctggcagttttagtgcctctggttttcttccctgacacttaggaagacgaaagtataaagatctagaagactgggacaccatgcatgttcattttgaagttggaattggtcttctgcctacctctgatctggcagaggtatctgcattttggtttgttaacaaggtaaaactcctggtgtcactgacctcctcctgtcagataacttacatgattaaggttaagagtaaagcagagtgttcacgtccagcttccttctcagccttaacaggaaaaggcttgtgctttttttctaactatgctttgacccttaactcctatggcatgatggggccctgggagaagccaggcagcacaagccagtcatgctgagctgcctccagataatcctggctccaggccagagcccgtgtctgccctcatccctctctcctactgtgagctctccagtcctttcccaacagcgatgtggttgtctgcttagccacatgcctgtatagttccttccagaagaaatgtataatggtggaagatgtatttctgtgtgaaaattttcaccaagtcatacaacacagctgatgctggagccaggattaaaattggggtgtacaagtctcccagtgtgagtatcccttgagcccaagacaccaaggatgcagagaactgtgactgtgccactgcacgccagcctgggcaagagagtgagaccatctcttttttaaaaaagtccctgtgtaactgctttcttactgggcttacctcacatcacagccctgtgtttgtggtttgtgtctgggtcctcttggtatttcaaaagtagtagattcttacgcctgcagccaacaataatcactaactcaagcatttatggagtaagcctagcactgtactgacagcatcacatgagtgaaactgaatccttgcaaccatcctacaaagaaggtataactttaataaccctatttacagataagaaaaccaagactcagaagttaaatggaaaggtgaggtctctgaactaatccagactctcccatgaggttcctttggcaagtcctgggcttctgtcctcatctgcaaaatcgaaagcattcctgaggtttcttccagctctgcatcctgtaggattccaagaatgtaaaactgcatgtaaccgtggaacatctagagataagtcttagtttatgtaacattaaaactgtctagtgaggatgttttgttaaaa

SEQ ID NO: 7554 - DNA, 425 bp, Homo sapiens
  source 1..425: mol_type = unassigned DNA; mol_type = unassigned DNA
cgcccccgcccgcggcccagagtgcgctcgcgccggcaccagctcccggataaacggcgcgccgcgcggagatgacagccgaggagatgaaggcgaccgagagcggggcgcagtcggcgccgctgcccatggagggagtggacatcagccccaaacaggacgaaggcgtgctgaagattattggggacctcaagcgtctgctccagcggctctcctgtggcatgtgacttccccttctcgctccagcgtcctgccgttttctacgagattgttattccaggtcatcaagagagagggcacaggtacagagatgcccatgattggggaccgagtctttgtccactacactggctggctattagatggcacaaagtttgactccagtctggatcgcaaggacaaattctcctttgacctgggaaaag

SEQ ID NO: 7555 - DNA, 777 bp, Homo sapiens
  source 1..777: mol_type = unassigned DNA; mol_type = unassigned DNA
cagcggagctgccagccgcgggccgcctcgttggtggcggtgccagggctcgcccacccgggcggtggaacacgggccaggacggggagcgactccccacagtgctttcctggcccttcggcctttgtgcgacgcaggcgcgacagggttccggcgccctcccggggtcccctgccgacgccgggacccagcgaggtccccactcgccgcgcggcgccccctccctcggccccggggaggccgggcgcggggcatgccgggagctgtagtcccctcccccctccgccgcctcccggagccagggctgcggggtgtggggcggggaggaggcgctctgctgtggagcctgccgccgagtgaccgctcgactacaaatagcctggggagctgcggggagggcatcttgacctgggccaggacaacctgccttgggtcggagcaggttccagggagaatcagagatggtgaattcccagcctgcgtcttatgccttctccccatccgctgctgcgtcctcatcctggcttcccaccgctgagctccgcgtgtgcggcacccacctcagggggcctttacctggtccagaagtgcatctgtctttgcaccagattattggggacctcaagcgtctgctccagcggctctcctgtggcatgtgacttccccttctcgctccagcgtcctgccgttttctacgagattgttattccaggtcatcaagagagagggcacaggtacagagatgcccatgattggggaccgagtctttgtccacta

SEQ ID NO: 7556 - DNA, 572 bp, Homo sapiens
  source 1..572: mol_type = unassigned DNA; mol_type = unassigned DNA
caaaccagaccttagtctgacgaccactggcatgaaggaagaaggaggaagtgtggcataaatacttccccctttgccgattataataataatctattattcaaccttttactggtctaatcttccaacaactgtaggagatagggattatcatcactgctttacaaataaagtgtggagaattttaaaaacttaccatacagcggaaacttgaactcagatctctcagccttttgtctcctttttcaaaccaagtcttgctgcacctcaagaaagacaagaaggtcatcaagagagagggcacaggtacagagatgcccatgattggggaccgagtctttgtccactacactggctggctattagatggcacaaagtttgactccagtctggatcgcaaggacaaattctcctttgacctgggaaaaggggaggtcatcaaggcttgggacattgccatagccaccatgaaggtgggggaggtgtgccacatcacctgcaaaccagaatatgcctacggttcagcaggcagtcctccaaagattccccccaatgccacgcttgtatttgag

SEQ ID NO: 7557 - DNA, 727 bp, Homo sapiens
  source 1..727: mol_type = unassigned DNA; mol_type = unassigned DNA
gcagaatacagactcgcggtgaaggctatgctaagcccaatgagggtgctatcgtggagggtgagacagtacagtctgggctttcaattctcattctgatatttaggccttgtgtggctttgggcaagacacttccgttctccgagcctatcttcttgtccataaaatgaggggttggaccatattctcttcatatcactccagatttgagaacacaggagaatcttgggatgatgggggtgatgcagggaggctgatggcatccttcctcagtcacctgccctcttacaactctggtacactgcctctctttcatgccagttgcactggaagggtactacaaggacaagctctttgaccagcgggagctccgctttgagattggcgagggggagaacctggatctgccttatggtctggagagggccattcagcgcatggagaaaggagaacattccatcgtgtacctcaagcccagctatgcttttggcagtgttgggaaggaaaagttccaaatcccaccaaatgctgagctgaaatatgaattacacctcaagagttttgaaaaggccaaggagtcttgggagatgaattcagaagagaagctggaacagagcaccatagtgaaagagcggggcactgtgtacttcaaggaaggtaaatacaagcaagctttactacagtataagaagatcgtgtcttggctggaatatgagtctagtttttc

SEQ ID NO: 7558 - DNA, 370 bp, Homo sapiens
  source 1..370: mol_type = unassigned DNA; mol_type = unassigned DNA
ccgtgaatgactttgaactggcacgggctgatttccagaaggtcctgcagctctaccccaacaacaaagccgccaagacccagctggctgtgtgccagcagcggatccgaaggcagcttgcccgggagaagaagctctatgccaatatgtttgagaggctggctgaggaggagaacaaggcgccgtggctcacacctgcaatcccagcactttgcagagccaaagtgggaggatcacttgaacccagtaggtagagacctcagtgacttaggatggcaccactgcaccccagcctgagtgacaaaatgaaaccccatctcaaaaaaagaaaagcgagatgctttttgtgtgtgattaaataaataataca

SEQ ID NO: 7559 - DNA, 287 bp, Homo sapiens
  source 1..287: mol_type = unassigned DNA; mol_type = unassigned DNA
tgaaggaggagcagaagagcaacacggcagggagccagtctcagataagaaaaccaagactcagaagttaaatggaaaggtgaggtctctgaactaatccagactctcccatgaggttcctttggcaagtcctgggcttctgtcctcatctgcaaaatcgaaagcattcctgaggtttcttccagctctgcatcctgtaggattccaagaatgtaaaactgcatgtaaccgtggaacatctagagataagtcttagtttatgtaacattaaaactgtctagtgagga

SEQ ID NO: 7560 - DNA, 156 bp, Homo sapiens
  source 1..156: mol_type = unassigned DNA; mol_type = unassigned DNA
atgacagccgaggagatgaaggcgaccgagagcggggcgcagtcggcgccgctgcccatggagggagtggacatcagccccaaacaggacgaaggcgtgctgaagattattggggacctcaagcgtctgctccagcggctctcctgtggcatgtga

SEQ ID NO: 7561 - DNA, 3772 bp, Homo sapiens
  source 1..3772: mol_type = unassigned DNA; mol_type = unassigned DNA
gggccggctcgcgggcgctgccagtctcgggcggcggtgtccggcgcgcgggcggcctgctgggcgggctgaagggttagcggagcacgggcaaggcggagagtgacggagtcggcgagcccccgcggcgacaggttctctacttaaaagacaatgactactgatgaaggtgccaagaacaatgaagaaagccccacagccactgttgctgagcagggagaggatattacctccaaaaaagacaggggagtattaaagattgtcaaaagagtggggaatggtgaggaaacgccgatgattggagacaaagtttatgtccattacaaaggaaaattgtcaaatggaaagaagtttgattccagtcatgatagaaatgaaccatttgtctttagtcttggcaaaggccaagtcatcaaggcatgggacattggggtggctaccatgaagaaaggagagatatgccatttactgtgcaaaccagaatatgcatatggctcggctggcagtctccctaaaattccctcgaatgcaactctcttttttgagattgagctccttgatttcaaaggagaggatttatttgaagatggaggcattatccggagaaccaaacggaaaggagagggatattcaaatccaaacgaaggagcaacagtagaaatccacctggaaggccgctgtggtggaaggatgtttgactgcagagatgtggcattcactgtgggcgaaggagaagaccacgacattccaattggaattgacaaagctctggagaaaatgcagcgggaagaacaatgtattttatatcttggaccaagatatggttttggagaggcagggaagcctaaatttggcattgaacctaatgctgagcttatatatgaagttacacttaagagcttcgaaaaggccaaagaatcctgggagatggataccaaagaaaaattggagcaggctgccattgtcaaagagaagggaaccgtatacttcaagggaggcaaatacatgcaggcggtgattcagtatgggaagatagtgtcctggttagagatggaatatggtttatcagaaaaggaatcgaaagcttctgaatcatttctccttgctgcctttctgaacctggccatgtgctacctgaagcttagagaatacaccaaagctgttgaatgctgtgacaaggcccttggactggacagtgccaatgagaaaggcttgtataggaggggtgaagcccagctgctcatgaacgagtttgagtcagccaagggtgactttgagaaagtgctggaagtaaacccccagaataaggctgcaagactgcagatctccatgtgccagaaaaaggccaaggagcacaacgagcgggaccgcaggatatacgccaacatgttcaagaagtttgcagagcaggatgccaaggaagaggccaataaagcaatgggcaagaagacttcagaaggggtcactaatgaaaaaggaacagacagtcaagcaatggaagaagagaaacctgagggccacgtatgacgccacgccaaggagggaagagtcccagtgaactcggcccctcctcaatgggctttcccccaactcaggacagaacagtgtttaatgtaaagtttgttatagtctatgtgattctggaagcaaatggcaaaaccagtagcttcccaaaaacagcccccctgctgctgcccggagggttcactgaggggtggcacgggaccactccaggtggaacaaacagaaatgactgtggtgtggagggagtgagccagcagcttaagtccagctcatttcagtttctatcaaccttcaagtatccaattcagggtccctggagatcatcctaacaatgtggggctgttaggttttacctttgaactttcatagcactgcagaaacctttaaaaaaaaaatgcttcatgaatttctcctttcctacagttgggtagggtaggggaaggaggataagcttttgttttttaaatgactgaagtgctataaatgtagtctgttgcatttttaaccaacagaacccacagtagaggggtctcatgtctccccagttccacagcagtgtcacagacgtgaaagccagaacctcagaggccacttgcttgctgacttagcctcctcccaaagtccccctcctcagccagcctccttgtgagagtggctttctaccacacacagcctgtccctgggggagtaattctgtcattcctaaaacacccttcagcaatgataatgagcagatgagagtttctggattagcttttcctattttcgatgaagttctgagatactgaaatgtgaaaagagcaatcagaattgtgctttttctcccctcctctattccttttagggaataatattcaatacacagtacttcctcccagcattgctactgctcagcttcttctttcattctaatccttgctattaagaatttaagacttgtgcttacaatatttttgacctggagtggatctatttacatagtcatttaggatccatgcagctttttttgtctttttaagattattggctcataagcatatgtatactggtttatggaactttatttacactcctctatcatgcaaaaaaattttgactttttagtactaagcttaatttttaaaaacaaaatctgtagggttgacaaataaatagttgctcttctacactaggggtttcacctgcaggtttgacacgcagttgctcgcttttcctgccctgtcaagcttctctgttctggcgtgagttgtgaaagagttgaagacagcttcccatgccggtacacagccagtagcctaaatctccagtacttgagctgaccattgaactagggcaagtcttaaatgtgtacatgtagttgaatttcagtccttacgggtaaacagattgagcatggctctctattccctcagcctaagaaacactcatgggaatgcatttggcaacccaaggaaccatttgcttaaacctggaacatctcacctttttaaatcctaaaaaacactggcagttatattttaaattagtttttatttttatgatggttttatcaaaagacttttattattagattgggacccccttcaaacctaaaaatcaagttatttccttttataatacttttcttccccatggaacaaatgggatcaatttgtgagttttttcctttaatgataactaaaatccctctaatttctcatttatgcttttgtcttttttatgaaatatttcttttaaaagccccagtctcacctacgaaatatgaagagcaaaagctgattttgcttacttgctaaactgttgggaaagctctgtagagcatggttccagtgaggccaagattgaaatttgatactaaaaaggccacctagctttttgcagataacaaacaagaaagctattccaagactcagatgatgccagctgtctcccacgtgtgtattatggttcaccagggggaactggcaaaagtgtgtgtggggaggggaagggtgtgtgagtggttctgagcaaataactacagggtgcccattaccactcaagaagacacttcacgtattcttgtatcaaattcaataatcttaaacaatttgtgtagaagtccacagacatctttcaaccaccttttaggctgcatatggattgccaagtcagcatatgaggaattaaagacattgtttttaaaaaaaaaaaatcatttagatgcacttttttgtgtgttctttaaataaatccaaaaaaaatgtga

SEQ ID NO: 7562 - DNA, 3940 bp, Homo sapiens
  source 1..3940: mol_type = unassigned DNA; mol_type = unassigned DNA
agaacaaactcctacctctgtttgcaactaagagttacatcccccatgccaagaccttccgaggcgtcccagagggggaaattcctcgctgccggactgcgcccacccttgaggacctcacattctctttgggcagagcggaagccagacagagacagggactacgaagcgacaatccccagccctgtgtgtgcaaggagcccccgaggggcaggcagccacgctgcagaaggctagactctccgacccccagggagcctggtgtgggctgcagggacagaacgcttctcagaggaggttctctacttaaaagacaatgactactgatgaaggtgccaagaacaatgaagaaagccccacagccactgttgctgagcagggagaggatattacctccaaaaaagacaggggagtattaaagattgtcaaaagagtggggaatggtgaggaaacgccgatgattggagacaaagtttatgtccattacaaaggaaaattgtcaaatggaaagaagtttgattccagtcatgatagaaatgaaccatttgtctttagtcttggcaaaggccaagtcatcaaggcatgggacattggggtggctaccatgaagaaaggagagatatgccatttactgtgcaaaccagaatatgcatatggctcggctggcagtctccctaaaattccctcgaatgcaactctcttttttgagattgagctccttgatttcaaaggagaggatttatttgaagatggaggcattatccggagaaccaaacggaaaggagagggatattcaaatccaaacgaaggagcaacagtagaaatccacctggaaggccgctgtggtggaaggatgtttgactgcagagatgtggcattcactgtgggcgaaggagaagaccacgacattccaattggaattgacaaagctctggagaaaatgcagcgggaagaacaatgtattttatatcttggaccaagatatggttttggagaggcagggaagcctaaatttggcattgaacctaatgctgagcttatatatgaagttacacttaagagcttcgaaaaggccaaagaatcctgggagatggataccaaagaaaaattggagcaggctgccattgtcaaagagaagggaaccgtatacttcaagggaggcaaatacatgcaggcggtgattcagtatgggaagatagtgtcctggttagagatggaatatggtttatcagaaaaggaatcgaaagcttctgaatcatttctccttgctgcctttctgaacctggccatgtgctacctgaagcttagagaatacaccaaagctgttgaatgctgtgacaaggcccttggactggacagtgccaatgagaaaggcttgtataggaggggtgaagcccagctgctcatgaacgagtttgagtcagccaagggtgactttgagaaagtgctggaagtaaacccccagaataaggctgcaagactgcagatctccatgtgccagaaaaaggccaaggagcacaacgagcgggaccgcaggatatacgccaacatgttcaagaagtttgcagagcaggatgccaaggaagaggccaataaagcaatgggcaagaagacttcagaaggggtcactaatgaaaaaggaacagacagtcaagcaatggaagaagagaaacctgagggccacgtatgacgccacgccaaggagggaagagtcccagtgaactcggcccctcctcaatgggctttcccccaactcaggacagaacagtgtttaatgtaaagtttgttatagtctatgtgattctggaagcaaatggcaaaaccagtagcttcccaaaaacagcccccctgctgctgcccggagggttcactgaggggtggcacgggaccactccaggtggaacaaacagaaatgactgtggtgtggagggagtgagccagcagcttaagtccagctcatttcagtttctatcaaccttcaagtatccaattcagggtccctggagatcatcctaacaatgtggggctgttaggttttacctttgaactttcatagcactgcagaaacctttaaaaaaaaaatgcttcatgaatttctcctttcctacagttgggtagggtaggggaaggaggataagcttttgttttttaaatgactgaagtgctataaatgtagtctgttgcatttttaaccaacagaacccacagtagaggggtctcatgtctccccagttccacagcagtgtcacagacgtgaaagccagaacctcagaggccacttgcttgctgacttagcctcctcccaaagtccccctcctcagccagcctccttgtgagagtggctttctaccacacacagcctgtccctgggggagtaattctgtcattcctaaaacacccttcagcaatgataatgagcagatgagagtttctggattagcttttcctattttcgatgaagttctgagatactgaaatgtgaaaagagcaatcagaattgtgctttttctcccctcctctattccttttagggaataatattcaatacacagtacttcctcccagcattgctactgctcagcttcttctttcattctaatccttgctattaagaatttaagacttgtgcttacaatatttttgacctggagtggatctatttacatagtcatttaggatccatgcagctttttttgtctttttaagattattggctcataagcatatgtatactggtttatggaactttatttacactcctctatcatgcaaaaaaattttgactttttagtactaagcttaatttttaaaaacaaaatctgtagggttgacaaataaatagttgctcttctacactaggggtttcacctgcaggtttgacacgcagttgctcgcttttcctgccctgtcaagcttctctgttctggcgtgagttgtgaaagagttgaagacagcttcccatgccggtacacagccagtagcctaaatctccagtacttgagctgaccattgaactagggcaagtcttaaatgtgtacatgtagttgaatttcagtccttacgggtaaacagattgagcatggctctctattccctcagcctaagaaacactcatgggaatgcatttggcaacccaaggaaccatttgcttaaacctggaacatctcacctttttaaatcctaaaaaacactggcagttatattttaaattagtttttatttttatgatggttttatcaaaagacttttattattagattgggacccccttcaaacctaaaaatcaagttatttccttttataatacttttcttccccatggaacaaatgggatcaatttgtgagttttttcctttaatgataactaaaatccctctaatttctcatttatgcttttgtcttttttatgaaatatttcttttaaaagccccagtctcacctacgaaatatgaagagcaaaagctgattttgcttacttgctaaactgttgggaaagctctgtagagcatggttccagtgaggccaagattgaaatttgatactaaaaaggccacctagctttttgcagataacaaacaagaaagctattccaagactcagatgatgccagctgtctcccacgtgtgtattatggttcaccagggggaactggcaaaagtgtgtgtggggaggggaagggtgtgtgagtggttctgagcaaataactacagggtgcccattaccactcaagaagacacttcacgtattcttgtatcaaattcaataatcttaaacaatttgtgtagaagtccacagacatctttcaaccaccttttaggctgcatatggattgccaagtcagcatatgaggaattaaagacattgtttttaaaaaaaaaaaatcatttagatgcacttttttgtgtgttctttaaataaatccaaaaaaaatgtgacttcc

SEQ ID NO: 7563 - DNA, 3827 bp, Homo sapiens
  source 1..3827: mol_type = unassigned DNA; mol_type = unassigned DNA
agtctcgggcggcggtgtccggcgcgcgggcggcctgctgggcgggctgaagggttagcggagcacgggcaaggcggagagtgacggagtcggcgagcccccgcggcgacaggtaccggcgccatggccacggagatggggcggccggccgcggcgccccgggagccgaacgccctccttccaggttctctacttaaaagacaatgactactgatgaaggtgccaagaacaatgaagaaagccccacagccactgttgctgagcagggagaggatattacctccaaaaaagacaggggagtattaaagattgtcaaaagagtggggaatggtgaggaaacgccgatgattggagacaaagtttatgtccattacaaaggaaaattgtcaaatggaaagaagtttgattccagtcatgatagaaatgaaccatttgtctttagtcttggcaaaggccaagtcatcaaggcatgggacattggggtggctaccatgaagaaaggagagatatgccatttactgtgcaaaccagaatatgcatatggctcggctggcagtctccctaaaattccctcgaatgcaactctcttttttgagattgagctccttgatttcaaaggagaggatttatttgaagatggaggcattatccggagaaccaaacggaaaggagagggatattcaaatccaaacgaaggagcaacagtagaaatccacctggaaggccgctgtggtggaaggatgtttgactgcagagatgtggcattcactgtgggcgaaggagaagaccacgacattccaattggaattgacaaagctctggagaaaatgcagcgggaagaacaatgtattttatatcttggaccaagatatggttttggagaggcagggaagcctaaatttggcattgaacctaatgctgagcttatatatgaagttacacttaagagcttcgaaaaggccaaagaatcctgggagatggataccaaagaaaaattggagcaggctgccattgtcaaagagaagggaaccgtatacttcaagggaggcaaatacatgcaggcggtgattcagtatgggaagatagtgtcctggttagagatggaatatggtttatcagaaaaggaatcgaaagcttctgaatcatttctccttgctgcctttctgaacctggccatgtgctacctgaagcttagagaatacaccaaagctgttgaatgctgtgacaaggcccttggactggacagtgccaatgagaaaggcttgtataggaggggtgaagcccagctgctcatgaacgagtttgagtcagccaagggtgactttgagaaagtgctggaagtaaacccccagaataaggctgcaagactgcagatctccatgtgccagaaaaaggccaaggagcacaacgagcgggaccgcaggatatacgccaacatgttcaagaagtttgcagagcaggatgccaaggaagaggccaataaagcaatgggcaagaagacttcagaaggggtcactaatgaaaaaggaacagacagtcaagcaatggaagaagagaaacctgagggccacgtatgacgccacgccaaggagggaagagtcccagtgaactcggcccctcctcaatgggctttcccccaactcaggacagaacagtgtttaatgtaaagtttgttatagtctatgtgattctggaagcaaatggcaaaaccagtagcttcccaaaaacagcccccctgctgctgcccggagggttcactgaggggtggcacgggaccactccaggtggaacaaacagaaatgactgtggtgtggagggagtgagccagcagcttaagtccagctcatttcagtttctatcaaccttcaagtatccaattcagggtccctggagatcatcctaacaatgtggggctgttaggttttacctttgaactttcatagcactgcagaaacctttaaaaaaaaaatgcttcatgaatttctcctttcctacagttgggtagggtaggggaaggaggataagcttttgttttttaaatgactgaagtgctataaatgtagtctgttgcatttttaaccaacagaacccacagtagaggggtctcatgtctccccagttccacagcagtgtcacagacgtgaaagccagaacctcagaggccacttgcttgctgacttagcctcctcccaaagtccccctcctcagccagcctccttgtgagagtggctttctaccacacacagcctgtccctgggggagtaattctgtcattcctaaaacacccttcagcaatgataatgagcagatgagagtttctggattagcttttcctattttcgatgaagttctgagatactgaaatgtgaaaagagcaatcagaattgtgctttttctcccctcctctattccttttagggaataatattcaatacacagtacttcctcccagcattgctactgctcagcttcttctttcattctaatccttgctattaagaatttaagacttgtgcttacaatatttttgacctggagtggatctatttacatagtcatttaggatccatgcagctttttttgtctttttaagattattggctcataagcatatgtatactggtttatggaactttatttacactcctctatcatgcaaaaaaattttgactttttagtactaagcttaatttttaaaaacaaaatctgtagggttgacaaataaatagttgctcttctacactaggggtttcacctgcaggtttgacacgcagttgctcgcttttcctgccctgtcaagcttctctgttctggcgtgagttgtgaaagagttgaagacagcttcccatgccggtacacagccagtagcctaaatctccagtacttgagctgaccattgaactagggcaagtcttaaatgtgtacatgtagttgaatttcagtccttacgggtaaacagattgagcatggctctctattccctcagcctaagaaacactcatgggaatgcatttggcaacccaaggaaccatttgcttaaacctggaacatctcacctttttaaatcctaaaaaacactggcagttatattttaaattagtttttatttttatgatggttttatcaaaagacttttattattagattgggacccccttcaaacctaaaaatcaagttatttccttttataatacttttcttccccatggaacaaatgggatcaatttgtgagttttttcctttaatgataactaaaatccctctaatttctcatttatgcttttgtcttttttatgaaatatttcttttaaaagccccagtctcacctacgaaatatgaagagcaaaagctgattttgcttacttgctaaactgttgggaaagctctgtagagcatggttccagtgaggccaagattgaaatttgatactaaaaaggccacctagctttttgcagataacaaacaagaaagctattccaagactcagatgatgccagctgtctcccacgtgtgtattatggttcaccagggggaactggcaaaagtgtgtgtggggaggggaagggtgtgtgagtggttctgagcaaataactacagggtgcccattaccactcaagaagacacttcacgtattcttgtatcaaattcaataatcttaaacaatttgtgtagaagtccacagacatctttcaaccaccttttaggctgcatatggattgccaagtcagcatatgaggaattaaagacattgtttttaaaaaaaaaaaatcatttagatgcacttttttgtgtgttctttaaataaatccaaaaaaaatgtgacttcc

SEQ ID NO: 7564 - DNA, 7384 bp, Homo sapiens
  source 1..7384: mol_type = unassigned DNA; mol_type = unassigned DNA
gattcgggccggctcgcgggcgctgccagtctcgggcggcggtgtccggcgcgcgggcggcctgctgggcgggctgaagggttagcggagcacgggcaaggcggagagtgacggagtcggcgagcccccgcggcgacaggttctctacttaaaagacaatgactactgatgaaggtgccaagaacaatgaagaaagccccacagccactgttgctgagcagggagaggatattacctccaaaaaagacaggggagtattaaagattgtcaaaagagtggggaatggtgaggaaacgccgatgattggagacaaagtttatgtccattacaaaggaaaattgtcaaatggaaagaagtttgattccagtcatgatagaaatgaaccatttgtctttagtcttggcaaaggccaagtcatcaaggcatgggacattggggtggctaccatgaagaaaggagagatatgccatttactgtgcaaaccagaatatgcatatggctcggctggcagtctccctaaaattccctcgaatgcaactctcttttttgagattgagctccttgatttcaaaggagaggatttatttgaagatggaggcattatccggagaaccaaacggaaaggagagggatattcaaatccaaacgaaggagcaacagtagaaatccacctggaaggccgctgtggtggaaggatgtttgactgcagagatgtggcattcactgtgggcgaaggagaagaccacgacattccaattggaattgacaaagctctggagaaaatgcagcgggaagaacaatgtattttatatcttggaccaaggccaaagaatcctgggagatggataccaaagaaaaattggagcaggctgccattgtcaaagagaagggaaccgtatacttcaaggtgtgtgagtccctatgcaatcctttccatctcaaagaatttattcaagtgttggtgaattgtgctgatattccctactctgaattttgtcaacactgcttggtaagaataagctgcaatttttataaatctgtcattttcaatatgaaaaatggtgagaaaacaatcatgtggaaaaaaaaaaaagtacagattcctcttttacacattctgctctagattgtaaccttccatacaggcagaccaggtctggcatccccacccaccacagtatcactcactcctaaagcatcttgcttggtacatagttggcactcaacaagtgtttttggaatgaaaaaagaatgaatagaataattgttagcaaagaatggaattcataagggtaagtttcacatcatttttctttcttcctttttttttttttgtatgagagacagggtctccctttctttcccaggctggtctcaaacttctagcctcaagcaatcctcccacctcagcttcccaaagtgctgagattacaggcgtgagccactgcaccgggcccatcttcctttagactgtcttgatgaagtcactagagcatatgataaaaggagagaggacatgcacaaatttcaaaacaaactgacaggagagtattgattgcttctaatggccaagatgattcctgcacacttgcttttatgaggaatctccggatattcctgaatgatattcatcataaattgcttctcagaaacccttcttggagcaactaggagtgtgatattttctcacttagatcttaaacctctagatgtaagaaaaaaagaaaccgcccttcattctgttttaatcagtgttctacccattgcttccccaccccaaatatatgccttctccatgtcaagcagaaagggcttagtgatgagaattagagggagaatgggagttctgtcaaggtttctttcgttttctgccactgcaatacagaaattagatgtttttcagcagtataaagcagtgaggcataagtgtactttaacaagtctttatggggcatctgctataagacatgctattattaagttacaaccttgtcaggagggaggagtggcaatgttaatccaaatgaaacaactagagaattatgtaagaatatataatcaacccaaaattaacacagccagagggcaccatgtgttttcagaatttgagctgagacaatattgggtcatgaaatcagttttgtggaagtgtattgcaatatgttataaggatcagttttgttgcataaaactttgcttgtgtatgagtaagtactggattgcatatttcttactgtgggtggtattcaaacaaattttaaatcatgggtttagataagtataaatatataaatatgttatttatcattatttactatgtatactaaactcttatggatcaccagaaagcatgggggtatgatagaataagctcagaattgggaaaaatgggctttattgctcttcaaatgatttagtcatttaaggtccaaagaggttatattttcaagtgaaaaataggggagttagatgttccccaagtttctttccagcctgaatttctgtgagtttctaaactctcaagaacaagtgttatttttttggttttgttttgtttttaattctaattgaggtatattggatacttctaaactattcaagtaagattccaagtgggttatttgtatatccaaatacataatacactagagggaaaaatgtttctacaaaatttcttaagatcgtgagtccttaacagtattttctatatttccgaagtccataaaaatccttaactatattttatatatttcctcaatacttccaaatagaatattaacagtttgggaagatttgaggcttttggcctttgactagaattatatcgattcagtgtagtaaaacagctcagctattcagaggctctaatcggtgctatgatacagaattttggagaacattattggtaatgaaataatgttatgaagccatctgtcatatagctgtgttctgaatatatacagagagatggccagaattagtgatcagtagcagaaagcaatgagtgtctgtacagttacttaactttgttgcttatcagcatcacaactgcaagagtgatactattatgaacctacttaaaattaccaatctttggataaaatctggatcagcagtcacacacatggaaaaaattatttttaacatggaatttgataggcaaaatttttcaaaacattagtccattggggaaaaattaatgaaaggttcaaaaccactgacctgagacttttctcccagaatgtctctgaacattttgtaccactaaaaacttccctggaggcacctttataattataggtaaaagatcccagcagtagtcctagcgttagctgtaaaacttcaaaatggttagtagatagtttcctgtacatattcccttcccaactcagggcaggtttcaatctgccatactgccctcccgggccttgtctttccagggtgtctgacttggcatgttatgcatttgcacagagtccagatgtgtaggtgagagcagagatgggctgaactaaagatctgtatttcatgccatctgcatattggaattctgtttccattgatctgttggtttggtttatacctaaatgggtaaagcctctctcctgagtaggattgaattgtactcagcttttaagtgggaatgattttgccattgaagatgtaaagtcctcatttcaacctctgaatactaaagagaagaaaaatagagaactctatttggctctgaaaataattattaagtacaggtaacagcataatattaagccaggcattgtgcaagcgagttaaacagacacgatttttgccctcatagctgacagtgttctgcaggacaggagcattaactcacacctggtcagtgtttttcttttttctgacttggcagcagagtggcaagaaggctaagaacactgaagtgatgtgggattcttgcgcccccttgtgcttctcctgggaagaaagcatttctaaaacaaactagttgaggagaattgttcaacctctaaactcttcagataaatcgggctttgctatattttcaccacccttgctgttccaagataccagtaatgtgatttagaaacaagccgtttatgactctaggatttgatgttttaaaaaaaattcctaagaagagtccaccctgtctttcatctctttcctttagtgcagaatttttcaacctcagtactatcaacatttggagtgggataattcttgattgtgtggggctgtcttgtgcattgtagaatatttagcagcattcctggcctctgcccattagatgccagtagcatcctacccagttatgacaactaaaaatgcctccagacctgccaggtgttccctggggggcaaaatcaccccccagttgagaactgctttagtacctcagaagcagggagtacaagacagacttttcgctaattggaagttgaagtctaaataaagttacatgatatatatgcaagagctttcaaaaaattaaaatgccctatgtgaaggaactattaagaagtctaatacctgttttttgtgttttgttttgttttaccatggccttctaccattctgattattcagaacttattgaaatgttaagatctaggtttttgtcctccctggctcttcttttctttccctatacaatatattaggagataatcagaaaagttaagttaatcaatgcattagagagggaggaggagagaggatgaagaaatgaggcatgacaggggaaatgcctgtccttcctatctcatctcagtgaaacaacacttttcatttccacccacacattttttgctcccaatgatagcaaaaggttttgttgttggtattgtttttagagagagagggtcttactctgtcacccaggctggagtgcagtggcacaagcatagctaactgcagcttcgaactcctggacttaagagatcctcctgcctcagcttcccaaagtgctgggactataggcgtgagccaccacaccactttagaaaaagtcttgattccatatttacattcctttgatttcaatatttactcaacaaacctttattaaagacctcttggtgctaaaccctgaatattccaaaagggagaggacaatgctgcctgtcctcaaagaccagcaagagaaaaggcagtgacagaaagaaaatgccgacctgaaactggtgaggactttattcttttttttttgtagcatccaaaaaaggagtggtaggcctaagactatgacaaaatttaagtattgtcttagcttgggctgccacagtaaaataccatacactgggtggcttcaacaacaggaatttacttctggagactgtaagtcccagatcaaggtgttagcaggatcagtgtctggggagggcctctcctctggttccttgtagctcccttcttgctgtgttctcacatggcctttccacatgcatgtgagtggagagagggcagagggcagcaagcacccgagtttcttcttataaaggctctaatcccatcatgaggccccaccctcatgaccacatctaacctaattccctccccaaatgctccatctgcaaatatcacattcggggtgagggcttcaacataggaatttaggatgggggacacaattcagtccatagcaaatctaatttcctcaagaatttcagcatttaaaataaaatgccctggtttcgtgttcttatgaatgacctgtatcacacacttctgaggcagagagggtgacagactttgattttagtgccagtcttccctctcctaagtgagtgacttgggaagaaggatgttcgagggatgtagcctggccctcattcacacccaggccctccagctggaacaggtctgccccatcttcatcaccagaaaatccacaccagggcttcctttctacaggcagagctcgtttcttacatcacccacttgaagtcctgtatcacaggcatgtcctcttagacctgctctatggtttttctcttactcagactccttgggtgagggttggagtatttgtggggagagacaactcggcagtgagatgtacgcgctgcttgggctgtggtaaatcctagtaacatggtcttaacactgttggtcaggcattgaatttaatgtcctaataggtctggctgctcctctgccatctggcaggatgtatcatctgtggttttgagcttatcacctcctcaaaggagaatccccacttgtactcctgtttctatttgcgtatttaccagcgattccccagtgctttcatttaccttaaaatcacagtggacacattgtctcagccctggaggggttttgttttgttttgttttgttttgttttgtttttgaggagtctcgctctgtcacccaggctggagtgcagtggcatgatcttggctcactgcaacctctgcctcttaggttcaagcagttctcctgcctcagcctcctaagtagccgggattacaggcatatgccaccatgcctggctcatttttgtatttttagtagagacggccaggctggtctcgaactcctgacctcaggtgatccacctgtctcggcctccaaagtgctgggattacaggtatgagccactgtgctcagcccccagcgtttctcatatgagcatgtatatatatatatattatatatatattatatatgtttatatttatatatattatatataactgacagacctttctgatgtatattgttttatagttgttatttatgttgtatgctactatccaactattcatattcccattgcctatagatcaggggtcagcaaactacagtttgctggccaaatctggtccctgcctgtttttgtaagtacagtttaactgaaacacagctgcacccattgatttacatactgtctagagcagcttttgcactacaaatgataagaatttagtagttgcaacagagactggttcaaataggattggctgtgtttggaactagcacttgccagaatgtaatatttgctgtgaagtgctgaaaagaaaagtaacttccttttcatttttttagtggcatagtctaaaactgctcacaatccttttgaaagactaaagaataggccaggtgtggtggctcatgcctgtaatcccagcactttgggaggccaaggcaggcggatcacaaggtcaggagttcaagaccagcctggccaacatagtgaaacgctgtctctactaaaaatacaaaaaaaaatagctgggcttggtggcggccacctgtagtccccagctactcgggaggctgaggcaggagaatcgctggaacccgggaggcggaggttgcagtgagctgagatggcgccattgcactccagccctggagacagtgcgagactgtgtctc

SEQ ID NO: 7565 - DNA, 2577 bp, Homo sapiens
  source 1..2577: mol_type = unassigned DNA; mol_type = unassigned DNA
acagtctctccatctgcatccccacttcatcaccatcccaccgtctctccctcgctccactcgcgggtaaccgaggcttctccctcccaggctggttcttgggcgttcccgacccttagctacccacgatgtttcagacagtccccgacacgtcgtcttacatcaaggaggctctgtcggtggtgagcgacgaccagtccctctttgactcagcgtacggagcggcagcccatctccccaaggccgacatgactgcctcggggagtcctgactacgggcagccccacaagatcaaccccctcccaccacagcaggagtggatcaatcagccagtgagggtcaacgtcaagcgggagtatgaccacatgaatggatccaggttcactgctggcctataatacaacctcccacaccgaccaatcctcacgattgagtgtcaaagaagacccttcttatgactcagtcagaagaggagcttggggcaataacatgaattctggcctcaacaaaagtcctccccttggaggggcacaaacgatcagtaagaatacagagcaacggccccagccagatccgtatcagatcctgggcccgaccagcagtcgcctagccaaccctggaagcgggcagatccagctgtggcaattcctcctggagctgctctccgacagcgccaacgccagctgtatcacctgggaggggaccaacggggagttcaaaatgacggaccccgatgaggtggccaggcgctggggcgagcggaaaagcaagcccaacatgaattacgacaagctgagccgggccctccgttattactatgataaaaacattatgaccaaagtgcacggcaaaagatatgcttacaaatttgacttccacggcattgcccaggctctgcagccacatccgaccgagtcgtccatgtacaagtacccttctgacatctcctacatgccttcctaccatgcccaccagcagaaggtgaactttgtccctccccatccatcctccatgcctgtcacttcctccagcttctttggagccgcatcacaatactggacctcccccacggggggaatctaccccaaccccaacgtcccccgccatcctaacacccacgtgccttcacacttaggcagctactactagaagcttactcatcagtggccttctagctgaagcccatcctgcacacttactggatgctttggactcaacaggacatatgtggccttgaagggaagacaaaactggatgttctttcttgttggatagaacctttgtatttgttctttaaaaacattttttttaatgttggtaacttttgcttcctctacctgaacaaagagatgaataattccatgggccagtatgccagtttgaattctcagtctcctagcatcttgtgagttgcatattaagattactggaatggttaagtcatggttctgagaaagaagctgtacgttttctttatgtttttatgaccaaagcagtttcttgtcaatacacggggttcagtatgacacagaatcatggacttaacccgtcatgttctggtttgagatttagtgacaaatagaggtgggaagcttataatctaattttaggaggaccaaattcagtggatggcaactggaacattgattgtaaggccagtgaagttttcacccaactggaatttgatggaaagaaggtttgtgtgtttaagacgccaagggcattgcagaatccctctcagtggacagtatgcactcagctgaccactctctctagaaatagtcaagatatgaactaagaaattttaatgcaaatacatacattcctgaaagacggggaattaaattactaatttttttttttttttaaatgatgacagtggtcccagaacttggaaaagttgtagggatttctaaactcaagcagattcgcaagtgctgtgcgcttgtcagaccatcagaccagggccaaccaatcagaaggcaacttactgtataaattatgcagagttattttcctatatctcacagtattaaaaataaataattaaaaattaagaataaataaacgagttgacctcggtcacaaaagcagttttactatcgaatcaatcgctgttattttttttaatgtaatttgtacatcttttttcaatctgtacatttgggctgtctgtatgtttttatagctggtttttaaaaagcataatatgcctatagctgaaaaggaaacagggctgtttaagtcactgacttatgagaaagcaaagcactggtacagttatttaacaggcatacacaagcagggaaaagataatccatttagatctttaatgctttggaaatgcgtgtaacagtactgcaataatcacagctctgggaaaaacaacgaaactttcccttgtggagaggagggattttcctgctctatataagcaacatatttttagacattaaaatatatataattttgcaggtaattgttgacttttttaactatattaagtgttaagctgacaactgtcaaagaagaccatgttgtaaaataatttgactaaataaatggttccttctctca

SEQ ID NO: 7566 - DNA, 561 bp, Homo sapiens
  source 1..561: mol_type = unassigned DNA; mol_type = unassigned DNA
ctcaccccgggaaaagtctgggtctgctctgcgctgttgcgtgctgcgctcctgggacctgctgactgtcctagagggaacgtcccgcggtagtgtcagttccctggggaccaggaagggcgactcttgcctgggagtcagtgcttgggccgtcgggtccgggaggctctgtcggtggtgagcgacgaccagtccctctttgactcagcgtacggagcggcagcccatctccccaaggccgacatgactgcctcggggagtcctgactacgggcagccccacaagatcaaccccctcccaccacagcaggagtggatcaatcagccagtgagggtcaacgtcaagcgggagtatgaccacatgaatggatccagggagtctccggtggactgcagcgttagcaaatgcagcaagctggtgggcggaggcgagtccaaccccatgaactacaacagctatatggacgagaagaatggcccccctcctcccaacatgaccaccaacgagaggagagtcatcgtccccgcagaccccacactgtggacacaggagcatgtgagg

SEQ ID NO: 7567 - DNA, 4127 bp, Homo sapiens
  source 1..4127: mol_type = unassigned DNA; mol_type = unassigned DNA
aggagcaagtatcctgtgtgcgcagcgcatgaatgtgtctgggcatctccgcgtatatttatatagtgtgtgatgcgaaaagcaggaccagcaggggaggaagagggggtgtggggggggagggaagacgagggagagcagaggggagagaagagagaggagagctcgaggcgagagagagagagagagagagagagagagagagagagagagagagagagagataggacttcctccccgattcgcaaagtgaagtcacttcccaaaattagctgaaaaaaaagtttcatccggttaactgtctctttcgctccgctacaacaacaaacgtgcacaggggagtgagggcagggcgctcgcagggggcacgcagggagggcccagggcgccagggaggccgcgccgggctaatccgaaggggctgcgaggtcaggctgtaaccgggtcaatgtgtggaatattggggggctcggctgcagacttggccaaatggacgggactattaaggaggctctgtcggtggtgagcgacgaccagtccctctttgactcagcgtacggagcggcagcccatctccccaaggccgacatgactgcctcggggagtcctgactacgggcagccccacaagatcaaccccctcccaccacagcaggagtggatcaatcagccagtgagggtcaacgtcaagcgggagtatgaccacatgaatggatccagggagtctccggtggactgcagcgttagcaaatgcagcaagctggtgggcggaggcgagtccaaccccatgaactacaacagctatatggacgagaagaatggcccccctcctcccaacatgaccaccaacgagaggagagtcatcgtccccgcagaccccacactgtggacacaggagcatgtgaggcaatggctggagtgggccataaaggagtacagcttgatggagatcgacacatcctttttccagaacatggatggcaaggaactgtgtaaaatgaacaaggaggacttcctccgcgccaccaccctctacaacacggaagtgctgttgtcacacctcagttacctcagggaaagttcactgctggcctataatacaacctcccacaccgaccaatcctcacgattgagtgtcaaagaagacccttcttatgactcagtcagaagaggagcttggggcaataacatgaattctggcctcaacaaaagtcctccccttggaggggcacaaacgatcagtaagaatacagagcaacggccccagccagatccgtatcagatcctgggcccgaccagcagtcgcctagccaaccctggaagcgggcagatccagctgtggcaattcctcctggagctgctctccgacagcgccaacgccagctgtatcacctgggaggggaccaacggggagttcaaaatgacggaccccgatgaggtggccaggcgctggggcgagcggaaaagcaagcccaacatgaattacgacaagctgagccgggccctccgttattactatgataaaaacattatgaccaaagtgcacggcaaaagatatgcttacaaatttgacttccacggcattgcccaggctctgcagccacatccgaccgagtcgtccatgtacaagtacccttctgacatctcctacatgccttcctaccatgcccaccagcagaaggtgaactttgtccctccccatccatcctccatgcctgtcacttcctccagcttctttggagccgcatcacaatactggacctcccccacggggggaatctaccccaaccccaacgtcccccgccatcctaacacccacgtgccttcacacttaggcagctactactagaagcttactcatcagtggccttctagctgaagcccatcctgcacacttactggatgctttggactcaacaggacatatgtggccttgaagggaagacaaaactggatgttctttcttgttggatagaacctttgtatttgttctttaaaaacattttttttaatgttggtaacttttgcttcctctacctgaacaaagagatgaataattccatgggccagtatgccagtttgaattctcagtctcctagcatcttgtgagttgcatattaagattactggaatggttaagtcatggttctgagaaagaagctgtacgttttctttatgtttttatgaccaaagcagtttcttgtcaatacacggggttcagtatgacacagaatcatggacttaacccgtcatgttctggtttgagatttagtgacaaatagaggtgggaagcttataatctaattttaggaggaccaaattcagtggatggcaactggaacattgattgtaaggccagtgaagttttcacccaactggaatttgatggaaagaaggtttgtgtgtttaagacgccaagggcattgcagaatccctctcagtggacagtatgcactcagctgaccactctctctagaaatagtcaagatatgaactaagaaattttaatgcaaatacatacattcctgaaagacggggaattaaattactaatttttttttttttttaaatgatgacagtggtcccagaacttggaaaagttgtagggatttctaaactcaagcagattcgcaagtgctgtgcgcttgtcagaccatcagaccagggccaaccaatcagaaggcaacttactgtataaattatgcagagttattttcctatatctcacagtattaaaaataaataattaaaaattaagaataaataaacgagttgacctcggtcacaaaagcagttttactatcgaatcaatcgctgttattttttttaatgtaatttgtacatcttttttcaatctgtacatttgggctgtctgtatgtttttatagctggtttttaaaaagcataatatgcctatagctgaaaaggaaacagggctgtttaagtcactgacttatgagaaagcaaagcactggtacagttatttaacaggcatacacaagcagggaaaagataatccatttagatctttaatgctttggaaatgcgtgtaacagtactgcaataatcacagctctgggaaaaacaacgaaactttcccttgtggagaggagggattttcctgctctatataagcaacatatttttagacattaaaatatatataattttgcaggtaattgttgacttttttaactatattaagtgttaagctgacaactgtcaaagaagaccatgttgtaaaataatttgactaaataaatggttccttctctcagtgctgaggacagttttcttatttaccgcccccgttaggtcaaagggttttccctggggaactttcctatttacttcttgcactatcaagaatttttcgaatgtacctactgcagtacagcagaaggtaaaaaatcagtgtggtttttcattgttgttgatgatgtttgtagtgtttttgtgtgtgttatttaaatcttcctccagcctaaaagggttttataaaacagcagctaaggccatggataaacctgtatgtaaggactggagcaaagcgagctggtctatccagactggtctgtgagatttaactctgcagcctcccctgggcacttcagacccagacggccaccttctgccactccagcaaagaataagcgccctgcttccttcaggtctcagaccaggactttatggctcatgcagatttttaaggtcatttttcttcccaaggaagaaacttgcctccagttccttcactgttaggtagcttattttcattttctctattttacaatgaaaagagtgagacctgggaagtccttgatttgcaaggaattagactcacagcattggtaaccctagaaccttcttagggtaacactaagtaccttctagacaacatgtctacctaaatgaaatgggatgtgtttcggaacatttgtctccagtttttttttaatcttgcaccctgccatttaaaaagatgtgtaaagcacatattctcaacatatgcacattgatttataaatcatatatacaaactgttacattattcttcatattagaaaacaaatacaaaatagaacattttaaatggtgatataaaaataaattgaaactgaaattcta

SEQ ID NO: 7568 - DNA, 3130 bp, Homo sapiens
  source 1..3130: mol_type = unassigned DNA; mol_type = unassigned DNA
caacaacaaacgtgcacaggggagtgagggcagggcgctcgcagggggcacgcagggagggcccagggcgccagggaggccgcgccgggctaatccgaaggggctgcgaggtcaggctgtaaccgggtcaatgtgtggaatattggggggctcggctgcagacttggccaaatggacgggactattaaggaggctctgtcggtggtgagcgacgaccagtccctctttgactcagcgtacggagcggcagcccatctccccaaggccgacatgactgcctcggggagtcctgactacgggcagccccacaagatcaaccccctcccaccacagcaggagtggatcaatcagccagtgagggtcaacgtcaagcgggagtatgaccacatgaatggatccaggcgccagctgcctcattaaagagcagccttttatgctgggcttcacctgtacccaccctgagcggcagccgtggagccccatggccgcacgcagggcttgcgctggctggaggaggcacggtgcttgggagctgcaagaatggagggaggactggcaggcgagcgggcgagggagtctccggtggactgcagcgttagcaaatgcagcaagctggtgggcggaggcgagtccaaccccatgaactacaacagctatatggacgagaagaatggcccccctcctcccaacatgaccaccaacgagaggagagtcatcgtccccgcagaccccacactgtggacacaggagcatgtgaggcaatggctggagtgggccataaaggagtacagcttgatggagatcgacacatcctttttccagaacatggatggcaaggaactgtgtaaaatgaacaaggaggacttcctccgcgccaccaccctctacaacacggaagtgctgttgtcacacctcagttacctcagggaaagttcactgctggcctataatacaacctcccacaccgaccaatcctcacgattgagtgtcaaagaagacccttcttatgactcagtcagaagaggagcttggggcaataacatgaattctggcctcaacaaaagtcctccccttggaggggcacaaacgatcagtaagaatacagagcaacggccccagccagatccgtatcagatcctgggcccgaccagcagtcgcctagccaaccctggaagcgggcagatccagctgtggcaattcctcctggagctgctctccgacagcgccaacgccagctgtatcacctgggaggggaccaacggggagttcaaaatgacggaccccgatgaggtggccaggcgctggggcgagcggaaaagcaagcccaacatgaattacgacaagctgagccgggccctccgttattactatgataaaaacattatgaccaaagtgcacggcaaaagatatgcttacaaatttgacttccacggcattgcccaggctctgcagccacatccgaccgagtcgtccatgtacaagtacccttctgacatctcctacatgccttcctaccatgcccaccagcagaaggtgaactttgtccctccccatccatcctccatgcctgtcacttcctccagcttctttggagccgcatcacaatactggacctcccccacggggggaatctaccccaaccccaacgtcccccgccatcctaacacccacgtgccttcacacttaggcagctactactagaagcttactcatcagtggccttctagctgaagcccatcctgcacacttactggatgctttggactcaacaggacatatgtggccttgaagggaagacaaaactggatgttctttcttgttggatagaacctttgtatttgttctttaaaaacattttttttaatgttggtaacttttgcttcctctacctgaacaaagagatgaataattccatgggccagtatgccagtttgaattctcagtctcctagcatcttgtgagttgcatattaagattactggaatggttaagtcatggttctgagaaagaagctgtacgttttctttatgtttttatgaccaaagcagtttcttgtcaatacacggggttcagtatgacacagaatcatggacttaacccgtcatgttctggtttgagatttagtgacaaatagaggtgggaagcttataatctaattttaggaggaccaaattcagtggatggcaactggaacattgattgtaaggccagtgaagttttcacccaactggaatttgatggaaagaaggtttgtgtgtttaagacgccaagggcattgcagaatccctctcagtggacagtatgcactcagctgaccactctctctagaaatagtcaagatatgaactaagaaattttaatgcaaatacatacattcctgaaagacggggaattaaattactaatttttttttttttttaaatgatgacagtggtcccagaacttggaaaagttgtagggatttctaaactcaagcagattcgcaagtgctgtgcgcttgtcagaccatcagaccagggccaaccaatcagaaggcaacttactgtataaattatgcagagttattttcctatatctcacagtattaaaaataaataattaaaaattaagaataaataaacgagttgacctcggtcacaaaagcagttttactatcgaatcaatcgctgttattttttttaatgtaatttgtacatcttttttcaatctgtacatttgggctgtctgtatgtttttatagctggtttttaaaaagcataatatgcctatagctgaaaaggaaacagggctgtttaagtcactgacttatgagaaagcaaagcactggtacagttatttaacaggcatacacaagcagggaaaagataatccatttagatctttaatgctttggaaatgcgtgtaacagtactgcaataatcacagctctgggaaaaacaacgaaactttcccttgtggagaggagggattttcctgctctatataagcaacatatttttagacattaaaatatatataattttgcaggtaattgttgacttttttaactatattaagtgttaagctgacaactgtcaaagaagaccatgttgtaaaataatttgactaaataaatggttccttctctcag

SEQ ID NO: 7569 - DNA, 3859 bp, Homo sapiens
  source 1..3859: mol_type = unassigned DNA; mol_type = unassigned DNA
aacaaacgtgcacaggggagtgagggcagggcgctcgcagggggcacgcagggagggcccagggcgccagggaggccgcgccgggctaatccgaaggggctgcgaggtcaggctgtaaccgggtcaatgtgtggaatattggggggctcggctgcagacttggccaaatggacgggactattaaggaattctttctctgggtcatccactgctgagccccctccccaggaagtggaattgaggctctgtcggtggtgagcgacgaccagtccctctttgactcagcgtacggagcggcagcccatctccccaaggccgacatgactgcctcggggagtcctgactacgggcagccccacaagatcaaccccctcccaccacagcaggagtggatcaatcagccagtgagggtcaacgtcaagcgggagtatgaccacatgaatggatccagggagtctccggtggactgcagcgttagcaaatgcagcaagctggtgggcggaggcgagtccaaccccatgaactacaacagctatatggacgagaagaatggcccccctcctcccaacatgaccaccaacgagaggagagtcatcgtccccgcagaccccacactgtggacacaggagcatgtgaggcaatggctggagtgggccataaaggagtacagcttgatggagatcgacacatcctttttccagaacatggatggcaaggaactgtgtaaaatgaacaaggaggacttcctccgcgccaccaccctctacaacacggaagtgctgttgtcacacctcagttacctcagggaaagttcactgctggcctataatacaacctcccacaccgaccaatcctcacgattgagtgtcaaagaagacccttcttatgactcagtcagaagaggagcttggggcaataacatgaattctggcctcaacaaaagtcctccccttggaggggcacaaacgatcagtaagaatacagagcaacggccccagccagatccgtatcagatcctgggcccgaccagcagtcgcctagccaaccctggaagcgggcagatccagctgtggcaattcctcctggagctgctctccgacagcgccaacgccagctgtatcacctgggaggggaccaacggggagttcaaaatgacggaccccgatgaggtggccaggcgctggggcgagcggaaaagcaagcccaacatgaattacgacaagctgagccgggccctccgttattactatgataaaaacattatgaccaaagtgcacggcaaaagatatgcttacaaatttgacttccacggcattgcccaggctctgcagccacatccgaccgagtcgtccatgtacaagtacccttctgacatctcctacatgccttcctaccatgcccaccagcagaaggtgaactttgtccctccccatccatcctccatgcctgtcacttcctccagcttctttggagccgcatcacaatactggacctcccccacggggggaatctaccccaaccccaacgtcccccgccatcctaacacccacgtgccttcacacttaggcagctactactagaagcttactcatcagtggccttctagctgaagcccatcctgcacacttactggatgctttggactcaacaggacatatgtggccttgaagggaagacaaaactggatgttctttcttgttggatagaacctttgtatttgttctttaaaaacattttttttaatgttggtaacttttgcttcctctacctgaacaaagagatgaataattccatgggccagtatgccagtttgaattctcagtctcctagcatcttgtgagttgcatattaagattactggaatggttaagtcatggttctgagaaagaagctgtacgttttctttatgtttttatgaccaaagcagtttcttgtcaatacacggggttcagtatgacacagaatcatggacttaacccgtcatgttctggtttgagatttagtgacaaatagaggtgggaagcttataatctaattttaggaggaccaaattcagtggatggcaactggaacattgattgtaaggccagtgaagttttcacccaactggaatttgatggaaagaaggtttgtgtgtttaagacgccaagggcattgcagaatccctctcagtggacagtatgcactcagctgaccactctctctagaaatagtcaagatatgaactaagaaattttaatgcaaatacatacattcctgaaagacggggaattaaattactaatttttttttttttttaaatgatgacagtggtcccagaacttggaaaagttgtagggatttctaaactcaagcagattcgcaagtgctgtgcgcttgtcagaccatcagaccagggccaaccaatcagaaggcaacttactgtataaattatgcagagttattttcctatatctcacagtattaaaaataaataattaaaaattaagaataaataaacgagttgacctcggtcacaaaagcagttttactatcgaatcaatcgctgttattttttttaatgtaatttgtacatcttttttcaatctgtacatttgggctgtctgtatgtttttatagctggtttttaaaaagcataatatgcctatagctgaaaaggaaacagggctgtttaagtcactgacttatgagaaagcaaagcactggtacagttatttaacaggcatacacaagcagggaaaagataatccatttagatctttaatgctttggaaatgcgtgtaacagtactgcaataatcacagctctgggaaaaacaacgaaactttcccttgtggagaggagggattttcctgctctatataagcaacatatttttagacattaaaatatatataattttgcaggtaattgttgacttttttaactatattaagtgttaagctgacaactgtcaaagaagaccatgttgtaaaataatttgactaaataaatggttccttctctcagtgctgaggacagttttcttatttaccgcccccgttaggtcaaagggttttccctggggaactttcctatttacttcttgcactatcaagaatttttcgaatgtacctactgcagtacagcagaaggtaaaaaatcagtgtggtttttcattgttgttgatgatgtttgtagtgtttttgtgtgtgttatttaaatcttcctccagcctaaaagggttttataaaacagcagctaaggccatggataaacctgtatgtaaggactggagcaaagcgagctggtctatccagactggtctgtgagatttaactctgcagcctcccctgggcacttcagacccagacggccaccttctgccactccagcaaagaataagcgccctgcttccttcaggtctcagaccaggactttatggctcatgcagatttttaaggtcatttttcttcccaaggaagaaacttgcctccagttccttcactgttaggtagcttattttcattttctctattttacaatgaaaagagtgagacctgggaagtccttgatttgcaaggaattagactcacagcattggtaaccctagaaccttcttagggtaacactaagtaccttctagacaacatgtctacctaaatgaaatgggatgtgtttcggaacatttgtctccagtttttttttaatcttgcaccctgccatttaaaaagatgtgtaaagcacatattctcaacatatgcacattgatttataaatcatatatacaaactgttacattattcttcatattagaaaacaaatacaaaatagaacattttaaatggtgatataaaaataaattgaaactgaaattcta

SEQ ID NO: 7570 - DNA, 620 bp, Homo sapiens
  source 1..620: mol_type = unassigned DNA; mol_type = unassigned DNA
gccctgcaggaggctctgtcggtggtgagcgacgaccagtccctctttgactcagcgtacggagcggcagcccatctccccaaggccgacatgactgcctcggggagtcctgactacgggcagccccacaagatcaaccccctcccaccacagcaggagtggatcaatcagccagtgagggtcaacgtcaagcgggagtatgaccacatgaatggatccagggagtctccggtggactgcagcgttagcaaatgcagcaagctggtgggcggaggcgagtccaaccccatgaactacaacagctatatggacgagaagaatggcccccctcctcccaacatgaccaccaacgagaggagagtcatcgtccccgcaggtaattcgagaaccaggctgcctgggcgccattcacttccccactctctgggggggcagggagcatctaaacctttatctgatactctattccctgtggaattgcaaaatggagaaagctgcacgccagccgggagtggtggctcgcgcctgtaatcccagcactttgagaggccaagacgggtgaatcacttgtcaggagttcaagaccagcctagccaacgtggtgaaacctcatctctact

SEQ ID NO: 7571 - DNA, 5370 bp, Homo sapiens
  source 1..5370: mol_type = unassigned DNA; mol_type = unassigned DNA
tttgtttttaagcaagaagaatccctttagaggaggaattaggaaagaaaaaaaagtcaaacagaaacagaaggagtggaggtttgtctctctcttttgtcccctgccttgcccttcctccctatcccatccccctcactttctgtgttgcttttcatgccagttgctaaagactgtaattttaaaactgaacgggcttttccagagccttgaggaatgtgcatctgcacgtggatttttccacaaaaaaagtgtccctgtcttttggatcttcttagccagaaacaatgaggccaggcaatcagagtccatccgtcttcccaactcttattctaatttgtttgagaggctcagaaggggctgaagggcatggttgtgtttcaccccgtcagactctgttgtttgatgaggtttgtgctccatttgttcggatggtttttatggtttctttgttgttcatggaataactttgaaggtcataattctgtatcctcaagctcctctgctattcctgctcaatgtctcaatgggactcataccaagagaaagggaaggaagaagtttccagctagttagttaagcaatttctcaacacatttatggaagcatgtggaatctttcaagaaaggggttacgatcacaaaagttcgatttgaggagtattctccaagacaactgagaagcaagcccttagtcatgcccaggtggggagcaggtctccaacctctcatttcctgatccagcccctttcccagccacatttctggcctcttccctttctctgtggtcatcagcccagccctctccactatcaatagaaaagcccgagagccctcagagagcctggaatgtgctcccaccgctgtgatgtcatcccacatcatccatgtgctgaaatcagggactggagtcggcccccaggaatgtcatggccatgggctttgagacactcttcttatgggcctttcacccaatccagaccttgcctgctcttcagagctgcttgaaggattttgctacagaactatggacatttaagaaatgtctaaccttgtgtcagtttatatttgtagaacgcttcataaggtgcttttccatatgttatctcatctgatcatttccacaaccccataaggtagataaaacataaatttttatttccgtattaaaattgaagcccagaggagacttttgattcatcccaggtttcacaacaaagagtgtcaggaagagaacttgaaccaatcctctgacttcacattcagggttcttcccattactttggctcccagataagactacaatcttctgaaagtcagagtgttaatattccaaccccagggggtgagtacacttccagaatttagggatgctttaaaagccattgctgaattgaattttatttctcctgatcactacagataatgctcatgcaacttttctgagaagcaggcgatgctaatgtacccctatttgttattgttcattagacccttcttatgactcagtcagaagaggagcttggggcaataacatgaattctggcctcaacaaaagtaagtaaatgttttatagttctttggaggaaagcatgtttctgaggacaggattggagaacaggatcatgagacacaggagagcagcaagcatttgtttccctgctttttgagtagacatcaaaattatttgccaatttagggcctttccatgataccagtccttgaaagatgatatgggattttcgtttagatttttgagttttgttttattgcgctcggttttagaacatgggaaatttgaaggttttcttgagacaaggttctgtaccaatgaatggtcactgtcactgggttttgcttttgttatttaaatcaagataatgactctctataattttgctcccgtaactgttgaggctaagtcgtaccaatttccccattccccttgatactgggtagatttcctcatatcatcatctcaccacttggtggagaaattgatgtctcagaaccctgccatctcctcaacaggttatcttctgtccctgatgaggagatgccggggggtctgggacatcaggttctccaccaagtggtgagatgatgacatgtcgaagtctacccaatatcccccagtaagagaataaggggcaagaatgactcatgaactcctgtaccagaaatcaaacttgccatgcctaggaagcaaaatatgaagcacatgaacaggtggtaaagggaattctttcaagaaagaggttggggttacaaattaatgcccaaacaataaccaagaccccttccaattatgtgtattaattatttacttactctgcacatgacatttggcaatataagattcacaaagatgaatcagacatgcactggtcccataagcgggagagagaaatcaagcacacacagaactcctttcttctggttggtatcaaggaaggctttgtggacctggtagcacttgagttagctctggaaggagaggcaggatttggacctgtggcgatatgggctggggaagacatgagcttggcatgtctgacagtcagtgaggacctcaggttcctggagcttaggatgtgtgatgcagaagaagtctggaaaggtaagaaacagaattgtaaatgatgctatgaagatatgccttagttctttaggcaatgaagagtcactaaggttttgaacactggcgtgtatggtgggttgtggggagacagaagagtaatgaggacaccagtcagactaagccagaaaccatgcaagaagcaatacagatctgtgatgcagaagtgatcatgggaatggaaggggtgtgtgagagataccaaggaggaaactcacaagacagggacaccaggaagcagctgatctttgctcagatgtcactttctcagtaaggacttctctaactttccgatttgaaaatgaaatccacagcctcagtaccatcagtgatgctatactgttagtttactttttaaaaatttgaaaatgaaaaggtgacatttaagcaaagacaaaattttaagaatttaaaaatgtgtttattattgtctctcccattggaatgcgagttctaccaggaactgcttgttcattcctgaatctccagcctggagaacagggccagcacatagtagattctaggtaaatgtttctaaaataagatgaataaatgagtcagtggagagtgggcgaaggaatgagtgagaaagcacatctgtcaagacgtcttgctcccctcggggagctgggtcctactcactgcatttctttccctcttgccacaggtcctccccttggaggggcacaaacgatcagtaagaatacagagcaacggccccagccagatccgtatcagatcctgggcccgaccagcagtcgcctagccaaccctggaagcgggcagatccagctgtggcaattcctcctggagctgctctccgacagcgccaacgccagctgtatcacctgggaggggaccaacggggagttcaaaatgacggaccccgatgaggtggccaggcgctggggcgagcggaaaagcaagcccaacatgaattacgacaagctgagccgggccctccgttattactatgataaaaacattatgaccaaagtgcacggcaaaagatatgcttacaaatttgacttccacggcattgcccaggctctgcagccacatccgaccgagtcgtccatgtacaagtacccttctgacatctcctacatgccttcctaccatgcccaccagcagaaggtgaactttgtccctccccatccatcctccatgcctgtcacttcctccagcttctttggagccgcatcacaatactggacctcccccacggggggaatctaccccaaccccaacgtcccccgccatcctaacacccacgtgccttcacacttaggcagctactactagaagcttactcatcagtggccttctagctgaagcccatcctgcacacttactggatgctttggactcaacaggacatatgtggccttgaagggaagacaaaactggatgttctttcttgttggatagaacctttgtatttgttctttaaaaacattttttttaatgttggtaacttttgcttcctctacctgaacaaagagatgaataattccatgggccagtatgccagtttgaattctcagtctcctagcatcttgtgagttgcatattaagattactggaatggttaagtcatggttctgagaaagaagctgtacgttttctttatgtttttatgaccaaagcagtttcttgtcaatacacggggttcagtatgacacagaatcatggacttaacccgtcatgttctggtttgagatttagtgacaaatagaggtgggaagcttataatctaattttaggaggaccaaattcagtggatggcaactggaacattgattgtaaggccagtgaagttttcacccaactggaatttgatggaaagaaggtttgtgtgtttaagacgccaagggcattgcagaatccctctcagtggacagtatgcactcagctgaccactctctctagaaatagtcaagatatgaactaagaaattttaatgcaaatacatacattcctgaaagacggggaattaaattactaatttttttttttttttaaatgatgacagtggtcccagaacttggaaaagttgtagggatttctaaactcaagcagattcgcaagtgctgtgcgcttgtcagaccatcagaccagggccaaccaatcagaaggcaacttactgtataaattatgcagagttattttcctatatctcacagtattaaaaataaataattaaaaattaagaataaataaacgagttgacctcggtcacaaaagcagttttactatcgaatcaatcgctgttattttttttaatgtaatttgtacatcttttttcaatctgtacatttgggctgtctgtatgtttttatagctggtttttaaaaagcataatatgcctatagctgaaaaggaaacagggctgtttaagtcactgacttatgagaaagcaaagcactggtacagttatttaacaggcatacacaagcagggaaaagataatccatttagatctttaatgctttggaaatgcgtgtaacagtactgcaataatcacagctctgggaaaaacaacgaaactttcccttgtggagaggagggattttcctgctctatataagcaacatatttttagacattaaaatatatataattttgcaggtaattgttgacttttttaactatattaagtgttaagctgacaactgtcaaagaagaccatgttgtaaaataatttgactaaataaatggttccttctctca

SEQ ID NO: 7572 - DNA, 3427 bp, Homo sapiens
  source 1..3427: mol_type = unassigned DNA; mol_type = unassigned DNA
acagtctctccatctgcatccccacttcatcaccatcccaccgtctctccctcgctccactcgcgggtaaccgaggcttctccctcccaggctggttcttgggcgttcccgacccttagctacccacgatgtttcagacagtccccgacacgtcgtcttacatcaaggaggctctgtcggtggtgagcgacgaccagtccctctttgactcagcgtacggagcggcagcccatctccccaaggccgacatgactgcctcggggagtcctgactacgggcagccccacaagatcaaccccctcccaccacagcaggagtggatcaatcagccagtgagggtcaacgtcaagcgggagtatgaccacatgaatggatccaggttcactgctggcctataatacaacctcccacaccgaccaatcctcacgattgagtgtcaaagaagacccttcttatgactcagtcagaagaggagcttggggcaataacatgaattctggcctcaacaaaagtcctccccttggaggggcacaaacgatcagtaagaatacagagcaacggccccagccagatccgtatcagatcctgggcccgaccagcagtcgcctagccaaccctggaagcgggcagatccagctgtggcaattcctcctggagctgctctccgacagcgccaacgccagctgtatcacctgggaggggaccaacggggagttcaaaatgacggaccccgatgaggtggccaggcgctggggcgagcggaaaagcaagcccaacatgaattacgacaagctgagccgggccctccgttattactatgataaaaacattatgaccaaagtgcacggcaaaagatatgcttacaaatttgacttccacggcattgcccaggctctgcagccacatccgaccgagtcgtccatgtacaagtacccttctgacatctcctacatgccttcctaccatgcccaccagcagaaggtgaactttgtccctccccatccatcctccatgcctgtcacttcctccagcttctttggagccgcatcacaatactggacctcccccacggggggaatctaccccaaccccaacgtcccccgccatcctaacacccacgtgccttcacacttaggcagctactactagaagcttactcatcagtggccttctagctgaagcccatcctgcacacttactggatgctttggactcaacaggacatatgtggccttgaagggaagacaaaactggatgttctttcttgttggatagaacctttgtatttgttctttaaaaacattttttttaatgttggtaacttttgcttcctctacctgaacaaagagatgaataattccatgggccagtatgccagtttgaattctcagtctcctagcatcttgtgagttgcatattaagattactggaatggttaagtcatggttctgagaaagaagctgtacgttttctttatgtttttatgaccaaagcagtttcttgtcaatacacggggttcagtatgacacagaatcatggacttaacccgtcatgttctggtttgagatttagtgacaaatagaggtgggaagcttataatctaattttaggaggaccaaattcagtggatggcaactggaacattgattgtaaggccagtgaagttttcacccaactggaatttgatggaaagaaggtttgtgtgtttaagacgccaagggcattgcagaatccctctcagtggacagtatgcactcagctgaccactctctctagaaatagtcaagatatgaactaagaaattttaatgcaaatacatacattcctgaaagacggggaattaaattactaatttttttttttttttaaatgatgacagtggtcccagaacttggaaaagttgtagggatttctaaactcaagcagattcgcaagtgctgtgcgcttgtcagaccatcagaccagggccaaccaatcagaaggcaacttactgtataaattatgcagagttattttcctatatctcacagtattaaaaataaataattaaaaattaagaataaataaacgagttgacctcggtcacaaaagcagttttactatcgaatcaatcgctgttattttttttaatgtaatttgtacatcttttttcaatctgtacatttgggctgtctgtatgtttttatagctggtttttaaaaagcataatatgcctatagctgaaaaggaaacagggctgtttaagtcactgacttatgagaaagcaaagcactggtacagttatttaacaggcatacacaagcagggaaaagataatccatttagatctttaatgctttggaaatgcgtgtaacagtactgcaataatcacagctctgggaaaaacaacgaaactttcccttgtggagaggagggattttcctgctctatataagcaacatatttttagacattaaaatatatataattttgcaggtaattgttgacttttttaactatattaagtgttaagctgacaactgtcaaagaagaccatgttgtaaaataatttgactaaataaatggttccttctctcagtgctgaggacagttttcttatttaccgcccccgttaggtcaaagggttttccctggggaactttcctatttacttcttgcactatcaagaatttttcgaatgtacctactgcagtacagcagaaggtaaaaaatcagtgtggtttttcattgttgttgatgatgtttgtagtgtttttgtgtgtgttatttaaatcttcctccagcctaaaagggttttataaaacagcagctaaggccatggataaacctgtatgtaaggactggagcaaagcgagctggtctatccagactggtctgtgagatttaactctgcagcctcccctgggcacttcagacccagacggccaccttctgccactccagcaaagaataagcgccctgcttccttcaggtctcagaccaggactttatggctcatgcagatttttaaggtcatttttcttcccaaggaagaaacttgcctccagttccttcactgttaggtagcttattttcattttctctattttacaatgaaaagagtgagacctgggaagtccttgatttgcaaggaattagactcacagcattggtaaccctagaaccttcttagggtaacactaagtaccttctagacaacatgtctacctaaatgaaatgggatgtgtttcggaacatttgtctccagtttttttttaatcttgcaccctgccatttaaaaagatgtgtaaagcacatattctcaacatatgcacattgatttataaatcatatatacaaactgttacattattcttcatattagaaaacaaatacaaaatagaacattttaaatggtgatataaaaataaattgaaactgaaattct

SEQ ID NO: 7573 - DNA, 4151 bp, Homo sapiens
  source 1..4151: mol_type = unassigned DNA; mol_type = unassigned DNA
agagaagagagaggagagctcgaggcgagagagagagagagagagagagagagagagagagagagagagagagagagataggacttcctccccgattcgcaaagtgaagtcacttcccaaaattagctgaaaaaaaagtttcatccggttaactgtctctttcgctccgctacaacaacaaacgtgcacaggggagtgagggcagggcgctcgcagggggcacgcagggagggcccagggcgccagggaggccgcgccgggctaatccgaaggggctgcgaggtcaggctgtaaccgggtcaatgtgtggaatattggggggctcggctgcagacttggccaaatggacgggactattaaggaggctctgtcggtggtgagcgacgaccagtccctctttgactcagcgtacggagcggcagcccatctccccaaggccgacatgactgcctcggggagtcctgactacgggcagccccacaagatcaaccccctcccaccacagcaggagtggatcaatcagccagtgagggtcaacgtcaagcgggagtatgaccacatgaatggatccaggcgccagctgcctcattaaagagcagccttttatgctgggcttcacctgtacccaccctgagcggcagccgtggagccccatggccgcacgcagggcttgcgctggctggaggaggcacggtgcttgggagctgcaagaatggagggaggactggcaggcgagcgggcgagggagtctccggtggactgcagcgttagcaaatgcagcaagctggtgggcggaggcgagtccaaccccatgaactacaacagctatatggacgagaagaatggcccccctcctcccaacatgaccaccaacgagaggagagtcatcgtccccgcagaccccacactgtggacacaggagcatgtgaggcaatggctggagtgggccataaaggagtacagcttgatggagatcgacacatcctttttccagaacatggatggcaaggaactgtgtaaaatgaacaaggaggacttcctccgcgccaccaccctctacaacacggaagtgctgttgtcacacctcagttacctcagggaaagttcactgctggcctataatacaacctcccacaccgaccaatcctcacgattgagtgtcaaagaagacccttcttatgactcagtcagaagaggagcttggggcaataacatgaattctggcctcaacaaaagtcctccccttggaggggcacaaacgatcagtaagaatacagagcaacggccccagccagatccgtatcagatcctgggcccgaccagcagtcgcctagccaaccctggaagcgggcagatccagctgtggcaattcctcctggagctgctctccgacagcgccaacgccagctgtatcacctgggaggggaccaacggggagttcaaaatgacggaccccgatgaggtggccaggcgctggggcgagcggaaaagcaagcccaacatgaattacgacaagctgagccgggccctccgttattactatgataaaaacattatgaccaaagtgcacggcaaaagatatgcttacaaatttgacttccacggcattgcccaggctctgcagccacatccgaccgagtcgtccatgtacaagtacccttctgacatctcctacatgccttcctaccatgcccaccagcagaaggtgaactttgtccctccccatccatcctccatgcctgtcacttcctccagcttctttggagccgcatcacaatactggacctcccccacggggggaatctaccccaaccccaacgtcccccgccatcctaacacccacgtgccttcacacttaggcagctactactagaagcttactcatcagtggccttctagctgaagcccatcctgcacacttactggatgctttggactcaacaggacatatgtggccttgaagggaagacaaaactggatgttctttcttgttggatagaacctttgtatttgttctttaaaaacattttttttaatgttggtaacttttgcttcctctacctgaacaaagagatgaataattccatgggccagtatgccagtttgaattctcagtctcctagcatcttgtgagttgcatattaagattactggaatggttaagtcatggttctgagaaagaagctgtacgttttctttatgtttttatgaccaaagcagtttcttgtcaatacacggggttcagtatgacacagaatcatggacttaacccgtcatgttctggtttgagatttagtgacaaatagaggtgggaagcttataatctaattttaggaggaccaaattcagtggatggcaactggaacattgattgtaaggccagtgaagttttcacccaactggaatttgatggaaagaaggtttgtgtgtttaagacgccaagggcattgcagaatccctctcagtggacagtatgcactcagctgaccactctctctagaaatagtcaagatatgaactaagaaattttaatgcaaatacatacattcctgaaagacggggaattaaattactaatttttttttttttttaaatgatgacagtggtcccagaacttggaaaagttgtagggatttctaaactcaagcagattcgcaagtgctgtgcgcttgtcagaccatcagaccagggccaaccaatcagaaggcaacttactgtataaattatgcagagttattttcctatatctcacagtattaaaaataaataattaaaaattaagaataaataaacgagttgacctcggtcacaaaagcagttttactatcgaatcaatcgctgttattttttttaatgtaatttgtacatcttttttcaatctgtacatttgggctgtctgtatgtttttatagctggtttttaaaaagcataatatgcctatagctgaaaaggaaacagggctgtttaagtcactgacttatgagaaagcaaagcactggtacagttatttaacaggcatacacaagcagggaaaagataatccatttagatctttaatgctttggaaatgcgtgtaacagtactgcaataatcacagctctgggaaaaacaacgaaactttcccttgtggagaggagggattttcctgctctatataagcaacatatttttagacattaaaatatatataattttgcaggtaattgttgacttttttaactatattaagtgttaagctgacaactgtcaaagaagaccatgttgtaaaataatttgactaaataaatggttccttctctcagtgctgaggacagttttcttatttaccgcccccgttaggtcaaagggttttccctggggaactttcctatttacttcttgcactatcaagaatttttcgaatgtacctactgcagtacagcagaaggtaaaaaatcagtgtggtttttcattgttgttgatgatgtttgtagtgtttttgtgtgtgttatttaaatcttcctccagcctaaaagggttttataaaacagcagctaaggccatggataaacctgtatgtaaggactggagcaaagcgagctggtctatccagactggtctgtgagatttaactctgcagcctcccctgggcacttcagacccagacggccaccttctgccactccagcaaagaataagcgccctgcttccttcaggtctcagaccaggactttatggctcatgcagatttttaaggtcatttttcttcccaaggaagaaacttgcctccagttccttcactgttaggtagcttattttcattttctctattttacaatgaaaagagtgagacctgggaagtccttgatttgcaaggaattagactcacagcattggtaaccctagaaccttcttagggtaacactaagtaccttctagacaacatgtctacctaaatgaaatgggatgtgtttcggaacatttgtctccagtttttttttaatcttgcaccctgccatttaaaaagatgtgtaaagcacatattctcaacatatgcacattgatttataaatcatatatacaaactgttacattattcttcatattagaaaacaaatacaaaatagaacattttaaatggtgatataaaaataaattgaaactgaaattct

SEQ ID NO: 7574 - DNA, 8079 bp, Homo sapiens
  source 1..8079: mol_type = unassigned DNA; mol_type = unassigned DNA
gcggccaggggcgggcggccgcagagcagcaccggccgtggctccggtagcagcaagttcgaaccccgctcccgctccgcttcggttctcgctccttcggcccttgggcctccaaacaccagtccccggcagctcgttgcgcattgcgctctccccgccaccaggatgccggtaaccgagaaggatctagctgaggacgcgccttggaagaagatccagcagaacacgttcacacgctggtgcaacgagcacctcaagtgcgtgaacaaacgcatcggcaacctgcagaccgacctgagcgacgggctgcggctcatcgcgctgctcgaggtgctcagccagaagcgcatgtaccgcaagtaccatcagcggcccacctttcgccagatgcagctcgagaatgtgtccgtggcgctcgagttcctggaccgtgagagcatcaagctcgtgtccatcgatagcaaagccattgtggatgggaacctgaagctcatcttgggtctggtgtggacgctgatcctccactactccatctccatgcccgtgtgggaggatgaaggggatgatgatgccaagaagcagacgccaaagcagaggctgctggggtggattcagaacaagatcccctacttgcccatcaccaactttaaccagaactggcaagacggcaaagccctgggagccctggtagacagctgtgctccaggtctgtgcccagactgggaatcctgggacccgcagaagcctgtggataatgcacgagaagccatgcagcaggcagatgactggctgggtgtcccacaggtcatcactcctgaagaaatcattcacccggatgtggacgagcactcagttatgacttacctgtcccagttccccaaagccaagctcaagccgggggctcctctcaaacccaaactcaacccgaagaaagccagggcctatggcagaggaatcgagcccactggaaacatggtgaagcagccagccaagttcactgtggacaccatcagcgccgggcaaggagacgtgatggtgtttgttgaggacccagaagggaacaaagaggaggcacaagtgacccctgacagtgacaagaacaagacatactctgtggagtatctgcccaaggtcaccgggctacacaaagtcacagtcctctttgcaggacagcacatctccaagagcccatttgaagtgagtgttgacaaggcccagggagatgccagtaaagtcactgcaaaaggtccagggttggaagctgtagggaacatcgccaataagcccacctactttgacatctatacggcaggagctggtgtgggtgacattggtgtggaggtggaagatccccaggggaagaacaccgtggagttgctcgtggaagacaaaggaaaccaggtgtatcgatgtgtgtacaaacccatgcagcctggccctcacgtggtcaagatcttctttgctggggacactattcctaagagtcccttcgttgtgcaggttggggaagcctgcaatccaaatgcctgccgggccagtggccgaggcctacaacccaaaggcgtccgtatccgggagaccacagatttcaaggttgacaccaaagctgcaggaagtggggagctcggtgtaaccatgaagggtcctaagggtctggaggagctggtgaagcagaaagactttctggatggggtctacgcattcgagtattaccccagcaccccggggagatacagcattgccatcacatgggggggacaccacattccaaagagcccctttgaagttcaagttggccctgaagcgggtatgcagaaagtccgtgcttggggccctgggctccatggtgggattgtcgggcggtcagcggacttcgtggtagaatccattggctctgaagtggggtctctggggtttgccattgaaggcccctctcaggcaaagattgagtacaacgaccagaatgatggatcgtgtgatgtcaaatactggcccaaggagcctggcgaatatgctgttcacatcatgtgtgacgacgaagacatcaaggacagcccgtacatggccttcatccacccagccacgggaggctacaaccctgatctggttcgagcatacgggccaggtttggagaaatctggatgcattgtcaacaacctggccgagttcactgtggatcctaaggatgctggaaaagctcccttaaagatatttgctcaggatggggaaggccaacgcattgacatccagatgaagaaccggatggacggcacatatgcatgctcatacaccccggtgaaggccatcaagcacaccattgctgtggtctggggaggcgtgaacatcccgcacagcccctacagggtcaacatcgggcaaggtagccatcctcagaaggtcaaagtgtttgggccaggtgtggagagaagtggtctgaaggcaaatgaacctacacacttcacggtggactgtactgaggctggggaaggtgatgtcagtgttggcattaagtgtgatgcccgggtgttaagtgaagatgaggaagacgtggattttgacattattcacaatgccaatgatacgttcacagtcaaatatgtgcctcctgctgctgggcgatacactatcaaagttctctttgcatctcaggaaatccccgccagccctttcagagtcaaagttgacccttcccacgatgccagcaaagtgaaggcagaaggcccagggctcagcaaagcaggtgtggaaaatgggaaaccgacccacttcactgtctacaccaagggggctgggaaagccccgctcaacgtgcagttcaacagccctcttcctggcgatgcagtgaaggatttggatatcatcgataattatgactactctcacacggttaaatatacacccacccaacagggcaacatgcaggttctggtgacttacggtggcgatcccatccctaaaagccctttcactgtgggtgttgctgcaccgctggatctgagcaagataaaactcaatgggctggaaaacagggtggaagttgggaaggatcaggagttcaccgttgataccaggggggcaggaggccaggggaagctggacgtgacaatcctcagcccctctcggaaggtcgtgccatgcctagtgacacctgtgacaggccgggagaacagcacggccaagttcatccctcgggaggaggggctgtatgctgtagacgtgacctacgatggacaccctgtgcccgggagcccctacacagtggaggcctcgctgccaccagatcccagcaaggtgaaggcccacggtcccggcctcgaaggtggtctcgtgggcaagcctgccgagttcaccatcgataccaaaggagctggtactggaggtctgggcttaacggtggaaggtccgtgcgaggccaaaatcgagtgctccgacaatggtgatgggacctgctccgtctcttaccttcccacaaaacccggggagtacttcgtcaacatcctctttgaagaagtccacatacctgggtctcccttcaaagctgacattgaaatgccctttgacccctctaaagtcgtggcatcggggccaggtctcgagcacgggaaggtgggtgaagctggcctccttagcgtcgactgctcggaagcgggaccgggggccctgggcctggaagctgtctcggactcgggaacaaaagccgaagtcagtattcagaacaacaaagatggcacctacgcggtgacctacgtgcccctgacggccggcatgtacacgttgaccatgaagtatggtggcgaactcgtgccacacttccccgcccgggtcaaggtggagcccgccgtggacaccagcaggatcaaagtctttggaccaggaatagaagggaaagatgtgttccgggaagctaccaccgactttacagttgactctcggccgctgacccaggttgggggtgaccacatcaaggcccacattgccaacccctcaggggcctccaccgagtgctttgtcacagacaatgcggatgggacctaccaggtggaatacacaccctttgagaaaggtctccatgtagtggaggtgacatatgatgacgtgcctatcccaaacagtcccttcaaggtggctgtcactgaaggctgccagccatctagggtgcaagcccaaggacctggattgaaagaggcctttaccaacaagcccaatgtcttcaccgtggttaccagaggcgcaggaattggtgggcttggcataactgttgagggaccatcagagtcgaagataaattgcagagacaacaaggatggcagctgcagtgctgagtacattcctttcgcaccgggggattacgatgttaatatcacatatggaggagcccacatccccggcagccccttcagggttcctgtgaaggatgttgtggaccccagcaaggtcaagattgccggccccgggctgggctcaggcgtccgagcccgtgtcctgcagtccttcacggtggacagcagcaaggctggcctggctccgctggaagtgagggttctgggcccacgagctgacgacacggattcccagtcatggcgcagccccttgaaagccctttcagagttctttaaaggtgacccgaagggtgactttaataagacaggcttggtggagccagtgaacgtggtggacaatggagatggcacacacacagtaacctacaccccatctcaggagggaccttacatggtctcagttaaatatgctgatgaagagattcctcgcagtcccttcaaggtcaaggtccttcccacatatgatgccagcaaagtgactgccagtggccccggccttagttcctatggtgtgcctgccagtctacctgtggactttgcaattgatgcccgagatgccggggaaggcctgcttgctgttcaaataacggaccaagaaggaaaacccaaaagagccattgtccatgacaataaagatggcacgtatgctgtcacctacatccccgacaagactgggcgctatatgattggagtcacctacgggggtgacgacatcccactttctccttatcgcatccgagccacacagacgggtgatgccagcaagtgcctggccacgggtcctggaatcgcctccactgtgaaaactggcgaagaagtaggctttgtggttgatgccaagactgccgggaagggtaaagtgacctgcacggttctgaccccagatggcactgaggccgaggccgatgtcattgagaatgaagatggaacctatgacatcttctacacagctgccaagccgggcacatatgtgatctatgtgcgcttcggtggtgttgatattcctaacagccccttcactgtcatggccacagatggggaagtcacagccgtggaggaggcaccggtaaatgcatgtccccctggattcaggccctgggtgaccgaagaggcctatgtcccagtgagtgacatgaacggcctgggatttaagccttttgacctggtcattccgtttgctgtcaggaaaggagaaatcactggagaggtccacatgccttctgggaagacagccacacctgagattgtggacaacaaggacggcacggtcactgttagatatgcccccactgaggtcgggctccatgagatgcacatcaaatacatgggcagccacatccctgagagcccactccagttctacgtgaactaccccaacagtggaagtgtttctgcatacggtccaggcctcgtgtatggagtggccaacaaaactgccaccttcaccatcgtcacagaggatgcaggagaaggtggtctggacttggctattgagggcccctcaaaagcagaaatcagctgcattgacaataaagatgggacatgcacagtgacctacctgccgactctgccaggcgactacagcattctggtcaagtacaatgacaagcacatccctggcagccccttcacagccaagatcacagatgacagcaggcggtgctcccaggtgaagttgggctcagccgctgacttcctgctcgacatcagtgagactgacctcagcagcctgacggccagcattaaggccccatctggccgagacgagccctgtctcctgaagaggctgcccaacaaccacattggcatctccttcatcccccgggaagtgggcgaacatctggtcagcatcaagaaaaatggcaaccatgtggccaacagccccgtgtctatcatggtggtccagtcggagattggtgacgcccgccgagccaaagtctatggccgcggcctgtcagaaggccggactttcgagatgtctgacttcatcgtggacacaagggatgcaggttatggtggcatatccttggcggtggaaggccccagcaaagtggacatccagacggaggacctggaagatggcacctgcaaagtctcctacttccctaccgtgcctggggtttatatcgtctccaccaaattcgctgacgagcacgtgcctgggagcccatttaccgtgaagatcagtggggagggaagagtcaaagagagcatcacccgcaccagtcgggccccgtccgtggccactgtcgggagcatttgtgacctgaacctgaaaatcccagaaatcaacagcagtgatatgtcggcccacgtcaccagcccctctggccgtgtgactgaggcagagattgtgcccatggggaagaactcacactgcgtccggtttgtgccccaggagatgggcgtgcacacggtcagcgtcaagtaccgtgggcagcacgtcaccggcagccccttccagttcaccgtggggccacttggtgaaggaggcgcccacaaggtgcgggcaggaggccctggcctggagagaggagaagcgggagtcccagctgagttcagcatttggacccgggaagcaggcgctggaggcctctccatcgctgttgagggccccagtaaggccgagattacattcgatgaccataaaaatgggtcgtgcggtgtatcttatattgcccaagagcctggtaactacgaggtgtccatcaagttcaatgatgagcacatcccggaaagcccctacctggtgccggtcatcgcaccctccgacgacgcccgccgcctcactgttatgagccttcaggaatcgggattaaaagttaaccagccagcatcctttgctataaggttgaatggcgcaaaaggcaagattgatgcaaaggtgcacagcccctctggagccgtggaggagtgccacgtgtctgagctggagccagataagtatgctgttcgcttcatccctcatgagaatggtgtccacaccatcgatgtcaagttcaatgggagccacgtggttggaagccccttcaaagtgcgcgttggggagcctggacaagcggggaaccctgccctggtgtccgcctatggcacgggactcgaagggggcaccacaggtatccagtcggaattctttattaacaccacccgagcaggtccagggacattatccgtcaccatcgaaggcccatccaaggttaaaatggattgccaggaaacacctgaagggtacaaagtcatgtacacccccatggctcctggtaactacctgatcagcgtcaaatacggtgggcccaaccacatcgtgggcagtcccttcaaggccaaggtgacaggccagcgtctagttagccctggctcagccaacgagacctcatccatcctggtggagtcagtgaccaggtcgtctacagagacctgctatagcgccattcccaaggcatcctcggacgccagcaaggtgacctctaagggggcagggctctcaaaggcctttgtgggccagaagagttccttcctggtggactgcagcaaagctggctccaacatgctgctgatcggggtccatgggcccaccaccccctgcgaggaggtctccatgaagcatgtaggcaaccagcaatacaacgtcacatacgtcgtcaaggagaggggcgattatgtgctggctgtgaagtggggggaggaacacatccctggcagcccttttcatgtcacagtgccttaaaacagttttctc

SEQ ID NO: 7575 - DNA, 9463 bp, Homo sapiens
  source 1..9463: mol_type = unassigned DNA; mol_type = unassigned DNA
gcggccaggggcgggcggccgcagagcagcaccggccgtggctccggtagcagcaagttcgaaccccgctcccgctccgcttcggttctcgctccttcggcccttgggcctccaaacaccagtccccggcagctcgttgcgcattgcgctctccccgccaccaggatgccggtaaccgagaaggatctagctgaggacgcgccttggaagaagatccagcagaacacgttcacacgctggtgcaacgagcacctcaagtgcgtgaacaaacgcatcggcaacctgcagaccgacctgagcgacgggctgcggctcatcgcgctgctcgaggtgctcagccagaagcgcatgtaccgcaagtaccatcagcggcccacctttcgccagatgcagctcgagaatgtgtccgtggcgctcgagttcctggaccgtgagagcatcaagctcgtgtccatcgatagcaaagccattgtggatgggaacctgaagctcatcttgggtctggtgtggacgctgatcctccactactccatctccatgcccgtgtgggaggatgaaggggatgatgatgccaagaagcagacgccaaagcagaggctgctggggtggattcagaacaagatcccctacttgcccatcaccaactttaaccagaactggcaagacggcaaagccctgggagccctggtagacagctgtgctccaggtctgtgcccagactgggaatcctgggacccgcagaagcctgtggataatgcacgagaagccatgcagcaggcagatgactggctgggtgtcccacaggtcatcactcctgaagaaatcattcacccggatgtggacgagcactcagttatgacttacctgtcccagttccccaaagccaagctcaagccgggggctcctctcaaacccaaactcaacccgaagaaagccagggcctatggcagaggaatcgagcccactggaaacatggtgaagcagccagccaagttcactgtggacaccatcagcgccgggcaaggagacgtgatggtgtttgttgaggacccagaagggaacaaagaggaggcacaagtgacccctgacagtgacaagaacaagacatactctgtggagtatctgcccaaggtcaccgggctacacaaagtcacagtcctctttgcaggacagcacatctccaagagcccatttgaagtgagtgttgacaaggcccagggagatgccagtaaagtcactgcaaaaggtccagggttggaagctgtagggaacatcgccaataagcccacctactttgacatctatacggcaggagctggtgtgggtgacattggtgtggaggtggaagatccccaggggaagaacaccgtggagttgctcgtggaagacaaaggaaaccaggtgtatcgatgtgtgtacaaacccatgcagcctggccctcacgtggtcaagatcttctttgctggggacactattcctaagagtcccttcgttgtgcaggttggggaagcctgcaatccaaatgcctgccgggccagtggccgaggcctacaacccaaaggcgtccgtatccgggagaccacagatttcaaggttgacaccaaagctgcaggaagtggggagctcggtgtaaccatgaagggtcctaagggtctggaggagctggtgaagcagaaagactttctggatggggtctacgcattcgagtattaccccagcaccccggggagatacagcattgccatcacatgggggggacaccacattccaaagagcccctttgaagttcaagttggccctgaagcgggtatgcagaaagtccgtgcttggggccctgggctccatggtgggattgtcgggcggtcagcggacttcgtggtagaatccattggctctgaagtggggtctctggggtttgccattgaaggcccctctcaggcaaagattgagtacaacgaccagaatgatggatcgtgtgatgtcaaatactggcccaaggagcctggcgaatatgctgttcacatcatgtgtgacgacgaagacatcaaggacagcccgtacatggccttcatccacccagccacgggaggctacaaccctgatctggttcgagcatacgggccaggtttggagaaatctggatgcattgtcaacaacctggccgagttcactgtggatcctaaggatgctggaaaagctcccttaaagatatttgctcaggatggggaaggccaacgcattgacatccagatgaagaaccggatggacggcacatatgcatgctcatacaccccggtgaaggccatcaagcacaccattgctgtggtctggggaggcgtgaacatcccgcacagcccctacagggtcaacatcgggcaaggtagccatcctcagaaggtcaaagtgtttgggccaggtgtggagagaagtggtctgaaggcaaatgaacctacacacttcacggtggactgtactgaggctggggaaggtgatgtcagtgttggcattaagtgtgatgcccgggtgttaagtgaagatgaggaagacgtggattttgacattattcacaatgccaatgatacgttcacagtcaaatatgtgcctcctgctgctgggcgatacactatcaaagttctctttgcatctcaggaaatccccgccagccctttcagagtcaaagttgacccttcccacgatgccagcaaagtgaaggcagaaggcccagggctcagcaaagcaggtgtggaaaatgggaaaccgacccacttcactgtctacaccaagggggctgggaaagccccgctcaacgtgcagttcaacagccctcttcctggcgatgcagtgaaggatttggatatcatcgataattatgactactctcacacggttaaatatacacccacccaacagggcaacatgcaggttctggtgacttacggtggcgatcccatccctaaaagccctttcactgtgggtgttgctgcaccgctggatctgagcaagataaaactcaatgggctggaaaacagggtggaagttgggaaggatcaggagttcaccgttgataccaggggggcaggaggccaggggaagctggacgtgacaatcctcagcccctctcggaaggtcgtgccatgcctagtgacacctgtgacaggccgggagaacagcacggccaagttcatccctcgggaggaggggctgtatgctgtagacgtgacctacgatggacaccctgtgcccgggagcccctacacagtggaggcctcgctgccaccagatcccagcaaggtgaaggcccacggtcccggcctcgaaggtggtctcgtgggcaagcctgccgagttcaccatcgataccaaaggagctggtactggaggtctgggcttaacggtggaaggtccgtgcgaggccaaaatcgagtgctccgacaatggtgatgggacctgctccgtctcttaccttcccacaaaacccggggagtacttcgtcaacatcctctttgaagaagtccacatacctgggtctcccttcaaagctgacattgaaatgccctttgacccctctaaagtcgtggcatcggggccaggtctcgagcacgggaaggtgggtgaagctggcctccttagcgtcgactgctcggaagcgggaccgggggccctgggcctggaagctgtctcggactcgggaacaaaagccgaagtcagtattcagaacaacaaagatggcacctacgcggtgacctacgtgcccctgacggccggcatgtacacgttgaccatgaagtatggtggcgaactcgtgccacacttccccgcccgggtcaaggtggagcccgccgtggacaccagcaggatcaaagtctttggaccaggaatagaagggaaagatgtgttccgggaagctaccaccgactttacagttgactctcggccgctgacccaggttgggggtgaccacatcaaggcccacattgccaacccctcaggggcctccaccgagtgctttgtcacagacaatgcggatgggacctaccaggtggaatacacaccctttgagaaaggtctccatgtagtggaggtgacatatgatgacgtgcctatcccaaacagtcccttcaaggtggctgtcactgaaggctgccagccatctagggtgcaagcccaaggacctggattgaaagaggcctttaccaacaagcccaatgtcttcaccgtggttaccagaggcgcaggaattggtgggcttggcataactgttgagggaccatcagagtcgaagataaattgcagagacaacaaggatggcagctgcagtgctgagtacattcctttcgcaccgggggattacgatgttaatatcacatatggaggagcccacatccccggcagccccttcagggttcctgtgaaggatgttgtggaccccagcaaggtcaagattgccggccccgggctgggctcaggcgtccgagcccgtgtcctgcagtccttcacggtggacagcagcaaggctggcctggctccgctggaagtgagggttctgggcccacgaggcttggtggagccagtgaacgtggtggacaatggagatggcacacacacagtaacctacaccccatctcaggagggaccttacatggtctcagttaaatatgctgatgaagagattcctcgcagtcccttcaaggtcaaggtccttcccacatatgatgccagcaaagtgactgccagtggccccggccttagttcctatggtgtgcctgccagtctacctgtggactttgcaattgatgcccgagatgccggggaaggcctgcttgctgttcaaataacggaccaagaaggaaaacccaaaagagccattgtccatgacaataaagatggcacgtatgctgtcacctacatccccgacaagactgggcgctatatgattggagtcacctacgggggtgacgacatcccactttctccttatcgcatccgagccacacagacgggtgatgccagcaagtgcctggccacgggtcctggaatcgcctccactgtgaaaactggcgaagaagtaggctttgtggttgatgccaagactgccgggaagggtaaagtgacctgcacggttctgaccccagatggcactgaggccgaggccgatgtcattgagaatgaagatggaacctatgacatcttctacacagctgccaagccgggcacatatgtgatctatgtgcgcttcggtggtgttgatattcctaacagccccttcactgtcatggccacagatggggaagtcacagccgtggaggaggcaccggtaaatgcatgtccccctggattcaggccctgggtgaccgaagaggcctatgtcccagtgagtgacatgaacggcctgggatttaagccttttgacctggtcattccgtttgctgtcaggaaaggagaaatcactggagaggtccacatgccttctgggaagacagccacacctgagattgtggacaacaaggacggcacggtcactgttagatatgcccccactgaggtcgggctccatgagatgcacatcaaatacatgggcagccacatccctgagagcccactccagttctacgtgaactaccccaacagtggaagtgtttctgcatacggtccaggcctcgtgtatggagtggccaacaaaactgccaccttcaccatcgtcacagaggatgcaggagaaggtggtctggacttggctattgagggcccctcaaaagcagaaatcagctgcattgacaataaagatgggacatgcacagtgacctacctgccgactctgccaggcgactacagcattctggtcaagtacaatgacaagcacatccctggcagccccttcacagccaagatcacagatgacagcaggcggtgctcccaggtgaagttgggctcagccgctgacttcctgctcgacatcagtgagactgacctcagcagcctgacggccagcattaaggccccatctggccgagacgagccctgtctcctgaagaggctgcccaacaaccacattggcatctccttcatcccccgggaagtgggcgaacatctggtcagcatcaagaaaaatggcaaccatgtggccaacagccccgtgtctatcatggtggtccagtcggagattggtgacgcccgccgagccaaagtctatggccgcggcctgtcagaaggccggactttcgagatgtctgacttcatcgtggacacaagggatgcaggttatggtggcatatccttggcggtggaaggccccagcaaagtggacatccagacggaggacctggaagatggcacctgcaaagtctcctacttccctaccgtgcctggggtttatatcgtctccaccaaattcgctgacgagcacgtgcctgggagcccatttaccgtgaagatcagtggggagggaagagtcaaagagagcatcacccgcaccagtcgggccccgtccgtggccactgtcgggagcatttgtgacctgaacctgaaaatcccagaaatcaacagcagtgatatgtcggcccacgtcaccagcccctctggccgtgtgactgaggcagagattgtgcccatggggaagaactcacactgcgtccggtttgtgccccaggagatgggcgtgcacacggtcagcgtcaagtaccgtgggcagcacgtcaccggcagccccttccagttcaccgtggggccacttggtgaaggaggcgcccacaaggtgcgggcaggaggccctggcctggagagaggagaagcgggagtcccagctgagttcagcatttggacccgggaagcaggcgctggaggcctctccatcgctgttgagggccccagtaaggccgagattacattcgatgaccataaaaatgggtcgtgcggtgtatcttatattgcccaagagcctggtaactacgaggtgtccatcaagttcaatgatgagcacatcccggaaagcccctacctggtgccggtcatcgcaccctccgacgacgcccgccgcctcactgttatgagccttcaggaatcgggattaaaagttaaccagccagcatcctttgctataaggttgaatggcgcaaaaggcaagattgatgcaaaggtgcacagcccctctggagccgtggaggagtgccacgtgtctgagctggagccagataagtatgctgttcgcttcatccctcatgagaatggtgtccacaccatcgatgtcaagttcaatgggagccacgtggttggaagccccttcaaagtgcgcgttggggagcctggacaagcggggaaccctgccctggtgtccgcctatggcacgggactcgaagggggcaccacaggtatccagtcggaattctttattaacaccacccgagcaggtccagggacattatccgtcaccatcgaaggcccatccaaggttaaaatggattgccaggaaacacctgaagggtacaaagtcatgtacacccccatggctcctggtaactacctgatcagcgtcaaatacggtgggcccaaccacatcgtgggcagtcccttcaaggccaaggtgacaggccagcgtctagttagccctggctcagccaacgagacctcatccatcctggtggagtcagtgaccaggtcgtctacagagacctgctatagcgccattcccaaggcatcctcggacgccagcaaggtgacctctaagggggcagggctctcaaaggcctttgtgggccagaagagttccttcctggtggactgcagcaaagctggctccaacatgctgctgatcggggtccatgggcccaccaccccctgcgaggaggtctccatgaagcatgtaggcaaccagcaatacaacgtcacatacgtcgtcaaggagaggggcgattatgtgctggctgtgaagtggggggaggaacacatccctggcagcccttttcatgtcacagtgccttaaaacagttttctcaaatcctggagagagttcttgtggttgcttttgttgcttgtttgtaattcattttatacaaagccctccagcctgtttgtggggctgaaaccccatccctaaaatattgctgttgtaaaatgccttcagaaataagtcctagactggactcttgagggacatattggagaatcttaagaaatgcaagcttgttcagggggctgagaagatcctgagtacactaggtgcaaaccagaactcttggtggaacagaccagccactgcagcagacagaccaggaacacaatgagactgacatttcaaaaaaacaaaactggctagcctgagctgctggttcactcttcagcatttatgaaacaaggctaggggaagatgggcagagaaaaaggggacacctagtttggttgtcatttggcaaaggagatgacttaaaatccgcttaatctcttccagtgtccgtgttaatgtatttggctattagatcactagcactgctttaccgctcctcatcgccaacacccccatgctctgtggccttcttacacttctcagagggcagagtggcagccgggcaccctacagaaactcagagggcagagtggcagccaggcccacatgtctctcaagtacctgtcccctcgctctggtgattatttcttgcagaatcaccacacgagaccatcccggcagtcatggttttgctttagttttccaagtccgtttcagtcccttccttggtctgaagaaattctgcagtggcgagcagtttcccacttgccaaagatcccttttaaccaacactagcccttgtttttaacacacgctccagcccttcatcagcctgggcagtcttaccaaaatgtttaaagtgatctcagaggggcccatggattaacgccctcatcccaaggtccgtcccatgacataacactccacacccgccccagccaacttcatgggtcactttttctggaaaataatgatctgtacagacaggacagaatgaaactcctgcgggtctttggcctgaaagttgggaatggttgggggagagaagggcagcagcttattggtggtcttttcaccattggcagaaacagtgagagctgtgtggtgcagaaatccagaaatgaggtgtagggaattttgcctgccttcctgcagacctgagctggctttggaatgaggttaaagtgtcagggacgttgcctgagcccaaatgtgtagtgtggtctgggcaggcagacctttaggttttgctgcttagtcctgaggaagtggccactcttgtggcaggtgtagtatctggggcgagtgttgggggtaaaagcccaccctacagaaagtggaacagcccggagcctgatgtgaaaggaccacgggtgttgtaagctgggacacggaagccaaactggaatcaaacgccgactgtaaattgtatcttataacttattaaataaaacatttgctccgtaaa

SEQ ID NO: 7576 - DNA, 9391 bp, Homo sapiens
  source 1..9391: mol_type = unassigned DNA; mol_type = unassigned DNA
gcggccaggggcgggcggccgcagagcagcaccggccgtggctccggtagcagcaagttcgaaccccgctcccgctccgcttcggttctcgctccttcggcccttgggcctccaaacaccagtccccggcagctcgttgcgcattgcgctctccccgccaccaggatgccggtaaccgagaaggatctagctgaggacgcgccttggaagaagatccagcagaacacgttcacacgctggtgcaacgagcacctcaagtgcgtgaacaaacgcatcggcaacctgcagaccgacctgagcgacgggctgcggctcatcgcgctgctcgaggtgctcagccagaagcgcatgtaccgcaagtaccatcagcggcccacctttcgccagatgcagctcgagaatgtgtccgtggcgctcgagttcctggaccgtgagagcatcaagctcgtgtccatcgatagcaaagccattgtggatgggaacctgaagctcatcttgggtctggtgtggacgctgatcctccactactccatctccatgcccgtgtgggaggatgaaggggatgatgatgccaagaagcagacgccaaagcagaggctgctggggtggattcagaacaagatcccctacttgcccatcaccaactttaaccagaactggcaagacggcaaagccctgggagccctggtagacagctgtgctccaggtctgtgcccagactgggaatcctgggacccgcagaagcctgtggataatgcacgagaagccatgcagcaggcagatgactggctgggtgtcccacaggtcatcactcctgaagaaatcattcacccggatgtggacgagcactcagttatgacttacctgtcccagttccccaaagccaagctcaagccgggggctcctctcaaacccaaactcaacccgaagaaagccagggcctatggcagaggaatcgagcccactggaaacatggtgaagcagccagccaagttcactgtggacaccatcagcgccgggcaaggagacgtgatggtgtttgttgaggacccagaagggaacaaagaggaggcacaagtgacccctgacagtgacaagaacaagacatactctgtggagtatctgcccaaggtcaccgggctacacaaagtcacagtcctctttgcaggacagcacatctccaagagcccatttgaagtgagtgttgacaaggcccagggagatgccagtaaagtcactgcaaaaggtccagggttggaagctgtagggaacatcgccaataagcccacctactttgacatctatacggcaggagctggtgtgggtgacattggtgtggaggtggaagatccccaggggaagaacaccgtggagttgctcgtggaagacaaaggaaaccaggtgtatcgatgtgtgtacaaacccatgcagcctggccctcacgtggtcaagatcttctttgctggggacactattcctaagagtcccttcgttgtgcaggttggggaagcctgcaatccaaatgcctgccgggccagtggccgaggcctacaacccaaaggcgtccgtatccgggagaccacagatttcaaggttgacaccaaagctgcaggaagtggggagctcggtgtaaccatgaagggtcctaagggtctggaggagctggtgaagcagaaagactttctggatggggtctacgcattcgagtattaccccagcaccccggggagatacagcattgccatcacatgggggggacaccacattccaaagagcccctttgaagttcaagttggccctgaagcgggtatgcagaaagtccgtgcttggggccctgggctccatggtgggattgtcgggcggtcagcggacttcgtggtagaatccattggctctgaagtggggtctctggggtttgccattgaaggcccctctcaggcaaagattgagtacaacgaccagaatgatggatcgtgtgatgtcaaatactggcccaaggagcctggcgaatatgctgttcacatcatgtgtgacgacgaagacatcaaggacagcccgtacatggccttcatccacccagccacgggaggctacaaccctgatctggttcgagcatacgggccaggtttggagaaatctggatgcattgtcaacaacctggccgagttcactgtggatcctaaggatgctggaaaagctcccttaaagatatttgctcaggatggggaaggccaacgcattgacatccagatgaagaaccggatggacggcacatatgcatgctcatacaccccggtgaaggccatcaagcacaccattgctgtggtctggggaggcgtgaacatcccgcacagcccctacagggtcaacatcgggcaaggtagccatcctcagaaggtcaaagtgtttgggccaggtgtggagagaagtggtctgaaggcaaatgaacctacacacttcacggtggactgtactgaggctggggaaggtgatgtcagtgttggcattaagtgtgatgcccgggtgttaagtgaagatgaggaagacgtggattttgacattattcacaatgccaatgatacgttcacagtcaaatatgtgcctcctgctgctgggcgatacactatcaaagttctctttgcatctcaggaaatccccgccagccctttcagagtcaaagttgacccttcccacgatgccagcaaagtgaaggcagaaggcccagggctcagcaaagcaggtgtggaaaatgggaaaccgacccacttcactgtctacaccaagggggctgggaaagccccgctcaacgtgcagttcaacagccctcttcctggcgatgcagtgaaggatttggatatcatcgataattatgactactctcacacggttaaatatacacccacccaacagggcaacatgcaggttctggtgacttacggtggcgatcccatccctaaaagccctttcactgtgggtgttgctgcaccgctggatctgagcaagataaaactcaatgggctggaaaacagggtggaagttgggaaggatcaggagttcaccgttgataccaggggggcaggaggccaggggaagctggacgtgacaatcctcagcccctctcggaaggtcgtgccatgcctagtgacacctgtgacaggccgggagaacagcacggccaagttcatccctcgggaggaggggctgtatgctgtagacgtgacctacgatggacaccctgtgcccgggagcccctacacagtggaggcctcgctgccaccagatcccagcaaggtgaaggcccacggtcccggcctcgaaggtggtctcgtgggcaagcctgccgagttcaccatcgataccaaaggagctggtactggaggtctgggcttaacggtggaaggtccgtgcgaggccaaaatcgagtgctccgacaatggtgatgggacctgctccgtctcttaccttcccacaaaacccggggagtacttcgtcaacatcctctttgaagaagtccacatacctgggtctcccttcaaagctgacattgaaatgccctttgacccctctaaagtcgtggcatcggggccaggtctcgagcacgggaaggtgggtgaagctggcctccttagcgtcgactgctcggaagcgggaccgggggccctgggcctggaagctgtctcggactcgggaacaaaagccgaagtcagtattcagaacaacaaagatggcacctacgcggtgacctacgtgcccctgacggccggcatgtacacgttgaccatgaagtatggtggcgaactcgtgccacacttccccgcccgggtcaaggtggagcccgccgtggacaccagcaggatcaaagtctttggaccaggaatagaagggaaagatgtgttccgggaagctaccaccgactttacagttgactctcggccgctgacccaggttgggggtgaccacatcaaggcccacattgccaacccctcaggggcctccaccgagtgctttgtcacagacaatgcggatgggacctaccaggtggaatacacaccctttgagaaaggtctccatgtagtggaggtgacatatgatgacgtgcctatcccaaacagtcccttcaaggtggctgtcactgaaggctgccagccatctagggtgcaagcccaaggacctggattgaaagaggcctttaccaacaagcccaatgtcttcaccgtggttaccagaggcgcaggaattggtgggcttggcataactgttgagggaccatcagagtcgaagataaattgcagagacaacaaggatggcagctgcagtgctgagtacattcctttcgcaccgggggattacgatgttaatatcacatatggaggagcccacatccccggcagccccttcagggttcctgtgaaggatgttgtggaccccagcaaggtcaagattgccggccccgggctgggctcaggcgtccgagcccgtgtcctgcagtccttcacggtggacagcagcaaggctggcctggctccgctggaagtgagggttctgggcccacgaggcttggtggagccagtgaacgtggtggacaatggagatggcacacacacagtaacctacaccccatctcaggagggaccttacatggtctcagttaaatatgctgatgaagagattcctcgcagtcccttcaaggtcaaggtccttcccacatatgatgccagcaaagtgactgccagtggccccggccttagttcctatggtgtgcctgccagtctacctgtggactttgcaattgatgcccgagatgccggggaaggcctgcttgctgttcaaataacggaccaagaaggaaaacccaaaagagccattgtccatgacaataaagatggcacgtatgctgtcacctacatccccgacaagactgggcgctatatgattggagtcacctacgggggtgacgacatcccactttctccttatcgcatccgagccacacagacgggtgatgccagcaagtgcctggccacgggtcctggaatcgcctccactgtgaaaactggcgaagaagtaggctttgtggttgatgccaagactgccgggaagggtaaagtgacctgcacggttctgaccccagatggcactgaggccgaggccgatgtcattgagaatgaagatggaacctatgacatcttctacacagctgccaagccgggcacatatgtgatctatgtgcgcttcggtggtgttgatattcctaacagccccttcactgtcatggtgaccgaagaggcctatgtcccagtgagtgacatgaacggcctgggatttaagccttttgacctggtcattccgtttgctgtcaggaaaggagaaatcactggagaggtccacatgccttctgggaagacagccacacctgagattgtggacaacaaggacggcacggtcactgttagatatgcccccactgaggtcgggctccatgagatgcacatcaaatacatgggcagccacatccctgagagcccactccagttctacgtgaactaccccaacagtggaagtgtttctgcatacggtccaggcctcgtgtatggagtggccaacaaaactgccaccttcaccatcgtcacagaggatgcaggagaaggtggtctggacttggctattgagggcccctcaaaagcagaaatcagctgcattgacaataaagatgggacatgcacagtgacctacctgccgactctgccaggcgactacagcattctggtcaagtacaatgacaagcacatccctggcagccccttcacagccaagatcacagatgacagcaggcggtgctcccaggtgaagttgggctcagccgctgacttcctgctcgacatcagtgagactgacctcagcagcctgacggccagcattaaggccccatctggccgagacgagccctgtctcctgaagaggctgcccaacaaccacattggcatctccttcatcccccgggaagtgggcgaacatctggtcagcatcaagaaaaatggcaaccatgtggccaacagccccgtgtctatcatggtggtccagtcggagattggtgacgcccgccgagccaaagtctatggccgcggcctgtcagaaggccggactttcgagatgtctgacttcatcgtggacacaagggatgcaggttatggtggcatatccttggcggtggaaggccccagcaaagtggacatccagacggaggacctggaagatggcacctgcaaagtctcctacttccctaccgtgcctggggtttatatcgtctccaccaaattcgctgacgagcacgtgcctgggagcccatttaccgtgaagatcagtggggagggaagagtcaaagagagcatcacccgcaccagtcgggccccgtccgtggccactgtcgggagcatttgtgacctgaacctgaaaatcccagaaatcaacagcagtgatatgtcggcccacgtcaccagcccctctggccgtgtgactgaggcagagattgtgcccatggggaagaactcacactgcgtccggtttgtgccccaggagatgggcgtgcacacggtcagcgtcaagtaccgtgggcagcacgtcaccggcagccccttccagttcaccgtggggccacttggtgaaggaggcgcccacaaggtgcgggcaggaggccctggcctggagagaggagaagcgggagtcccagctgagttcagcatttggacccgggaagcaggcgctggaggcctctccatcgctgttgagggccccagtaaggccgagattacattcgatgaccataaaaatgggtcgtgcggtgtatcttatattgcccaagagcctggtaactacgaggtgtccatcaagttcaatgatgagcacatcccggaaagcccctacctggtgccggtcatcgcaccctccgacgacgcccgccgcctcactgttatgagccttcaggaatcgggattaaaagttaaccagccagcatcctttgctataaggttgaatggcgcaaaaggcaagattgatgcaaaggtgcacagcccctctggagccgtggaggagtgccacgtgtctgagctggagccagataagtatgctgttcgcttcatccctcatgagaatggtgtccacaccatcgatgtcaagttcaatgggagccacgtggttggaagccccttcaaagtgcgcgttggggagcctggacaagcggggaaccctgccctggtgtccgcctatggcacgggactcgaagggggcaccacaggtatccagtcggaattctttattaacaccacccgagcaggtccagggacattatccgtcaccatcgaaggcccatccaaggttaaaatggattgccaggaaacacctgaagggtacaaagtcatgtacacccccatggctcctggtaactacctgatcagcgtcaaatacggtgggcccaaccacatcgtgggcagtcccttcaaggccaaggtgacaggccagcgtctagttagccctggctcagccaacgagacctcatccatcctggtggagtcagtgaccaggtcgtctacagagacctgctatagcgccattcccaaggcatcctcggacgccagcaaggtgacctctaagggggcagggctctcaaaggcctttgtgggccagaagagttccttcctggtggactgcagcaaagctggctccaacatgctgctgatcggggtccatgggcccaccaccccctgcgaggaggtctccatgaagcatgtaggcaaccagcaatacaacgtcacatacgtcgtcaaggagaggggcgattatgtgctggctgtgaagtggggggaggaacacatccctggcagcccttttcatgtcacagtgccttaaaacagttttctcaaatcctggagagagttcttgtggttgcttttgttgcttgtttgtaattcattttatacaaagccctccagcctgtttgtggggctgaaaccccatccctaaaatattgctgttgtaaaatgccttcagaaataagtcctagactggactcttgagggacatattggagaatcttaagaaatgcaagcttgttcagggggctgagaagatcctgagtacactaggtgcaaaccagaactcttggtggaacagaccagccactgcagcagacagaccaggaacacaatgagactgacatttcaaaaaaacaaaactggctagcctgagctgctggttcactcttcagcatttatgaaacaaggctaggggaagatgggcagagaaaaaggggacacctagtttggttgtcatttggcaaaggagatgacttaaaatccgcttaatctcttccagtgtccgtgttaatgtatttggctattagatcactagcactgctttaccgctcctcatcgccaacacccccatgctctgtggccttcttacacttctcagagggcagagtggcagccgggcaccctacagaaactcagagggcagagtggcagccaggcccacatgtctctcaagtacctgtcccctcgctctggtgattatttcttgcagaatcaccacacgagaccatcccggcagtcatggttttgctttagttttccaagtccgtttcagtcccttccttggtctgaagaaattctgcagtggcgagcagtttcccacttgccaaagatcccttttaaccaacactagcccttgtttttaacacacgctccagcccttcatcagcctgggcagtcttaccaaaatgtttaaagtgatctcagaggggcccatggattaacgccctcatcccaaggtccgtcccatgacataacactccacacccgccccagccaacttcatgggtcactttttctggaaaataatgatctgtacagacaggacagaatgaaactcctgcgggtctttggcctgaaagttgggaatggttgggggagagaagggcagcagcttattggtggtcttttcaccattggcagaaacagtgagagctgtgtggtgcagaaatccagaaatgaggtgtagggaattttgcctgccttcctgcagacctgagctggctttggaatgaggttaaagtgtcagggacgttgcctgagcccaaatgtgtagtgtggtctgggcaggcagacctttaggttttgctgcttagtcctgaggaagtggccactcttgtggcaggtgtagtatctggggcgagtgttgggggtaaaagcccaccctacagaaagtggaacagcccggagcctgatgtgaaaggaccacgggtgttgtaagctgggacacggaagccaaactggaatcaaacgccgactgtaaattgtatcttataacttattaaataaaacatttgctccgtaaa

SEQ ID NO: 7577 - DNA, 9430 bp, Homo sapiens
  source 1..9430: mol_type = unassigned DNA; mol_type = unassigned DNA
gcggccaggggcgggcggccgcagagcagcaccggccgtggctccggtagcagcaagttcgaaccccgctcccgctccgcttcggttctcgctccttcggcccttgggcctccaaacaccagtccccggcagctcgttgcgcattgcgctctccccgccaccaggatgccggtaaccgagaaggatctagctgaggacgcgccttggaagaagatccagcagaacacgttcacacgctggtgcaacgagcacctcaagtgcgtgaacaaacgcatcggcaacctgcagaccgacctgagcgacgggctgcggctcatcgcgctgctcgaggtgctcagccagaagcgcatgtaccgcaagtaccatcagcggcccacctttcgccagatgcagctcgagaatgtgtccgtggcgctcgagttcctggaccgtgagagcatcaagctcgtgtccatcgatagcaaagccattgtggatgggaacctgaagctcatcttgggtctggtgtggacgctgatcctccactactccatctccatgcccgtgtgggaggatgaaggggatgatgatgccaagaagcagacgccaaagcagaggctgctggggtggattcagaacaagatcccctacttgcccatcaccaactttaaccagaactggcaagacggcaaagccctgggagccctggtagacagctgtgctccaggtctgtgcccagactgggaatcctgggacccgcagaagcctgtggataatgcacgagaagccatgcagcaggcagatgactggctgggtgtcccacaggtcatcactcctgaagaaatcattcacccggatgtggacgagcactcagttatgacttacctgtcccagttccccaaagccaagctcaagccgggggctcctctcaaacccaaactcaacccgaagaaagccagggcctatggcagaggaatcgagcccactggaaacatggtgaagcagccagccaagttcactgtggacaccatcagcgccgggcaaggagacgtgatggtgtttgttgaggacccagaagggaacaaagaggaggcacaagtgacccctgacagtgacaagaacaagacatactctgtggagtatctgcccaaggtcaccgggctacacaaagtcacagtcctctttgcaggacagcacatctccaagagcccatttgaagtgagtgttgacaaggcccagggagatgccagtaaagtcactgcaaaaggtccagggttggaagctgtagggaacatcgccaataagcccacctactttgacatctatacggcaggagctggtgtgggtgacattggtgtggaggtggaagatccccaggggaagaacaccgtggagttgctcgtggaagacaaaggaaaccaggtgtatcgatgtgtgtacaaacccatgcagcctggccctcacgtggtcaagatcttctttgctggggacactattcctaagagtcccttcgttgtgcaggttggggaagcctgcaatccaaatgcctgccgggccagtggccgaggcctacaacccaaaggcgtccgtatccgggagaccacagatttcaaggttgacaccaaagctgcaggaagtggggagctcggtgtaaccatgaagggtcctaagggtctggaggagctggtgaagcagaaagactttctggatggggtctacgcattcgagtattaccccagcaccccggggagatacagcattgccatcacatgggggggacaccacattccaaagagcccctttgaagttcaagttggccctgaagcgggtatgcagaaagtccgtgcttggggccctgggctccatggtgggattgtcgggcggtcagcggacttcgtggtagaatccattggctctgaagtggggtctctggggtttgccattgaaggcccctctcaggcaaagattgagtacaacgaccagaatgatggatcgtgtgatgtcaaatactggcccaaggagcctggcgaatatgctgttcacatcatgtgtgacgacgaagacatcaaggacagcccgtacatggccttcatccacccagccacgggaggctacaaccctgatctggttcgagcatacgggccaggtttggagaaatctggatgcattgtcaacaacctggccgagttcactgtggatcctaaggatgctggaaaagctcccttaaagatatttgctcaggatggggaaggccaacgcattgacatccagatgaagaaccggatggacggcacatatgcatgctcatacaccccggtgaaggccatcaagcacaccattgctgtggtctggggaggcgtgaacatcccgcacagcccctacagggtcaacatcgggcaaggtagccatcctcagaaggtcaaagtgtttgggccaggtgtggagagaagtggtctgaaggcaaatgaacctacacacttcacggtggactgtactgaggctggggaaggtgatgtcagtgttggcattaagtgtgatgcccgggtgttaagtgaagatgaggaagacgtggattttgacattattcacaatgccaatgatacgttcacagtcaaatatgtgcctcctgctgctgggcgatacactatcaaagttctctttgcatctcaggaaatccccgccagccctttcagagtcaaagttgacccttcccacgatgccagcaaagtgaaggcagaaggcccagggctcagcaaagcaggtgtggaaaatgggaaaccgacccacttcactgtctacaccaagggggctgggaaagccccgctcaacgtgcagttcaacagccctcttcctggcgatgcagtgaaggatttggatatcatcgataattatgactactctcacacggttaaatatacacccacccaacagggcaacatgcaggttctggtgacttacggtggcgatcccatccctaaaagccctttcactgtgggtgttgctgcaccgctggatctgagcaagataaaactcaatgggctggaaaacagggtggaagttgggaaggatcaggagttcaccgttgataccaggggggcaggaggccaggggaagctggacgtgacaatcctcagcccctctcggaaggtcgtgccatgcctagtgacacctgtgacaggccgggagaacagcacggccaagttcatccctcgggaggaggggctgtatgctgtagacgtgacctacgatggacaccctgtgcccgggagcccctacacagtggaggcctcgctgccaccagatcccagcaaggtgaaggcccacggtcccggcctcgaaggtggtctcgtgggcaagcctgccgagttcaccatcgataccaaaggagctggtactggaggtctgggcttaacggtggaaggtccgtgcgaggccaaaatcgagtgctccgacaatggtgatgggacctgctccgtctcttaccttcccacaaaacccggggagtacttcgtcaacatcctctttgaagaagtccacatacctgggtctcccttcaaagctgacattgaaatgccctttgacccctctaaagtcgtggcatcggggccaggtctcgagcacgggaaggtgggtgaagctggcctccttagcgtcgactgctcggaagcgggaccgggggccctgggcctggaagctgtctcggactcgggaacaaaagccgaagtcagtattcagaacaacaaagatggcacctacgcggtgacctacgtgcccctgacggccggcatgtacacgttgaccatgaagtatggtggcgaactcgtgccacacttccccgcccgggtcaaggtggagcccgccgtggacaccagcaggatcaaagtctttggaccaggaatagaagggaaagatgtgttccgggaagctaccaccgactttacagttgactctcggccgctgacccaggttgggggtgaccacatcaaggcccacattgccaacccctcaggggcctccaccgagtgctttgtcacagacaatgcggatgggacctaccaggtggaatacacaccctttgagaaaggtctccatgtagtggaggtgacatatgatgacgtgcctatcccaaacagtcccttcaaggtggctgtcactgaaggctgccagccatctagggtgcaagcccaaggacctggattgaaagaggcctttaccaacaagcccaatgtcttcaccgtggttaccagaggcgcaggaattggtgggcttggcataactgttgagggaccatcagagtcgaagataaattgcagagacaacaaggatggcagctgcagtgctgagtacattcctttcgcaccgggggattacgatgttaatatcacatatggaggagcccacatccccggcagccccttcagggttcctgtgaaggatgttgtggaccccagcaaggtcaagattgccggccccgggctgggctcaggcgtccgagcccgtgtcctgcagtccttcacggtggacagcagcaaggctggcctggctccgctggaagtgagggttctgggcccacgaggcttggtggagccagtgaacgtggtggacaatggagatggcacacacacagtaacctacaccccatctcaggagggaccttacatggtctcagttaaatatgctgatgaagagattcctcgcagtcccttcaaggtcaaggtccttcccacatatgatgccagcaaagtgactgccagtggccccggccttagttcctatggtgtgcctgccagtctacctgtggactttgcaattgatgcccgagatgccggggaaggcctgcttgctgttcaaataacggaccaagaaggaaaacccaaaagagccattgtccatgacaataaagatggcacgtatgctgtcacctacatccccgacaagactgggcgctatatgattggagtcacctacgggggtgacgacatcccactttctccttatcgcatccgagccacacagacgggtgatgccagcaagtgcctggccacgggtcctggaatcgcctccactgtgaaaactggcgaagaagtaggctttgtggttgatgccaagactgccgggaagggtaaagtgacctgcacggttctgaccccagatggcactgaggccgaggccgatgtcattgagaatgaagatggaacctatgacatcttctacacagctgccaagccgggcacatatgtgatctatgtgcgcttcggtggtgttgatattcctaacagccccttcactgtcatggccacagatggggaagtcacagccgtggaggaggcaccggtgaccgaagaggcctatgtcccagtgagtgacatgaacggcctgggatttaagccttttgacctggtcattccgtttgctgtcaggaaaggagaaatcactggagaggtccacatgccttctgggaagacagccacacctgagattgtggacaacaaggacggcacggtcactgttagatatgcccccactgaggtcgggctccatgagatgcacatcaaatacatgggcagccacatccctgagagcccactccagttctacgtgaactaccccaacagtggaagtgtttctgcatacggtccaggcctcgtgtatggagtggccaacaaaactgccaccttcaccatcgtcacagaggatgcaggagaaggtggtctggacttggctattgagggcccctcaaaagcagaaatcagctgcattgacaataaagatgggacatgcacagtgacctacctgccgactctgccaggcgactacagcattctggtcaagtacaatgacaagcacatccctggcagccccttcacagccaagatcacagatgacagcaggcggtgctcccaggtgaagttgggctcagccgctgacttcctgctcgacatcagtgagactgacctcagcagcctgacggccagcattaaggccccatctggccgagacgagccctgtctcctgaagaggctgcccaacaaccacattggcatctccttcatcccccgggaagtgggcgaacatctggtcagcatcaagaaaaatggcaaccatgtggccaacagccccgtgtctatcatggtggtccagtcggagattggtgacgcccgccgagccaaagtctatggccgcggcctgtcagaaggccggactttcgagatgtctgacttcatcgtggacacaagggatgcaggttatggtggcatatccttggcggtggaaggccccagcaaagtggacatccagacggaggacctggaagatggcacctgcaaagtctcctacttccctaccgtgcctggggtttatatcgtctccaccaaattcgctgacgagcacgtgcctgggagcccatttaccgtgaagatcagtggggagggaagagtcaaagagagcatcacccgcaccagtcgggccccgtccgtggccactgtcgggagcatttgtgacctgaacctgaaaatcccagaaatcaacagcagtgatatgtcggcccacgtcaccagcccctctggccgtgtgactgaggcagagattgtgcccatggggaagaactcacactgcgtccggtttgtgccccaggagatgggcgtgcacacggtcagcgtcaagtaccgtgggcagcacgtcaccggcagccccttccagttcaccgtggggccacttggtgaaggaggcgcccacaaggtgcgggcaggaggccctggcctggagagaggagaagcgggagtcccagctgagttcagcatttggacccgggaagcaggcgctggaggcctctccatcgctgttgagggccccagtaaggccgagattacattcgatgaccataaaaatgggtcgtgcggtgtatcttatattgcccaagagcctggtaactacgaggtgtccatcaagttcaatgatgagcacatcccggaaagcccctacctggtgccggtcatcgcaccctccgacgacgcccgccgcctcactgttatgagccttcaggaatcgggattaaaagttaaccagccagcatcctttgctataaggttgaatggcgcaaaaggcaagattgatgcaaaggtgcacagcccctctggagccgtggaggagtgccacgtgtctgagctggagccagataagtatgctgttcgcttcatccctcatgagaatggtgtccacaccatcgatgtcaagttcaatgggagccacgtggttggaagccccttcaaagtgcgcgttggggagcctggacaagcggggaaccctgccctggtgtccgcctatggcacgggactcgaagggggcaccacaggtatccagtcggaattctttattaacaccacccgagcaggtccagggacattatccgtcaccatcgaaggcccatccaaggttaaaatggattgccaggaaacacctgaagggtacaaagtcatgtacacccccatggctcctggtaactacctgatcagcgtcaaatacggtgggcccaaccacatcgtgggcagtcccttcaaggccaaggtgacaggccagcgtctagttagccctggctcagccaacgagacctcatccatcctggtggagtcagtgaccaggtcgtctacagagacctgctatagcgccattcccaaggcatcctcggacgccagcaaggtgacctctaagggggcagggctctcaaaggcctttgtgggccagaagagttccttcctggtggactgcagcaaagctggctccaacatgctgctgatcggggtccatgggcccaccaccccctgcgaggaggtctccatgaagcatgtaggcaaccagcaatacaacgtcacatacgtcgtcaaggagaggggcgattatgtgctggctgtgaagtggggggaggaacacatccctggcagcccttttcatgtcacagtgccttaaaacagttttctcaaatcctggagagagttcttgtggttgcttttgttgcttgtttgtaattcattttatacaaagccctccagcctgtttgtggggctgaaaccccatccctaaaatattgctgttgtaaaatgccttcagaaataagtcctagactggactcttgagggacatattggagaatcttaagaaatgcaagcttgttcagggggctgagaagatcctgagtacactaggtgcaaaccagaactcttggtggaacagaccagccactgcagcagacagaccaggaacacaatgagactgacatttcaaaaaaacaaaactggctagcctgagctgctggttcactcttcagcatttatgaaacaaggctaggggaagatgggcagagaaaaaggggacacctagtttggttgtcatttggcaaaggagatgacttaaaatccgcttaatctcttccagtgtccgtgttaatgtatttggctattagatcactagcactgctttaccgctcctcatcgccaacacccccatgctctgtggccttcttacacttctcagagggcagagtggcagccgggcaccctacagaaactcagagggcagagtggcagccaggcccacatgtctctcaagtacctgtcccctcgctctggtgattatttcttgcagaatcaccacacgagaccatcccggcagtcatggttttgctttagttttccaagtccgtttcagtcccttccttggtctgaagaaattctgcagtggcgagcagtttcccacttgccaaagatcccttttaaccaacactagcccttgtttttaacacacgctccagcccttcatcagcctgggcagtcttaccaaaatgtttaaagtgatctcagaggggcccatggattaacgccctcatcccaaggtccgtcccatgacataacactccacacccgccccagccaacttcatgggtcactttttctggaaaataatgatctgtacagacaggacagaatgaaactcctgcgggtctttggcctgaaagttgggaatggttgggggagagaagggcagcagcttattggtggtcttttcaccattggcagaaacagtgagagctgtgtggtgcagaaatccagaaatgaggtgtagggaattttgcctgccttcctgcagacctgagctggctttggaatgaggttaaagtgtcagggacgttgcctgagcccaaatgtgtagtgtggtctgggcaggcagacctttaggttttgctgcttagtcctgaggaagtggccactcttgtggcaggtgtagtatctggggcgagtgttgggggtaaaagcccaccctacagaaagtggaacagcccggagcctgatgtgaaaggaccacgggtgttgtaagctgggacacggaagccaaactggaatcaaacgccgactgtaaattgtatcttataacttattaaataaaacatttgctccgtaaa

SEQ ID NO: 7578 - DNA, 7402 bp, Homo sapiens
  source 1..7402: mol_type = unassigned DNA; mol_type = unassigned DNA
atttttgaatcacacaggatgctattctagactttttagatatatccaggaatagagtaaaaaataaaatccctcctgcataaaggcaccaggctttttccaagctttgtttattttttaacaccacttcttcaaggaatggataatccccatcttcatgcaagaacatagcacccggaggagaagtctcagtctgtgcccagactgggaatcctgggacccgcagaagcctgtggataatgcacgagaagccatgcagcaggcagatgactggctgggtgtcccacaggtcatcactcctgaagaaatcattcacccggatgtggacgagcactcagttatgacttacctgtcccagttccccaaagccaagctcaagccgggggctcctctcaaacccaaactcaacccgaagaaagccagggcctatggcagaggaatcgagcccactggaaacatggtgaagcagccagccaagttcactgtggacaccatcagcgccgggcaaggagacgtgatggtgtttgttgaggacccagaagggaacaaagaggaggcacaagtgacccctgacagtgacaagaacaagacatactctgtggagtatctgcccaaggtcaccgggctacacaaagtcacagtcctctttgcaggacagcacatctccaagagcccatttgaagtgagtgttgacaaggcccagggagatgccagtaaagtcactgcaaaaggtccagggttggaagctgtagggaacatcgccaataagcccacctactttgacatctatacggcaggagctggtgtgggtgacattggtgtggaggtggaagatccccaggggaagaacaccgtggagttgctcgtggaagacaaaggaaaccaggtgtatcgatgtgtgtacaaacccatgcagcctggccctcacgtggtcaagatcttctttgctggggacactattcctaagagtcccttcgttgtgcaggttggggaagcctgcaatccaaatgcctgccgggccagtggccgaggcctacaacccaaaggcgtccgtatccgggagaccacagatttcaaggttgacaccaaagctgcaggaagtggggagctcggtgtaaccatgaagggtcctaagggtctggaggagctggtgaagcagaaagactttctggatggggtctacgcattcgagtattaccccagcaccccggggagatacagcattgccatcacatgggggggacaccacattccaaagagcccctttgaagttcaagttggccctgaagcgggtatgcagaaagtccgtgcttggggccctgggctccatggtgggattgtcgggcggtcagcggacttcgtggtagaatccattggctctgaagtggggtctctggggtttgccattgaaggcccctctcaggcaaagattgagtacaacgaccagaatgatggatcgtgtgatgtcaaatactggcccaaggagcctggcgaatatgctgttcacatcatgtgtgacgacgaagacatcaaggacagcccgtacatggccttcatccacccagccacgggaggctacaaccctgatctggttcgagcatacgggccaggtttggagaaatctggatgcattgtcaacaacctggccgagttcactgtggatcctaaggatgctggaaaagctcccttaaagatatttgctcaggatggggaaggccaacgcattgacatccagatgaagaaccggatggacggcacatatgcatgctcatacaccccggtgaaggccatcaagcacaccattgctgtggtctggggaggcgtgaacatcccgcacagcccctacagggtcaacatcgggcaaggtagccatcctcagaaggtcaaagtgtttgggccaggtgtggagagaagtggtctgaaggcaaatgaacctacacacttcacggtggactgtactgaggctggggaaggtgatgtcagtgttggcattaagtgtgatgcccgggtgttaagtgaagatgaggaagacgtggattttgacattattcacaatgccaatgatacgttcacagtcaaatatgtgcctcctgctgctgggcgatacactatcaaagttctctttgcatctcaggaaatccccgccagccctttcagagtcaaagttgacccttcccacgatgccagcaaagtgaaggcagaaggcccagggctcagcaaagcaggtgtggaaaatgggaaaccgacccacttcactgtctacaccaagggggctgggaaagccccgctcaacgtgcagttcaacagccctcttcctggcgatgcagtgaaggatttggatatcatcgataattatgactactctcacacggttaaatatacacccacccaacagggcaacatgcaggttctggtgacttacggtggcgatcccatccctaaaagccctttcactgtgggtgttgctgcaccgctggatctgagcaagataaaactcaatgggctggaaaacagggtggaagttgggaaggatcaggagttcaccgttgataccaggggggcaggaggccaggggaagctggacgtgacaatcctcagcccctctcggaaggtcgtgccatgcctagtgacacctgtgacaggccgggagaacagcacggccaagttcatccctcgggaggaggggctgtatgctgtagacgtgacctacgatggacaccctgtgcccgggagcccctacacagtggaggcctcgctgccaccagatcccagcaaggtgaaggcccacggtcccggcctcgaaggtggtctcgtgggcaagcctgccgagttcaccatcgataccaaaggagctggtactggaggtctgggcttaacggtggaaggtccgtgcgaggccaaaatcgagtgctccgacaatggtgatgggacctgctccgtctcttaccttcccacaaaacccggggagtacttcgtcaacatcctctttgaagaagtccacatacctgggtctcccttcaaagctgacattgaaatgccctttgacccctctaaagtcgtggcatcggggccaggtctcgagcacgggaaggtgggtgaagctggcctccttagcgtcgactgctcggaagcgggaccgggggccctgggcctggaagctgtctcggactcgggaacaaaagccgaagtcagtattcagaacaacaaagatggcacctacgcggtgacctacgtgcccctgacggccggcatgtacacgttgaccatgaagtatggtggcgaactcgtgccacacttccccgcccgggtcaaggtggagcccgccgtggacaccagcaggatcaaagtctttggaccaggaatagaagggaaagatgtgttccgggaagctaccaccgactttacagttgactctcggccgctgacccaggttgggggtgaccacatcaaggcccacattgccaacccctcaggggcctccaccgagtgctttgtcacagacaatgcggatgggacctaccaggtggaatacacaccctttgagaaaggtctccatgtagtggaggtgacatatgatgacgtgcctatcccaaacagtcccttcaaggtggctgtcactgaaggctgccagccatctagggtgcaagcccaaggacctggattgaaagaggcctttaccaacaagcccaatgtcttcaccgtggttaccagaggcgcaggaattggtgggcttggcataactgttgagggaccatcagagtcgaagataaattgcagagacaacaaggatggcagctgcagtgctgagtacattcctttcgcaccgggggattacgatgttaatatcacatatggaggagcccacatccccggcagccccttcagggttcctgtgaaggatgttgtggaccccagcaaggtcaagattgccggccccgggctgggctcaggcgtccgagcccgtgtcctgcagtccttcacggtggacagcagcaaggctggcctggctccgctggaagtgagggttctgggcccacgaggcttggtggagccagtgaacgtggtggacaatggagatggcacacacacagtaacctacaccccatctcaggagggaccttacatggtctcagttaaatatgctgatgaagagattcctcgcagtcccttcaaggtcaaggtccttcccacatatgatgccagcaaagtgactgccagtggccccggccttagttcctatggtgtgcctgccagtctacctgtggactttgcaattgatgcccgagatgccggggaaggcctgcttgctgttcaaataacggaccaagaaggaaaacccaaaagagccattgtccatgacaataaagatggcacgtatgctgtcacctacatccccgacaagactgggcgctatatgattggagtcacctacgggggtgacgacatcccactttctccttatcgcatccgagccacacagacgggtgatgccagcaagtgcctggccacgggtcctggaatcgcctccactgtgaaaactggcgaagaagtaggctttgtggttgatgccaagactgccgggaagggtaaagtgacctgcacggttctgaccccagatggcactgaggccgaggccgatgtcattgagaatgaagatggaacctatgacatcttctacacagctgccaagccgggcacatatgtgatctatgtgcgcttcggtggtgttgatattcctaacagccccttcactgtcatggtgaccgaagaggcctatgtcccagtgagtgacatgaacggcctgggatttaagccttttgacctggtcattccgtttgctgtcaggaaaggagaaatcactggagaggtccacatgccttctgggaagacagccacacctgagattgtggacaacaaggacggcacggtcactgttagatatgcccccactgaggtcgggctccatgagatgcacatcaaatacatgggcagccacatccctgagagcccactccagttctacgtgaactaccccaacagtggaagtgtttctgcatacggtccaggcctcgtgtatggagtggccaacaaaactgccaccttcaccatcgtcacagaggatgcaggagaaggtggtctggacttggctattgagggcccctcaaaagcagaaatcagctgcattgacaataaagatgggacatgcacagtgacctacctgccgactctgccaggcgactacagcattctggtcaagtacaatgacaagcacatccctggcagccccttcacagccaagatcacagatgacagcaggcggtgctcccaggtgaagttgggctcagccgctgacttcctgctcgacatcagtgagactgacctcagcagcctgacggccagcattaaggccccatctggccgagacgagccctgtctcctgaagaggctgcccaacaaccacattggcatctccttcatcccccgggaagtgggcgaacatctggtcagcatcaagaaaaatggcaaccatgtggccaacagccccgtgtctatcatggtggtccagtcggagattggtgacgcccgccgagccaaagtctatggccgcggcctgtcagaaggccggactttcgagatgtctgacttcatcgtggacacaagggatgcaggttatggtggcatatccttggcggtggaaggccccagcaaagtggacatccagacggaggacctggaagatggcacctgcaaagtctcctacttccctaccgtgcctggggtttatatcgtctccaccaaattcgctgacgagcacgtgcctgggagcccatttaccgtgaagatcagtggggagggaagagtcaaagagagcatcacccgcaccagtcgggccccgtccgtggccactgtcgggagcatttgtgacctgaacctgaaaatcccagaaatcaacagcagtgatatgtcggcccacgtcaccagcccctctggccgtgtgactgaggcagagattgtgcccatggggaagaactcacactgcgtccggtttgtgccccaggagatgggcgtgcacacggtcagcgtcaagtaccgtgggcagcacgtcaccggcagccccttccagttcaccgtggggccacttggtgaaggaggcgcccacaaggtgcgggcaggaggccctggcctggagagaggagaagcgggagtcccagctgagttcagcatttggacccgggaagcaggcgctggaggcctctccatcgctgttgagggccccagtaaggccgagattacattcgatgaccataaaaatgggtcgtgcggtgtatcttatattgcccaagagcctggtaactacgaggtgtccatcaagttcaatgatgagcacatcccggaaagcccctacctggtgccggtcatcgcaccctccgacgacgcccgccgcctcactgttatgagccttcaggaatcgggattaaaagttaaccagccagcatcctttgctataaggttgaatggcgcaaaaggcaagattgatgcaaaggtgcacagcccctctggagccgtggaggagtgccacgtgtctgagctggagccagataagtatgctgttcgcttcatccctcatgagaatggtgtccacaccatcgatgtcaagttcaatgggagccacgtggttggaagccccttcaaagtgcgcgttggggagcctggacaagcggggaaccctgccctggtgtccgcctatggcacgggactcgaagggggcaccacaggtatccagtcggaattctttattaacaccacccgagcaggtccagggacattatccgtcaccatcgaaggcccatccaaggttaaaatggattgccaggaaacacctgaagggtacaaagtcatgtacacccccatggctcctggtaactacctgatcagcgtcaaatacggtgggcccaaccacatcgtgggcagtcccttcaaggccaaggtgacaggccagcgtctagttagccctggctcagccaacgagacctcatccatcctggtggagtcagtgaccaggtcgtctacagagacctgctatagcgccattcccaaggcatcctcggacgccagcaaggtgacctctaagggggcagggctctcaaaggcctttgtgggccagaagagttccttcctggtggactgcagcaaagctggctccaacatgctgctgatcggggtccatgggcccaccaccccctgcgaggaggtctccatgaagcatgtaggcaaccagcaatacaacgtcacatacgtcgtcaaggagaggggcgattatgtgctggctgtgaagtggggggaggaacacatccctggcagcccttttcatgtcacagtgccttaaaacagttttctcaaa

SEQ ID NO: 7579 - DNA, 6497 bp, Homo sapiens
  source 1..6497: mol_type = unassigned DNA; mol_type = unassigned DNA
cttctaaaattgcttacacctgcctcatctgctttgcttaatgagcatgccatcctttgattaacctaccctggagttgacccatccttgactgtcacgttggaagctgggatctggactctgcaacccaacgcgtgccttgattatgttttagcataatctctaacatctccacaggcttcaccttgagggtccccttgccccatgagattggcaccctcacctgccctgcacctatgccccagcatgctggtaccacagtgttctttgctcaaaggtggccacaagtcttgactagccagcccattggttaatttttgctcttcacaattctggactctttggcagtgtctcagctgtagagtaaaattgccacatcctaagcgtgcctaaccagcttgaaaggttatattgtgtcttcaacacacatcatccacatacaccctccagcagcaagcacaggcagtctccttaattatactctagggcagactgagtgtattttagccaacaaaaagctaaaggtgtctctcggggtcatttctgcaaccatgaattggggatcctgtgatttttttcaggcctgtgattatggttgctggcctttttgttactcatcagtggaaaccaatagctcttggggatggatgtggtcctatttcagactcagccaagggtggagtaaaggtgaggccaggcagctccttaaacctctcatctctgtcctcaggcttggtggagccagtgaacgtggtggacaatggagatggcacacacacagtaacctacaccccatctcaggagggaccttacatggtctcagttaaatatgctgatgaagagattcctcgcagtcccttcaaggtcaaggtccttcccacatatgatgccagcaaagtgactgccagtggccccggccttagttcctatggtgtgcctgccagtctacctgtggactttgcaattgatgcccgagatgccggggaaggcctgcttgctgttcaaataacggaccaagaaggaaaacccaaaagagccattgtccatgacaataaagatggcacgtatgctgtcacctacatccccgacaagactgggcgctatatgattggagtcacctacgggggtgacgacatcccactttctccttatcgcatccgagccacacagacgggtgatgccagcaagtgcctggccacgggtcctggaatcgcctccactgtgaaaactggcgaagaagtaggctttgtggttgatgccaagactgccgggaagggtaaagtgacctgcacggttctgaccccagatggcactgaggccgaggccgatgtcattgagaatgaagatggaacctatgacatcttctacacagctgccaagccgggcacatatgtgatctatgtgcgcttcggtggtgttgatattcctaacagccccttcactgtcatggtgaccgaagaggcctatgtcccagtgagtgacatgaacggcctgggatttaagccttttgacctggtcattccgtttgctgtcaggaaaggagaaatcactggagaggtccacatgccttctgggaagacagccacacctgagattgtggacaacaaggacggcacggtcactgttagatatgcccccactgaggtcgggctccatgagatgcacatcaaatacatgggcagccacatccctgagagcccactccagttctacgtgaactaccccaacagtggaagtgtttctgcatacggtccaggcctcgtgtatggagtggccaacaaaactgccaccttcaccatcgtcacagaggatgcaggagaaggtggtctggacttggctattgagggcccctcaaaagcagaaatcagctgcattgacaataaagatgggacatgcacagtgacctacctgccgactctgccaggcgactacagcattctggtcaagtacaatgacaagcacatccctggcagccccttcacagccaagatcacagatgacagcaggcggtgctcccaggtgaagttgggctcagccgctgacttcctgctcgacatcagtgagactgacctcagcagcctgacggccagcattaaggccccatctggccgagacgagccctgtctcctgaagaggctgcccaacaaccacattggcatctccttcatcccccgggaagtgggcgaacatctggtcagcatcaagaaaaatggcaaccatgtggccaacagccccgtgtctatcatggtggtccagtcggagattggtgacgcccgccgagccaaagtctatggccgcggcctgtcagaaggccggactttcgagatgtctgacttcatcgtggacacaagggatgcaggttatggtggcatatccttggcggtggaaggccccagcaaagtggacatccagacggaggacctggaagatggcacctgcaaagtctcctacttccctaccgtgcctggggtttatatcgtctccaccaaattcgctgacgagcacgtgcctgggagcccatttaccgtgaagatcagtggggagggaagagtcaaagagagcatcacccgcaccagtcgggccccgtccgtggccactgtcgggagcatttgtgacctgaacctgaaaatcccagaaatcaacagcagtgatatgtcggcccacgtcaccagcccctctggccgtgtgactgaggcagagattgtgcccatggggaagaactcacactgcgtccggtttgtgccccaggagatgggcgtgcacacggtcagcgtcaagtaccgtgggcagcacgtcaccggcagccccttccagttcaccgtggggccacttggtgaaggaggcgcccacaaggtgcgggcaggaggccctggcctggagagaggagaagcgggagtcccagctgagttcagcatttggacccgggaagcaggcgctggaggcctctccatcgctgttgagggccccagtaaggccgagattacattcgatgaccataaaaatgggtcgtgcggtgtatcttatattgcccaagagcctggtaactacgaggtgtccatcaagttcaatgatgagcacatcccggaaagcccctacctggtgccggtcatcgcaccctccgacgacgcccgccgcctcactgttatgagccttcaggaatcgggattaaaagttaaccagccagcatcctttgctataaggttgaatggcgcaaaaggcaagattgatgcaaaggtgcacagcccctctggagccgtggaggagtgccacgtgtctgagctggagccagataagtatgctgttcgcttcatccctcatgagaatggtgtccacaccatcgatgtcaagttcaatgggagccacgtggttggaagccccttcaaagtgcgcgttggggagcctggacaagcggggaaccctgccctggtgtccgcctatggcacgggactcgaagggggcaccacaggtatccagtcggaattctttattaacaccacccgagcaggtccagggacattatccgtcaccatcgaaggcccatccaaggttaaaatggattgccaggaaacacctgaagggtacaaagtcatgtacacccccatggctcctggtaactacctgatcagcgtcaaatacggtgggcccaaccacatcgtgggcagtcccttcaaggccaaggtgacaggtaacgaacaaccaccttcggagttactctcccttcctggggagctggttgtgtcagatcaatcatagtggaaactatggatggttttagatgtgttaaagctactttgaactttgaatgtcagtaaatagtatgagatgtcagagggcagtgtttgaaacttacaaaagtccacagagtggagccgtgcagaagttgagaaagcatgttaggatgttaggtggttttctatctctaacaggaaagaatacatattgaaatcttacgtatttgtttagatcagggtctgaaaaatcccctgatttctaattttcacttgaaaaataatcaaaaagttttcctatacttataaaaatgtgtctcctccaaaacactggaaaaaataccaaactatgaaaaccacttcacagccaccacccaaggtaaccaccataaacactgtagtaaatcccttccacacgtcatgattcactgttacataaagaatgtaggttcatcgcaggaaaattagaaaattcagatagaaaaatcatcctttctcatccacagaatcattttttgatatttcattatatgtcatcccaaacttttacactgcttatacatagactattttatgtcaatagaaagatgtgaattccacaggcacatctttggtgggtagggggtggggggattgggagggtccttggccttgtcagccaaggccagactcatccatttgcccagaaagccagatcctagttgtatgggggtgggatcctaggggtttagaagacattatgggtgtgagatacaggtgtggtggcttttgtgttggggtgcgcgggctctcctggggttactgtgtagggtactcgcctgtcctctggctgagagacccctcttgatctggccattcatgcctgtccccctccctcctgtatcttaggccagcgtctagttagccctggctcagccaacgagacctcatccatcctggtggagtcagtgaccaggtcgtctacagagacctgctatagcgccattcccaaggcatcctcggacgccagcaaggtgacctctaagggggcagggctctcaaaggcctttgtgggccagaagagttccttcctggtggactgcagcaaagctggctccaacatgctgctgatcggggtccatgggcccaccaccccctgcgaggaggtctccatgaagcatgtaggcaaccagcaatacaacgtcacatacgtcgtcaaggagaggggcgattatgtgctggctgtgaagtggggggaggaacacatccctggcagcccttttcatgtcacagtgccttaaaacagttttctcaaatcctggagagagttcttgtggttgcttttgttgcttgtttgtaattcattttatacaaagccctccagcctgtttgtggggctgaaaccccatccctaaaatattgctgttgtaaaatgccttcagaaataagtcctagactggactcttgagggacatattggagaatcttaagaaatgcaagcttgttcagggggctgagaagatcctgagtacactaggtgcaaaccagaactcttggtggaacagaccagccactgcagcagacagaccaggaacacaatgagactgacatttcaaaaaaacaaaactggctagcctgagctgctggttcactcttcagcatttatgaaacaaggctaggggaagatgggcagagaaaaaggggacacctagtttggttgtcatttggcaaaggagatgacttaaaatccgcttaatctcttccagtgtccgtgttaatgtatttggctattagatcactagcactgctttaccgctcctcatcgccaacacccccatgctctgtggccttcttacacttctcagagggcagagtggcagccgggcaccctacagaaactcagagggcagagtggcagccaggcccacatgtctctcaagtacctgtcccctcgctctggtgattatttcttgcagaatcaccacacgagaccatcccggcagtcatggttttgctttagttttccaagtccgtttcagtcccttccttggtctgaagaaattctgcagtggcgagcagtttcccacttgccaaagatcccttttaaccaacactagcccttgtttttaacacacgctccagcccttcatcagcctgggcagtcttaccaaaatgtttaaagtgatctcagaggggcccatggattaacgccctcatcccaaggtccgtcccatgacataacactccacacccgccccagccaacttcatgggtcactttttctggaaaataatgatctgtacagacaggacagaatgaaactcctgcgggtctttggcctgaaagttgggaatggttgggggagagaagggcagcagcttattggtggtcttttcaccattggcagaaacagtgagagctgtgtggtgcagaaatccagaaatgaggtgtagggaattttgcctgccttcctgcagacctgagctggctttggaatgaggttaaagtgtcagggacgttgcctgagcccaaatgtgtagtgtggtctgggcaggcagacctttaggttttgctgcttagtcctgaggaagtggccactcttgtggcaggtgtagtatctggggcgagtgttgggggtaaaagcccaccctacagaaagtggaacagcccggagcctgatgtgaaaggaccacgggtgttgtaagctgggacacggaagccaaactggaatcaaacgccgactgtaaattgtatcttataacttattaaataaaacatttgctccgtaaa

SEQ ID NO: 7580 - DNA, 475 bp, Homo sapiens
  source 1..475: mol_type = unassigned DNA; mol_type = unassigned DNA
tccctttgcccacagctcacgtggagtgcgtcaatccattgtccccagcatcagggctgccctggatgagttgttaaaaggaaactcttaaaacaaggcaactctctccctaacacccctgcatccctgttcccacttgtaggtggtctggacttggctattgagggcccctcaaaagcagaaatcagctgcattgacaataaagatgggacatgcacagtgacctacctgccgactctgccaggcgactacagcattctggtcaagtacaatgacaagcacatccctggcagccccttcacagccaagatcacagatgacagcaggcggtgctcccaggtgaagttgggctcagccgctgacttcctgctcgacatcagtgagactgacctcagcagcctgacggccagcattaaggccccatctggccgagacgagccctgtctcctgaagaggctgcccaacaaccacattg

SEQ ID NO: 7581 - DNA, 2058 bp, Homo sapiens
  source 1..2058: mol_type = unassigned DNA; mol_type = unassigned DNA
tgtggaaatgaagcatctctttctgttttctctttgagatggtttgagttagattgtgtctcttccaagcttgccacaccccagtgcctccagtcatctgctttcttgaaggatggccacgctggtgaattctagacaaattctaacccggggagagggctggagaatttctggtcctggttgggagatactccctgttaaaccttcggatatgctgacctagctgaggtagccaggggctatttaaaaattcaaaatctcagatctggctgtggataaacccccaaggtggtacgtgcagtacttggaggcgtgagggcagaaggtcctccccagcagtttgtacgggacacatcatctatgggatattagtaaatatccttaaggaaaggcttctgtggtcaaaaccaggttcagcaggttatttcactatggggcttctcaggacgcttaacctactcatccccctctgggctttgcaaacgaggccgccattgctttctttctgctatgtagaaatagattgaggcgtaagggtcggatgtcctttctccattcatcaggctccctcttcctgaggagctgctgtcagaacagcctggggctgctgtgttgcaggttatggtggcatatccttggcggtggaaggccccagcaaagtggacatccagacggaggacctggaagatggcacctgcaaagtctcctacttccctaccgtgcctggggtttatatcgtctccaccaaattcgctgacgagcacgtgcctgggagcccatttaccgtgaagatcagtggggagggaagagtcaaagagagcatcacccgcaccagtcgggccccgtccgtggccactgtcgggagcatttgtgacctgaacctgaaaatcccaggtgggcgtcggggactagtagggtggggaagccttggctccagccttcagggcagtgggtgcctttgggaaccaagtttaggcatggcccagaacacagtatccaagtcggctgtgctgaccttttcatttcacttcatttcattatgttcttctatgtttattttcacagagtctcatccaagaaaaacaaatgtttaccttgctacctttttcctcttccaaataaaaatagctttattgtgtcacatgggggaaacgtagatatgcttttagatttttagattaactatctgtcaaatagaatcatgtcagtgaaagaactggccctgccgatgccagggtctggaagtatttaagaggtggcagcccagcggcatccttctagtatttctctttcattcctgaaattagaacgagggctgtgctgcagaactcgctgggccacatctagccctttggtggtgaattgttcttcttgggccccgattagccagtcaacaggtcacacagtctgtctgaaatgtgttccaagttctttctataaagaatccttccagagggaagccactgtgagtgaaaattttgaggctcctctgcccagaagttggcatgtcctgtggaattgcacaaattctacagagaagggaaatctaaatcgtcttcagatggagcttgtgttgcgagctctggagagggggttgtctttctacactgcatctcccatccttcctaacgagtcacggagctgtcgactccgccttcttggctttagttaacaggttcttcttgtgtagtcacatcaacgtcgggtcacatgggaatgtggtaaagcctcattactgtagagttcagacatgatcacttaaaaagagctttattgggccgggcgcggtggcttactcctataatcccagcactttggggggccgaggcaggcagatcacctgaggtcaggagttcgagaccagcctggctaacatggcaaaaccctatctcttctaaaaatacaaaaataagcagggcgtggtggcgggcacctgtaatcccacctactcaggaggctgaggcacaagaattgcgtaaacctgggaggtggaggttgcagtgagctgaaattgcaccgctgcactccagcctgggcaacaaagtgagactccttctc

SEQ ID NO: 7582 - DNA, 404 bp, Homo sapiens
  source 1..404: mol_type = unassigned DNA
cttggcggtggaaggccccagcaaagtggacatccagacggaggacctggaagatggcacctgcaaagtctcctacttccctaccgtgcctggggtttatatcgtctccaccaaattcgctgacgagcacgtgcctgaaatcaacagcagtgatatgtcggcccacgtcaccagcccctctggccgtgtgactgaggcagagattgtgcccatggggaagaactcacactgcgtccggtttgtgccccaggagatgggcgtgcacacggtcagcgtcaagtaccgtgggcagcacgtcaccggcagccccttccagttcaccgtggggccacttggtgaaggaggcgcccacaaggtgcgggcaggaggccctggcctggagagaggagaagcgggagtcccag

SEQ ID NO: 7583 - DNA, 315 bp, Homo sapiens
  source 1..315: mol_type = unassigned DNA; mol_type = unassigned DNA
ttcgctgacgagcacgtgcctgggagcccatttaccgtgaagatcagtggggagggaagagtcaaagagagcatcacccgcaccagtcgggccccgtccgtggccactgtcgggagcatttgtgacctgaacctgaaaatcccaggggtcagagtcatgaactgctctgcccagatcctgtggggctggagggtgcagtttcatactggctctaggtgatggcagtgctccgtgccccgcatgcggccgcctggcctcaccacggcagtgcaggcacagtcgttggcatgacaaatcaacagcagtgatatgtcg

SEQ ID NO: 7584 - DNA, 573 bp, Homo sapiens
  source 1..573: mol_type = unassigned DNA; mol_type = unassigned DNA
agtgatgcttaggaaacttcagcaatggaccttggaccttgcttgggttctgcttggggttggagaaagaggaaagggctagcaacagacgaaacctagcactgcaggtttgaacaaggatggaagagggacaggggctctgtggggctcagtcactaaccaggtttctctttgctctcagctgagttcagcatttggacccgggaagcaggcgctggaggcctctccatcgctgttgagggccccagtaaggccgagattacattcgatgaccataaaaatgggtcgtgcggtgtatcttatattgcccaagagcctggtaactacgaggtgtccatcaagttcaatgatgagcacatcccggaaagcccctacctggtgccggtcatcgcaccctccgacgacgcccgccgcctcactgttatgagccttcaggaatcgggattaaaagttaaccagccagcatcctttgctataaggttgaatggcgcaaaaggcaagattgatgcaaaggtgcacagcccctctggagccgtggaggagtgccacgtgtctgagctggagccaggtgag

SEQ ID NO: 7585 - DNA, 541 bp, Homo sapiens
  source 1..541: mol_type = unassigned DNA; mol_type = unassigned DNA
catcgcaccctccgacgacgcccgccgcctcactgttatgagccttcaggaatcgggattaaaagttaaccagccagcatcctttgctataaggttgaatggcgcaaaaggcaagattgatgcaaaggtgcacagcccctctggagccgtggaggagtgccacgtgtctgagctggagccagataagtatgctgttcgcttcatccctcatgagaatggtgtccacaccatcgatgtcaagttcaatgggagccacgtggttggaagccccttcaaagtgcgcgttggggagcctggacaagcggggaaccctgccctggtgtccgcctatggcacgggactcgaagggggcaccacaggtaacccactcttctgcttcttgaagccttaactgaaccagctccagggaccaagccagatggaaatcctcaagccccatgaaagctttttacacgtactccccgtggaaactggggtcatgcacacttcggaggcgcttgctgtccaaagctgttttgggagttgcggtttgacccacgat

SEQ ID NO: 7586 - DNA, 932 bp, Homo sapiens
  source 1..932: mol_type = unassigned DNA; mol_type = unassigned DNA
cacagctgcagtgtgcatggaatgaaaaggtatctgtgcttggccgccagagcgcccagtatcctgaccttctgaacaaagcaaacctccctctgtttttaatgggtatccagtcggaattctttattaacaccacccgagcaggtccagggacattatccgtcaccatcgaaggcccatccaaggttaaaatggattgccaggaaacacctgaagggtacaaagtcatgtacacccccatggctcctggtaactacctgatcagcgtcaaatacggtgggcccaaccacatcgtgggcagtcccttcaaggccaaggtgacaggccagcgtctagttagccctggctcagccaacgagacctcatccatcctggtggagtcagtgaccaggtcgtctacagagacctgctatagcgccattcccaaggcatcctcggacgccagcaaggtgacctctaagggggcagggctctcaaaggcctttgtgggccagaagagttccttcctggtggactgcagcaaagctggctccaacatgctgctgatcggggtccatgggcccaccaccccctgcgaggaggtctccatgaagcatgtaggcaaccagcaatacaacgtcacatacgtcgtcaaggagaggggcgattatgtgctggctgtgaagtggggggaggaacacatccctggcagcccttttcatgtcacagtgccttaaaacagttttctcaaatcctggagagagttcttgtggttgcttttgttgcttgtttgtaattcattttatacaaagccctccagcctgtttgtggggctgaaaccccatccctaaaatattgctgttgtaaaatgccttcagaaataagtcctagactggactcttgagggacatattggagaatcttaagaaatgcaagcttgttcagggggctga

SEQ ID NO: 7587 - DNA, 2002 bp, Homo sapiens
  source 1..2002: mol_type = unassigned DNA; mol_type = unassigned DNA
ctttattaacaccacccgagcaggtccagggacattatccgtcaccatcgaaggcccatccaaggttaaaatggattgccaggaaacacctgaagggtacaaagtcatgtacacccccatggctcctggtaactacctgatcagcgtcaaatacggtgggcccaaccacatcgtgggcagtcccttcaaggccaaggtgacaggccagcgtctagttagccctggctcagccaacgagacctcatccatcctggtggagtcagtgaccaggtcgtctacagagacctgctatagcgccattcccaaggcatcctcggacgccagcaaggtgacctctaagggggcagggctctcaaaggcctttgtgggccagaagagttccttcctggtggactgcagcaaagctggctccaacatgctgctgatcggggtccatgggcccaccaccccctgcgaggaggtctccatgaagcatgtaggcaaccagcaatacaacgtcacatacgtcgtcaaggagaggggcgattatgtgctggctgtgaagtgggggaggaacacatccctggcagcccttttcatgtcacagtgccttaaaacagttttctcaaatcctggagagagttcttgtggttgcttttgttgcttgtttgtaattcattttatacaaagccctccagcctgtttgtggggctgaaaccccatccctaaaatattgctgttgtaaaatgccttcagaaataagtcctagactggactcttgagggacatattggagaatcttaagaaatgcaagcttgttcagggggctgagaagatcctgagtacactaggtgcaaaccagaactcttggtggaacagaccagccactgcagcagacagaccaggaacacaatgagactgacatttcaaaaaaacaaaactggctagcctgagctgctggttcactcttcagcatttatgaaacaaggctaggggaagatgggcagagaaaaaggggacacctagtttggttgtcatttggcaaaggagatgacttaaaatccgcttaatctcttccagtgtccgtgttaatgtatttggctattagatcactagcactgctttaccgctcctcatcgccaacacccccatgctctgtggccttcttacacttctcagagggcagagtggcagccgggcaccctacagaaactcagagggcagagtggcagccaggcccacatgtctctcaagtacctgtcccctcgctctggtgattatttcttgcagaatcaccacacgagaccatcccggcagtcatggttttgctttagttttccaagtccgtttcagtcccttccttggtctgaagaaattctgcagtggcgagcagtttcccacttgccaaagatcccttttaaccaacactagcccttgtttttaacacacgctccagcccttcatcagcctgggcagtcttaccaaaatgtttaaagtgatctcagaggggcccatggattaacgccctcatcccaaggtccgtcccatgacataacactccacacccgccccagccaacttcatgggtcactttttctggaaaataatgatctgtacagacaggacagaatgaaactcctgcgggtctttggcctgaaagttgggaatggttgggggagagaagggcagcagcttattggtggtcttttcaccattggcagaaacagtgagagctgtgtggtgcagaaatccagaaatgaggtgtagggaattttgcctgccttcctgcagacctgagctggctttggaatgaggttaaagtgtcagggacgttgcctgagcccaaatgtgtagtgtggtctgggcaggcagacctttaggttttgctgcttagtcctgaggaagtggccactcttgtggcaggtgtagtatctggggcgagtgttgggggtaaaagcccaccctacagaaagtggaacagcccggagcctgatgtgaaaggaccacgggtgttgtaagctgg

SEQ ID NO: 7588 - DNA, 33679 bp, Homo sapiens
  source 1..33679: mol_type = unassigned DNA; mol_type = unassigned DNA
agttgtacgttcgaaacctgtcgccgtcacttgcgcgtttggcattatccattgtcaccgcggaggaacgagcgctcgagatatcatcagtgcccgcaaatctccgcgccaaggcgctgagctactcctttccgaggtgcgcctctggtcctccgtccctggtgcccagcagcggcgaggcggcatctccgctcccgccgccgtgtccaccgagccctgggatcagggtggcagttctcaacgatgggcaggagggacctcggcggcgacccctaaaacaataccatgccccgggatccccgctgctgccgcgccagcgtcttccctttccacctccctgaccctgtcggattcggatgagcccattgcaaggagaagacgcagccgtcagattgcagattgagcttaaccaagaagttcgtaggctaatcaaggctggcttgacctacaaaagaagaagagagttctgcctgcccacttgggcttgtgttgacacggctgataacttgccatcacctgttgccagtgtggaaaaattctccctgttgaattttttgcacatggaggacagcagcaaagagggcaacacaggctgataagaccagagacagcagggagattattttaccatacgccctcaggacgttccctctagctggagttctggacttcaacagaaccccatccagtcattttgattttgctgtttattttttttttctttttctttttcccaccacattgtattttatttccgtacttcagaaatgggcctacagaccacaaagtggcccagccatggggcttttttcctgaagtcttggcttatcatttccctggggctctactcacaggtgtccaaactcctggcctgccctagtgtgtgccgctgcgacaggaactttgtctactgtaatgagcgaagcttgacctcagtgcctcttgggatcccggagggcgtaactgtactctacctccacaacaaccaaattaataatgctggatttcctgcagaactgcacaatgtacagtcggtgcacacggtctacctgtatggcaaccaactggacgaattccccatgaaccttcccaagaatgtcagagttctccatttgcaggaaaacaatattcagaccatttcacgggctgctcttgcccagctcttgaagcttgaagagctgcacctggatgacaactccatatccacagtgggggtggaagacggggccttccgggaggctattagcctcaaattgttgtttttgtctaagaatcacctgagcagtgtgcctgttgggcttcctgtggacttgcaagagctgagagtggatgaaaatcgaattgctgtcatatccgacatggccttccagaatctcacgagcttggagcgtcttattgtggacgggaacctcctgaccaacaagggtatcgccgagggcaccttcagccatctcaccaagctcaaggaattttcaattgtacgtaattcgctgtcccaccctcctcccgatctcccaggtacgcatctgatcaggctctatttgcaggacaaccagataaaccacattcctttgacagccttctcaaatctgcgtaagctggaacggctggatatatccaacaaccaactgcggatgctgactcaaggggtttttgataatctctccaacctgaagcagctcactgctcggaataacccttggttttgtgactgcagtattaaatgggtcacagaatggctcaaatatatcccttcatctctcaacgtgcggggtttcatgtgccaaggtcctgaacaagtccgggggatggccgtcagggaattaaatatgaatcttttgtcctgtcccaccacgacccccggcctgcctctcttcaccccagccccaagtacagcttctccgaccactcagcctcccaccctctctattccaaaccctagcagaagctacacgcctccaactcctaccacatcgaaacttcccacgattcctgactgggatggcagagaaagagtgaccccacctatttctgaacggatccagctctctatccattttgtgaatgatacttccattcaagtcagctggctctctctcttcaccgtgatggcatacaaactcacatgggtgaaaatgggccacagtttagtagggggcatcgttcaggagcgcatagtcagcggtgagaagcaacacctgagcctggttaacttagagccccgatccacctatcggatttgtttagtgccactggatgcttttaactaccgcgcggtagaagacaccatttgttcagaggccaccacccatgcctcctatctgaacaacggcagcaacacagcgtccagccatgagcagacgacgtcccacagcatgggctccccctttctgctggcgggcttgatcgggggcgcggtgatatttgtgctggtggtcttgctcagcgtcttttgctggcatatgcacaaaaaggggcgctacacctcccagaagtggaaatacaaccggggccggcggaaagatgattattgcgaggcaggcaccaagaaggacaactccatcctggagatgacagaaaccagttttcagatcgtctccttaaataacgatcaactccttaaaggagatttcagactgcagcccatttacaccccaaatgggggcattaattacacagactgccatatccccaacaacatgcgatactgcaacagcagcgtgccagacctggagcactgccatacgtgacagccagaggcccagcgttatcaaggcggacaattagactcttgagaacacactcgtgtgtgcacataaagacacgcagattacatttgataaatgttacacagatgcatttgtgcatttgaatactctgtaatttatacggtgtactatataatgggatttaaaaaaagtgctatcttttctatttcaagttaattacaaacagttttgtaactctttgctttttaaatcttaaaaaaaaaaaagttgctgaagtactgtacagggttgtacaatgagaacccaatgccaaggcaaaaagaacgagtgatttttccttaggatacacatcaaccactttgctgttgaagctgtcagaataaattcctggtggtcagatgaaagggcagattaaatggactcatcagggtaagaggaataatatgggtaaaacaagaaatggcccgatagtttcacactattcctatacctccaggtccggaagacaggtaaaaaattctataatgtaagaatggaggtagttaccctgatttgaccctgtgtgggaaatgctgaaagcaccaggaggaagccggttcccgtgagataagttaacccggcctgacagaatcaagaaaattgagatgagatttgaaaggacccgaaaatgcaggggttggctttctgactgggaacttaaaaatcactcttcatgcttccctggtcctatgtgataacagagttagagacttgagtctgatttcagtcatcttcagggaccagtctgatgttgtagcaagaagactccctttaaaagtgttactgttcaaatcatatatcaggttgaatcacattcaacagagatatattctagaatacttttttagaagaggctaataaagggaagaattatattgaatggaattatttttgataatgagaattatttgggtagattcactgaggctatgtcaacatgatatttagaccaacaggtgatcaatgtttggaaaatacaacaatgacttatttaaaaattacccttcctgctatttagacaaaaacaactgatcagtggttctgttatgtcagctgactttgttagtatcatgttgaaatagcttgaagtaatatcttttatccccttgcaaattcttgtcttccaatcatctcccatatattttcataattagttgtttatgacacctttgtttttctccctctgttcagtatttcaaggaaaattatggatgccagtcttggctgcacaagatatccattacgtacttatacattttaaaatgagtactaattttcactgctaataattctgtaaggacacatcaaagctggccaaaataatgaattttttttaaaaagcaatacctggtttccaccttggactgactttgatcctgttccacttttgaaattttatttgttccttttccatcgtggatgttcctctactttggcaattgtggagggctaatcaatcttatgttagcaggacaacccatgaaaaacaagtcagagagtgaaggctttttcccctaatcctggcagagcagggcgtagaaaagagaggatgtccgtgcttaattctagatacttttgagacaacaccttcagaaaacacataatttaatctttgccatccttagatagagaagggctatagatcacatacgttatcaaaaactactcccttggaaaaaatatctttcgaaaatcaaatttaaacatttcactctgtgctgcatatttcttttaccattgaccattattatagggacccatgaagtaaatgtcacaatcatcttactagctctctctctctcagcaaaataaaactgtgatgtgtcttctttgtaaaagtttaggtataaaatgctatgcaactttttctttatagtaagagctttattttctttaataatatagcccaacttatatgttttaatctcccttgtccctcagaataagcagaaaatataactgcagctgtatgtcgtagacacaagaattgaaactgtgcagtcagtagagctgaacttagctatgaattaatttaaattaattctaaagtgactctggtttccattttagtctattagctagagggttttggctgttgctttttttaaagttaggtccacacagtgaagggaaaagagtctgtgaaggtgatcagtgtagcagtaagacatctaaaatcaagacaatgacatgggggctttgtgtacttagctggataattcccttctactgtcctcttccccttggctgtgtagataaaattgtgcattcaaatgatggtactttgacttttgagggtttttatttctgttattcacaaaatactcattctcatttatgtatattgtatgtttaacccccagtgggatttctggctgctgaaaccactttgggccaggaagaacaaggatgaagaggttcctgtcatttcttatggggttcacagaattatttggggcttaaatggtacaatggagacagtcatgtgcaatgcttaagatggtctgacagggtcccttttgctggaggtgttcctgaagagattgaacctagtaacaggctttattttcaccttgtgtacaacatggcaaagactgctaagattaaaatccgtctcccatttgttacagcctcacctgcaccaggatagaaagcacgtgatggaatctgtgatgtctaatgtgtcttatgaaaattgccaaacaactgtccctggggattctgctttgattggcatttttagtcatgggaatgtatatttgctgatatatctgctctgtgtttgggcctctcttgctgtcattatgatgtattttgagatgattagtcaagagtcaaggttgcgagtacaggccaagaccatgggaaaaaaagccatgctcactggccaataaagagcttgatgctgcctggccaaatgaggtgactcagatagaatctgatcccattcagagcttggtaaatgtcactgtacagaagacattgaaaaggaagaggcatagtcatgatcaaaaggatatattgacagttatctatagccagggtagttgttaatacctgcttgtttggggagatatgtttgattatagagagactctgggccaccctcaaacaccgtcagatgcattagcagcccactgcatgggacaatcgcaggcagatacgaggaatgtatcccctgcctattttccttgtgtaacaaatggaaaacattctcccctgtgagaaataatgcaatttctaattatctggatgttcgttgaaaatatattagacattctccctgaggttaaaaacaaaaagtacgtgaccagtctggtaagaagtattaatgaagtagctaatattacagcttcattttctactagcacctatcataatggtcttagtcatttcacacaaatcagaacttccttccccaccagggaggacaacatcttcatgctgtgattgaagcatccattcagaacacgaggcaatattgcagtccacagggaatggatgcttcacttgatctccggaccttggctgcagaggccatcgcagcttttgaaaagtgaaggggttaattcccattggtgtctttgcttatagcatttttctctaacctataacaaggagacattacattttactttagaacatgagaatagcagttttgctcatgacttaccattccagctgcatgggaaagcaaagcagaaaacagtgccccaaatggaaaaaagatactcacacagaacaaaacagttcttggtcttgttcttggtcttgtcaaaccttgcctgatgctctttctaaagtcaaaatatgaatgctaagaaggcataacctacatccttctctgatttcttcagcagggtcaaaagacagttactagcaatggggaatgcttgtcactgtggagaaagagttttgtatatgtctgataccgttgttataacaaaacaaatttttttactatagttttttgttttctacctgcacacccaccagaagagcacaaagcaaggccattgcaacaggcatttaaaaattattatcaaacatgcacatgcttgtacacacacacacacacacacacaaacaggggcatttgtaaaggtgtccctggaatgtaagatttataatgtttaaggcaaggtgaaggcattgccaagtgtgtgtcgctcataggactagtgtatattcactgaaagttaacctgatgatttgttattgtttgaaccatatgctgatttgcttctggtttctgtttagtgtgttctctctgataaggggctgaaagattctgcatcacacatcctctgagacctaccatgtcgcacactttgttaatgacaaacttcactctacactatacagtaccttgttgatatattcagtaaagtcttattttaaaagaaaaccacattgtgtttatctgagtaagttcattgggatacagtcaatacttgtgctgttaatgtagaagaaatgacgcaggagggcaggaataaaagaggtaataggactttcgtattctcctatcatgaatatgacttgcatttctaaaggccatttgatcctttttgtgtgaggagtttatatgaaatcctcatgttcttttaaatttcccaactaaattgtgtgttcctacgaataccttttaggtatgcacacatacacagagcatcttattttatactggtgaaatctatgttgtttaggatacagataatgtcattgtatttatcctatcagaataggcttttcccctatttcaaaatagatgctattggctttattttttatttttaaattttttttaaacacggtcttaccatgttgcccaggctggtctcaaactcctagatgcaagcaatcatcccacctcgatcacccaaagtgctgggagtacaggcagaggacaccatgcccagccacgctattggttttaaatgtcagatttctttaagaattctcatagtacttttctgccgcagaatttatagcacatctgtccatcctttcaataggcactcaaggaaatgtatctattcatatgctcaacttcaattgattagtctcatatgatttttcagaaccccttttgctaacccctcttggccatttcattaataatgtatttgacagagattgaatcaggaaataaattcatgacatttcagttaactagtattacctgtttgtagaatctctgttggaacattgactatgaaagacagtgctaacaagtaattcatattacttttggggattttatgtaaagtaacatctatgctattcttgggtacttttgccaagagttacagaccttattctatacagactaaaccattagtcaaaaaataccattcattcaaaataattcattaatgtcctcctactctgttccaaacactaggctgagttcagaggcctcacagaatagtgaaatgcgttcttagccaaatcaggcaaatcttctccctcactatgtccctgaagaaatctcttcatctgatatatttactattcatctactttctacagcactatgttagggtcttccggggattcagagaaaagtgtctgtgagccattaagaaactcacagatcaggtaataaacactttttctaatgcattccagtgtctcagagcctgcataatcactttatactacttcattaaattgacaggacatctaaggtgacaaaagagatgtttctacctgttggtaaggttgatgcaactgtcataattagatgttcttggtttttaatagatgcagcaatgagagagtacattgctaaagtcagaacttaatttgaattaaattttcaagtttccaccaagtatttgaaaacttagaaattgtatttcgtaattacacatgcagacatttaaatttttattaagcaccacgatggaactcaatctaaaggaataatggcacctgataattactaacaacctttgtttatataagaccttgtgcaaactgtgtgataacgtatgtttgcattctgtctttaaaataaccctgtaaggtgcgttattttaatttttagattttaaaacttagcttcaagagaaattaagtgattagtctatagctacaaatcctgtaaatggcagagtcaggaattaccactgagcatgactccatggactcttaattgttttcctgcctcttaataaattgaccatccttgagactgactagccttcagatttttcatgatggagctatcataacttctcagtggatacatatattatcatttatggcaaataaagggaacattttagaagcctcaaaattcttgtcttttaaagcccttggtcatccattcctattttttataaaaattctttttgtgattatttgatggctgcacatttatctgatttgaaggtttcagatggaatcaagatatgtctgtacccatagggtgagctgaaagagctactaaaaggtcttcagttgggttatttttaggaatgaatttgtttcgtacttgagatgttgctctaagtattttgtagattccgctgaaaaagcacgtatgtcacaatctattagggcattagtaaactggcttctgaatttatgctctttttttttcccataacatagataaaaatgtgtgctttaggggatattatataagctttattttcactggctctactgaaagttaaggatacaaaagtttttaatggtaataacccaaactatatgtcattttagcacacacataccaatgggtgatcatatctgtcttttttttttttttttttttttggtatgaagtctaaactagacgaaaacctcaatatatccttaggggaattcttattacttcaatgacataataaacctcagtattgggtcactcttttcctaatataaaaaactatgctggctcaaaaagtcttctaaactccctagttgggataggatgggcctttgttggtttagttttgatttcattcagcaaatatttaccgaggcctggtaagttctggtgcagaataagaatgttttccaggagagttaaattttgctcatcaaaaatctttcttggaagctgctggtttttaaccgtcagcctgggctctttctgcctctttgctttttttgagcagaatatggccaggctggtctcaaactcctgatcttaggtgatccacccacctaggcctcccaaagtgctgggattacaggcatgagccacaccactgcatttaaataatcagcctaggattctgctagttccagcaccagagtggcctctcaaatgtgttttctcctcttggttccctgactctgacttggttaagacccttcctttagtctttttctaatttagcctttccaacacattgaaggacaaagggtaatcataatctataaggaatgcctgagtacgatactgcagtgcttgcaaaacatgcgtttttattgcttgcaagatagaattcaaactctttgtgtgacttatgtatcctactacatgttgctccctgacatttcttaccaatattgcctcctccttcattacatgctctagattatatatatataattacatatataatctagattttatatatatatatatatgaaatgagcaaacaaaatgctttcagtttatcttcctgggatctcaagttccttcaaaccactatatatgtgctcaaggtctttcatcctgtgacattcccctttgcctgatgacatatttgtcctttaagatacaagtcaaagacctctcttccaaagccgctggaatcacacctgccaattatctgaccgctttgtgcggttaatataactttaaaatacatttatttttagcacctatatattgtaattttttgtgagtctgcttcatgcctatacaatggggcccctggaaacagaaaacatattctgtaaattgttgtacctcatccagtgttaagagccatgcccaggccctggtgggtgcccagctacaggggaagagccactctgtcagttgcttatggccagatggctctttttttaatagccccagaaagagctgtggagttctgacttgtgcaaaattagccttgctcaaagaccacagtatgcgttttacaagaacaaacaaacatatatattttccttaaaatctcttgattactcatcaacatttttaaaagaaattttgtttttatgattatttggtggccatgcatctgatttgaaagctttagatggaatcagtatgtctacattcataggatgtgctgagataacaattaaaaagacctgaagaacatctttttattttatttatttatttttttttgagttggagtctcactctgtcaccagattggagtgcagtggcacaagctcggctcactgcaacctccgcctcccgggttcaagcaattctcctgcctcagcctcctgcgtagctgggactacaggcgtgcaccaccatgcctggctaattttttgtatttttagtagagatgggttttgccacattggccaggctagtctcgaactcctgacctcaggtgatccccccacctaggcctcccaaagtgctgggattacaggtgtgagccactgcgcccagccaagaacatcctttttatatattacagacaaactcaaaactgaaccagcttgcagaaaagcatacaaagaggtatctttaaaaatcaccttaatcccagcactttgggaggccgaggtgggcagatcacgaggtcaagaaatcaagaccatcctggccaacatggtgaaaccctgtctctactaaaaatacaaaaaatttagccgggcttggtggtgcgtgcctgtagtcccagctactcaggaggctgaggcaggagaattgcttgaacctaggaggtggaggttgcagtgagccaagatcatgccattgcactccagcctggtgacagagtgagactcaaaaaaaaaaaaaaaaaaatcaccttgcaacaaaatatcgccatcatgaaaagtccacaaagcacaagtagacacaaagttaaacatttcgacagtcggctagtcaaaatgaattctttgcatgtgaaaagcagagattttttttttttcatcttcatcagcaaaattaaaaaagacagtcattattcactatgtcatatcccatataaaaatacagcatatatcatttaaaggttcacattgtgttatcttggttattgccatgagaatagtctttcctagaaatgatatgcttgtaaagaagggagtggagagtggtagttattaagaaatcagtttgaaatcaagctgacttactttggaatcctgcttcaaccactgacctgccaatttgccttggcaataacttgcactttagggttatcagtgtacttttcctaaaatggggacaatgatgtctaacacatatggtggttgtcagaattaaaggcatatatagtagttgacagagtatctggtactgagtatacattgaataaatgacatgaagcaccatgtatttttcatgcagatgtaattcacaagcacatggtgacaaattgccagctttttatgatgaaaatcaaatttcttgtgtattggggtaagaattacatgtagagatgatctatttaaaggtaattagcattcaaaattcctcaaaacactcaataatttgcacagctattatcaagatgggtctgtcagaaaggttttcattattctgtattctttctgggggaaaaaaattgggaagatgaggtgccatgggataacacacaaccatggcaggccttttttctcatggtgtgtgggatcattgaacaacatggttgaacagaaagagaacagacttctttataatgtagcatatattctatctggttgctagagtacacatagatgtagttattgctgaaaattaattcagaatatgtgggtgtcaaaagagccccaggaatgagcattcagaaggcattggaaatcaaaatactaaaaacaaaatcaagataagctgagcacagtggctcatgcctataatcgcagtactttgggaggccaaggtgggaggattgcttgaggtcaggatttccagaccagcctgggcaatgcagtgagaccctatctctaaaaaaaaaaaaaaaaattagccaggagtggtggcatgtgcctatagtcccagctacttgggaggttgaagcaggagggtcacttgagcccaggagatcaagattacattgagctctgattgtgccactgcactccagcttaggcaactgagcaagaccctgtctcaaaaaaaaaaaaaaagtaataaatttctgatattgtttcaaaaatctataatttctagtaagacatagttttatttgatgctagtacaccaccaattacggcatttaaatccacactgggtttgctgatagtggggatggtagcagtcaaatggaagaacattttaatgtctctacaatgcaggtgcaatagtctaccacctgtcatgtggttactttttgcaatcgatatcattattaagtttggaagctggttgttattaacaggcatgcatcctcttcagctggatcacgttgttttctttctgtacactttgtggtagttaatagtctcaaagcaattcactcactacggtctgtattagcattattttcctttctatttatgtctttccttgcttaataaatgcagaagttcagacatttgatgaggggggaaatatactttttcagtccttgactgcatgatttaattggtttcaggacagttatttggcaagtagtatcaatgggtactggcattcctgtggtctgctgccaatctctattctgtttggactagtgtctgttttgactggtaggcctcagctatcctattgctaagtattttacataactgccctcattagttggaatatagcatgctttactagtgtatctgaagtaaggaggaagcaggaagtgagctgttttgtaatggaggccaattatatctaacagcaactgtgtctataagactgtagcctattggatgggaagttatattatgaaaacatgatgaatcttttaaattctgagtccaatgctgtctacatctaaatttaaatcctggctcatactaaccttggtccttgggcatgtatatgcttcaattttctcatctgtacatgggttaataacaacactcacctcaacagtaaccatactgcacagtgcctgacacatataaagtgctcaataaatgccagctactttctgaaaatatatggaattagtgtgcaaaaagttgggctatataactcaaatctcctttgtatcttggataagaccacttctctctcgggcttgtttcttatagtcaaaagcgcaggaatttagttgatctcccaagttactttggaccttaaattctgttttatggttgttcattttctatgtagtttagatttggttcattggactgatttgtgttctgtgtgcttttaaaattcaggaagatgtgactaggatagataaagcaaacatataaacactcagtttcattgacttaagtataaagactaacatgtttctcattagttataataaccttaaacttgatatgttagggaagcaacctgcataaccattaaaatcaggagctacagaatcacaaagaactgtgactttgtatctgtgtgatattatttaatgtccctaagcctcagtttcctcatatatgaaatgaggtactaatacttttaaggatttgatgagataatttatatcatcttcacttcagtggttggcatatattcaaacccattatggctgaaaaattacaaatgaatagaaagagaagcaagtgaaaacaaaactcattagttcaaccacttctccctcaaaacaaggaaatacaaactatattactaagtagactattaataaaacactttatttaagtcaaaattatcaaagatagagtgtcgtacaataaaaattgtataaaaaattgtttattaaaatattaaatattttatgttttcaagccattatataacagctattaaaccctaatatttgacagagaaagaattatgagaatagctagaaaatattaaataataaatgtggtttatttttgatggaatagaacagattttaaccctgatccctgccacttttatctgaaccttgaacaaacatacaattatggtttaaaaaaaagaaagatgaaaactttttagaataattaggaaattcttctttcccagaccttcaatacttttataaaaccactacttagcagctaacaatgaaatgttcatttcaaaatgtttagtctttaaagcggttacctaagaatatctgccagtgaacactagctttatttcatcacatcatacacctgaatgtaatcaacattgctttattaaagatgtttatataatttttatataatacacacttccaataattgataatagtctaatgattgatattttaaattaatggcttgtaattgtgtaattggaaagtggtccttgggactcagattaaggtatcattacctgttctttcataagctgttatttatgcttctcattaattagttctttgttatgaaatctttaaaagttcattaattctgtaaagggaatttaataaaatgcaagcagattagtaaaataatttgttttaaagttagttttaaatattatgctacctctataaaggaccaaaatagtatttttaaaagaatttatcaaagtaactataataaaagtatttaatggtatttgtattgcaaacattgaaattctacctggcagtttaaagaacatcactaacattgcctaaatgtaggaaaatcaaaggtgaagtcacctgcagaaaaaaaaaaaaaaaaaacaaaaaacattcttattaatcttaactaattttctttagtgacagaaattcaaacttcgagacatgtttgaaacattttatttcagtaaatatagctgtcactatggaagtaattactctaaaggaaatctgttttaaaaagccagtataaactgaaaagtaagcaacaaaacatcttcaggaaaagaaaaagaaaggcaaataaaatgtttatatgaaattacgaacattctgggccgggtgtggtggctcatgcctgtaatcccagcacttttggaggctgaggtgggtgaattatttatttgaggtcaggagtttgagactagcttggccaacatggtgaaagcccgcctttactaaaaatacaaaaattagcagggtatggtggcaggcgcctgttatcccagctacttgggaggctgaggcagcagaattgcttgaacctgggaggcggaggttgcagtgagctgagatagtgccactgcattctagcctgggtgacagagcgatacttcgtctccaaaaaaaaaaaaaaaaaaaaaaaaagagagagactaacattctaacagacaaaacaaaaacaaaaaacaaaaaaacacattttacaaaacaataatctaagtgggcaagtaaatactggtgtgacatacatttttagggaaaaactagcaacatgttttgtggagataaatgtaaacacattttacacatacaaatcttttctggcatgggtacaaatgtaactaatcaagtgtaatttataaactataaaaaattttcatctagacaaagaagttattaaaagcattaacaagtagttgaaaatattatccctctaagtattagaaagttaaactgcagtaattaaaagtcatataagaatcaccatggcatagacatggtaggaaaagcattagctttggcgttcaaatattgactcattcacttaccagctgtgttctccagtcaaaaaacttcacctctttaatgtttggtttcatattttttaaaaggtataacaaaaacacctaccacagtgttggtgtgaagactcatttaaagttactagcacagtgtctagtatatacagttgctttgttacattaactccattcaatattctttctttccacaatcgtctgtcactcccggtagaactaagtgattttccatgctcctgcaatgacagcaaatttcccccagtctgctcttccatgaatatctcagacagagaagggtgccttctcatgtgatcaggagtgatgtagctttgagggtggacccaccattcctgccatattccttgggtaggctcatctatcacttgtcttaaaggaagatttgaaacataatagtttcctttgcgcttctgtggatgtctctgaaaaagctggcagggcacacactcttgcaaatttttcatgttgtaatcacccaccagtggtaataatagggttaattatatgaacccatatagtagtgtcatttaaagggaatttaaattctctcttgtccttactctgctccaccatcctccactgtgcttgaaatgcctatcattatccttattcttttgataccaggcatcactacaaaatgtatacacattacctagattttcaagaagtgaaatgtttagtaaccattatgatggaagctgggactaggtgacttattctaaatgtaacaattaccggtagagaatgggataaaggacaactgagtgtggatagagaaaggagaaatggaagagtttggagcacgggccattgcgatggacagacgccaccgcagagagcaaggtttacctgtgtggttggcattcttggaagtgctctggttctattggcagagatccttgctgttagcctcttgcctttcgcccaggctgaagacagagtgctttcccatggttctgtctttttctccaggcaacacttcctgatgactgatcaatattggggtaggaagtcttagacatcttactccagctcagatcagctctgatgggctgcaggctcagtttaggcttcccttgagatttcatcatggctttacttctccctctaccagtcctggttcttcatagccttccacaggtgtcagctgcaaaaaccctcccaagtaagcctcttgtatgctactctgtctcagagtccatttccttgggaacccaacctgctacagcctacttcacacttcttctcaaggctgtcttgaattcctccaacaatagacccgttattatgtgaaagtgtgaggctgggcccaagggatttctttacttattgagcagagcgaagtaacattaatttgtgttataaccactgaatgttctaattccatgaatttaaatgacgcacctgaacatatatgaggcctagattttgctgcatgtccgcaaacctattttgatcaaccagtactgaacttttccccttctcttatgattgtcaaataaccttgttatatgctaaaaataaaagattaaaaaacatacagtgcaaaaaagcaaacaaaagttagctaataatcaattctttgaacgaagcccagtgaaaccaagtttatcaactctatctgaaaataaaaatgtccaagaaaatgacaatcaaaacgattagtgcattaggataagtgtcgtctcttgtagatagataaaaactaaactgaaaccaaaagaatttccagagcaggcagtctctattctgtaacaaggttttctcatgatccagttattttaaggatacctgcaggatcccacaggttttctcagggatttgctggaagctgggaaagtgatgactctcattcactgttgccctgtttccttttccttgacaaattcagttaaccggatggcaagttgtttatgagcatgccttctcgttaagttgacaaaatcttgacaggagtaaaagataatcgaattctctttgtgaagtgatttatggttttaaaataagcagcttttcttgaaagtagtttaccgggttgggcaaaaagaggatgagtattaaaggtcattaggcattcaaggtaccacatttactttctacaatgcaagtagaagaaggggccccaccagtcattctgagacgtgtttccattttctgctactttttagtgagcccaaatgatggtagcaatgattgatttatctcaatcttcttgtatagctgctgaattttctctcatgagtttggctaaaattagagtgtgtgttagtagaatttatatttatagactattgatattattatgtgcattacccattttaaagatggaaacactgaagcccccagaaaggactggctaagctcttacaataagtgatggaatgagctttgaaaacacagggcttaggatttcaaatcaggctgttttccctcaccgcaccatggtgcttcactagcagaaattctttatttttttttttttcctttttttttttttttgagacagtgtctcgctctgtcccccaggccagagtgcagcggcgtgatctcgactcactgcaagctccgccttccgagttcacaccattctcctgcctcagtctcccgagtagctgggactacaggctcctgccaccacgcctggctaatattttgtatttttagtagagacgaggtttcaccgtgttagccaggatggtctcgatttcctgacctcgtgatccgcccgcctcggcctcccaaagtgctgggattacaggcgtgagccactgccccccacccactagcagaaattcttaacagttattgttatctaactacttgactagtgtagattctgctgtgagcttgtggtggttccttctgcagataaagcaaaggaaatctggaaatggccaacctgaatactttatttccaaaactgtatattttatcaggacagtaaggcaatcagtggagtaatgatccttccaaactgctgactacatctagaatcatgcaattattagtttttaataaagatcgtgaccaagctttccttgggaagtaaactttggtcaccacaatatacatagcaagtattaaatatcttgagaggttttctttaattgtttaattcataggaaagccactgggagccttctgggagccagaagcaaattaggagacacagaattatttaataataatggtaataatgactaagttctctcatcaaggtctgtaccatgattgaactacttgctgccataaattttttactattgaataaatatgctttgtgaatattccatacatttgctaagttctcactggtcaggttcagtctttgctattagagtcgagcatctctgcaaagagatttgagccccttgagtagaacataggccacatagtgtggcaaacacatcattagaaactgcctcctattcactctcttaatagcttgagagaattgtacacaaacgtttctaaaatacagatcctaccttaggcttttcggctgcacagctgaatcgcctctgtgaaaatcctgacctcgctttcttctggcctttcttccccgtgaccttgggcaagttgcttaaactgtagccataatttcctcatagatttggtatgagttaaaatgcatagaaagcatgtactacatctagtgcatttctccataatgtgggtggcaattattctaatcccttccacaaagtatttagtctatgacttatttctgcgaaaacccacgaaagtgaaaactaacaatagagaagccttttaaaaacctaacagcctccaaagactgaagaagagagcatggtgtttaatgccagggtggaaagctgtgacagtcagctttttccctggatatggcttattggtattcattattcccaattccttctatatgccttcctttctggatagaatcgatcacatttgctggactccattatgtttggattctatgtataaattaggttctaccaattacaggcacgtgtgcaggattttcaaggtagaagtgaagtggaaactctcttcttactaatgtcagtcttgggcccaagaggccatcaggcacggtgcccataatcagtgttttagtgtctggtcactatcttcagtggagtcaggtgatgtgaatagcagcaggagagacctgatttctggataaggactacagtagtacgtccttggacgcaacagtttaagaggtagttcctgatttattcccctcccctttccaattcattccctgattttgtgcacacctaatacttatattaaatacctctcctgctttgaataaatggaataatttctgtttcctgcattttatcttgttggattaagtatttgataataaaactgattgtgggtctacttacctaagggtataaatttgatattggttacctaaactgtctgaatttgaaagtagagacaatcttattcatgcataatggatcactgataatttttggcttgcaatgagaaaaaaaaatcagcagctgaaattattacctgagatcacctggaatgaagagcctattaaagccaaggctttggtgaccaatgtgattgcttcagaattttatgatgagaatgtaaatataataattgtgaggtaggctgaagcatgtatagaaagaaaacaacaaattcagagttttaaataactggctcaaggcaagtcagaggtccaaggagcatctatgattatctccgacactattttatttcttacagtttcaaggttgctgttgacaaaaaaaaaaaaaaagaaagaaagaaaaaaatggcacacagtgtctgatcttgtttattgctgaaatataatttcagttgaatcacaccctcatcaggtcttctctgtgaaaattagggcattgagtgagaaatatcagaaacccagagcattataatgggaatgttaggtaggtttaaattattctgactatactgaacccccaagtccgatgagccttctttgccagtagaactccttcatctctgttatataaggttgattctgcctttgtggggagaactaacttacctgaggtaactaatgtaaaatagcttgttctgatcacctcactgcctccaagtctagagttagagctcgttcccagtgtctcagtagggcttaaatatgaagtataaactgggaagaaaaggctaaaataacaacaaaaaaacggcaatagtttgttattttttatcaggagaaatctgcggactatgtatggcaacagactcaaagggaggtacaccaggtaggaaaaatcataaccagattgggccatattagccaatatgggtacatatactagagcctgcatgcaatgagcttacccaaccagctcagagtgattataattgttttgctttctggattggttgactgaaatctggactcaatggtgagtcacactaattgaagttgagatggaagaaattccttggcatattgtagaatctgaaatataggttgtatatttattagtcagtttggactgctgtaacaaaaataccatagactgagtggcttaaacaataaacatttattacttccaattcttgaggctgtgaagcccaagatcaagttgcctgcagatctggtgtctggtgatgctcctctttttgagttgtaaacaactgccctcagaaggctctctcctgtctctttttattaggtcattattctcaacatgagggctccacccttatggattaattgcctcccaaaggcctcatcttcaaacactattccactcggggctaggatgtcaacatatgaaatttaggggcacataaatatacagtccataacagggagataggaacattggagtaacccatcatatgattcactttaatgtctaaaaacatctcatgagagagttcagagggtatttcttttttttctttctttctttctttctttctttctttctttctttctttctttctttctttctttctttcttccttccttccttccttcctttctttcctttctcctttttcttttttttgttttgagacaggttctctctctgtcacccaggcaggaatgcagtggcgtgatctcagctcactgcaacctccgcctcctgggttcaagcgattctcctgcctcagcctcctgagtagctgggactacaggcgtgcaccaccacacctgactaatttttgtgtttttagtagagacggggtttcaccatattagccaggctgctctcaaactcctgacctcaggtgatccacccgcctcagcttcccaaatcgctgggtttacaggcgtgagccattgcacctggccagagggtgtttctttaaggcatttattaatgcattgatgaggactctcctcttttagatagagatgaaagtgtagatgctgcccacaaaatgtgctccctgtttaagtggggttggtggaatcctggagtgacagagaacaaacgacaacatttagtccagttgcagcagagtggttgtggtttttattataagcattaaaagtatagtagtaggaaactgtgtttaacctgttttcaagaatggataattgctcattatagcttcatgaataatatagatgttcagccaacttaagttgtacctgaattgtgcaaatgaaggaaagatgcaggtttggcaaattgaagccagactaattatcacaatgtagtatcattaacactcacacaattcccagattcaaggtgcagcagtggatatttctaagacgtcctcatttaacttgatttttttttttaatctatgaagtagttggctatgttttggagaatatacaattaatgtaagtttactcaggtggtaattccagttgctatggttgtggaagatatggtctctacttaaacaaattcaactgagctatggcatctccaatgcaactgtcaatttagaaatttctttctttttatctcaataggcaaagaacactaaagtagtctgctttcactttcattaacacgccccatggagatatcatgaattactctcaggcccttgattatcttatcataccagaggatgtcccacaggtctacagcttaataacatcatgtgactgaagtggaagaactggaaggaaaagataacctagaaactcagtaattcacatgcattcaagaaggtagaagaaaattctcactaaaactcagggacatgccaccttttgcaaatttctgggagtttagtccggcatgtctggaaatcctttccaaagaaactgggcctgttcttgatgggctccctggatgtttgaaggcaacatatactagttttagatgcgctgcttcgatactttggattcaatacttagtaatccctaaagctgtgaatttggagtttgttgctgaggaagagtagactctctagcttttccaggctgtggtccaggctgctgtctttgctacttggttacaatgatccagcaaattcaacggtgcataaaatgtttcaggcagatggtcatgcagtttgtaaaactttgccaatctcgtaggagattaatagcgtagagctctgtggttctgaagcaaaatcatgctttctttcttagattattaatctccttgtgagggacagttcttgtcttgctaatagaaatagatgccgaaagaggctcaactgttggctattggatcccgagtagtaatgcaactgaactgtaatcatgagttttgatcaaccaaccataaagttgagcttgggcagcagaactcctacatcaagtaaaaagtatatatatacacacatatgtgtgtatgtatatgtatacctatatatatgtatacatatgtatatatgtacacatgtgtatatatgtatatacatatatgtatacatgtgtatatatgtatacatgtgtatatatgtatatacatatatgtatatagaagtatatatacacatataaatgtgtgcgtgtatatatatatgattggctgagtgctctatttgttgcttgagcaggtgttcaccctcccacataaattcatcctacttaattggcactttttcttcaacccatacctgcttctcagagaaactatagagaagaggaaacttccaagtgagcaggtctttgaatggtacatctatttgttcactctgcttggaaacaaaggtttcactaagcatggatacaatttggatcattggtaataaggagacttagggaagaaatacgtgttaaggattgttcataagtggcagaacctatgagaatattcatgccacatgttatttcttttcagaagatcttcctagttgaggaatctttcagagattcagtagataaggtgatctattatatggatgtcaagctgtccttttccccagccaccctcctcacgtcttgctcaatgacttcatgaatgaaaagtttatgatagcaaagatgttggtaacatatgcattcaacaacatagttcatttggtagagtcaatactgagtacctaagagcccaattctgatactctcatattgcactattcactaggaggttcagcaatctatttagtggcaggtggtgacagtggatttcttctcttatggaaaggacaactatccatattgaaatagacaattactctgtatatagatttgcctgccttgtaaccatgcctttgcatctgtttacttacttaatgggacattattatggtgacccatacaacatcacttttaaacagtggatttatttatggcacagaggttaagaaaatgaactcaggccggtaagagtcactgttatcattcaccacaagttgcctgaagcaaccagcctttaaaatactataatggactgtggaaaaatcagttagagtgtcacttggatgaagctgtaattggaagttgaggacactgtcattcagaataagatgtatgatctgaattagtggccaatacctggccctttttgtctgtagttaaatgtgatgtgaggaaataccaaagctcatggtaatctcagatgtcattggacagagaagctcacagaccaaattaagatgctgaagtcagatgacttatgaatcaatttaaaacaaatcatgagaaggaagggaggaaaggatgaagtaggtttgcagtcctcttagaagaaggtaaaagtgggtagaatggaccatagtacttgaatcttgagttcagaatcagatattcttcctccttggcctcttctgtttcagggcttctcgaatttttttttcttttatttattttttgagatggagtcttgctctaccacccaggctggagtgcagtggcacaatcttggctcaatgcaacctccttctcccaggttcaaggaattctcctgccttagcctctcgagtagatgagattgcaggtgcccaccactacacccagctaatttttgttttttttggtagagatggggtttcaccatgttggccaggctggttctgcctcttgactttatcatccttcctctctgatggtatggttatgtggaccagaactgaagtttaaggaaggggcttaagatatggaagttgcctgggaccaacatactctgtccaagagacacagtgacacatacatgcacagctgaccaaagctatagcttcccaattacttgatgaacagctatgaatgttgtttctttttcttagacaaagtgcatatctgctcaagatggatgtcactaatgtgcaactgatccacaacctcatacaattttagtatctcatatgcttcgtgtacatgtcatgtatgaaggtgcctgaggtaccccatgtatatatagcatgttatgaatgttaggcatattttggtctttcctttctatctatgtttagtatgcacaagacatacttattttacctttgcttaatatgccttatagtttactaacttacttaacagaggagttttgttttcttgttatctgtagcagaattgaatgttgcccagcaatataatatatgtaaatcataccaaattatatgtgtttaaaactcaagggatggaactgggagagataacactcatttttcacctacgcatcactcacaatatttagctctccttccacatgatgttgggatatgatggcttagaagtcttactagtcaatggaagaatgtttctcttccaagaggacacaacaatgattcatttgaactctatgattgccactgaataatttggtctttccatgcctataagcaaagaagttacgtgtattaactggaacaattggtcctgattattaaggagagtaagtttttcctacaaagagatgtatgtatgggacccagggaattttacagaaacatctctaagaacttccatgcttttttgtcaagttaaatggacaactatcgcaaccacatacaggcagaaccactaagagtaaaaacccctcaggaattaggattcgggtcaccctgcttggcagagccctaattagtcacagtgctaggtgaggtcaaaagtaatatgaaataggaagaggataaacagtgtcataaacaactgtgatcttatggccagttgcagagtaagaaattaataactactcctgttctcttctttgccttgttatgcatgtactgactttttacctctttctttttccctacaattttataaaaatggtgatacatttgtaatttgtccctcaaattacagactatcagcttgaaactatgattggaattgaaggttaaagaaaacccagctatagattcagtgactaacaaaatttggggacagtgtaagcctcattctaattgcataaggaatagttactgtatgttaggcaggtgcatgttgttattgctacttttttcaagtctaagttctaggtacaaagtgtacactgtactggatttagtatttgacatctattttcacatccttctaggagtcatcttgtactaaagaagctgtaagcccacatgtgcatttcccagagtcccttgttgctagggggctgaatgcgaacgaggtttcaccattaaatatacttatacatttggaaaggcaaaaatgaggcagaggccatctttgtgttgctggtttgattagcaagtttgctaagacatgagtgtcaagggaagttgaggtggagatggtggctatatggtgcagctgttttcctgattcccagagagcaatcactcagatgtgctcttgtacttaatacttccactggcagtcccttttctttcctcttttagttcttcctataattttctaagtgtataattgcccattttccctaaatacctaggtaggttttatttcctaaactggacctcttaccaaacacagatgagatgtactgtctgccaccctaactgcccataggactccaccaaggatgccaactctaagtggtcatttacctctgtgattgtgtttttaatgcctgcctcccattaagttataagatccaggaatttaataatttattttgataaggacttaacacaatgcttggcacataagaggaattaaataacatttttctgaatgaatagattttaaaccatgtgtgagcagtcacagaattcactgatctattataatttaccaattcctttgcatcatagcacccatgcaaaatattttggctacagggagtgctccaattttgatactctccctgtcaatatgcctattaccccaatataatttaagattgacagggagagcatcagtattctgcagtctgattgcagaagcatatatgtaaaaatataccttttagaaatgattttagaatctggaaatttacaaactattaattttcttttctacagtttcctccagaaagcccctatgtatttattccggttaacaattttacttgagtagaaatcacttgactcaaattttgatgatttaatagctcattgaaagaactagcctgaagcagataaaatatgttgcagatgctgtaactcttatttgcatccattggtcttttggtttatgtgctttaataatttgaaaaacaagaagataatcaggaaccaagatggatatgtgtgtcttgaggcagaacttaattcaaaattgttcagtgttttgtcagatgaactccttaaccacatttgttatcagtagcacacaatatattggattaagtttttgaatgatgtgcaaagatgatgccagattgatcctaacaaacataaagctcagaatcaaaaccagaatgttgttttgatcatactggttttaggcaaaggattttaagataaattctttcatactggaatttgtgatactatccacacttttcctcactataaaatttaatgaaccttatatcattaatatttttgtgtcaatggtgagttcttcttttttctttacctgagttgtatcaacagtttcaaaggagagagagtgtttttggtaaaggcaataaattattttttaatgtacatcttatacacataaaatactttctcatattctgaagaatgaagcatttctgtcctaggtgattataaagtttgttgctatagtatttcattattttttattagaaaatattttaataacacaagaaagtaaagaaagtaatacaaggaacactcatgtacacatcaaccagctttgtctgaaattaatatcatcctaaatttgcttcattgcttttattcattaaaaattacaaatacaattgaagcccttgaacccctcacctgtcacactatcctctttgctttgtcaaatacttactacgttcatatgtattgatgtacagtatagccttattttacgtgttttaaatttatacataaacaatttcaaactctatgaatcattctacattttgctattttgtgttcaatatcctgttgtcgaaacatttccatgttcctttaattcattcattggcaatacagtataatatgttattgtatagatacatatatatttaaaatatataggtattttaattttactgtattatattgttgaacatttccactgttttacattttttagtatcataaactatccttcaatgaacactcttttaatgtcatctggtgtcaggtatgagagttcctaaacacacacagtgtatctagaatttgaattgctaaaattgaacattcaattttcatttttaactttactaaatactgtaaaattgttctctgtgtgccaattttctttaccactggtaaaatgtgagtttccactttcacatgcttgccatttcctattgcaaaacatttaagtatttatgtttgtgataaaaatggagtcttattttgattttaatttgtacttccccagttcctgttgtgtttaagtttgttttttatttatttattatctgttcatgattttcttcattttttctcttactggttcatattctctatacatgctgaatggtgttagctagctatattctttgcaataattattaaaattttctttttcttttctttttttaagagacaaggtcttaccctgtcatccaggctaggatgcagtagcacgatcttagcttactgtagactccaactcctgggctcaagagatactctcctgccttggtttcctaaagtgctgggattataggcctgagccactggcctgttttgtttttcttaatataaggctatacatttccctctaagaactaatttagctgcctccctcaatcttttatatgtaattttaagttaatattcagctttaaacttttctaattcaattatcttttttgattaatcaattgtttaggataatgtctcaaaacttttttggtatatagatatctttaattacatatttctaaattattttcatttaagtcaaaggacatagcctggaaagtattcgtttgtttgtgtgtgtgtgtgtgtgtgtgtgtgtgtatttgttgtgatttgtttttatgttttagcaatttggtcagttgctttaaattagagattttgcctgattgttatctacagaattctatgcaactccattacattaagctaatatcgcttcattttatctctcatcacattttgtttttgtttgtttgtgctgtgaattattgagataatgggttaaatgtatgtgcctgtgtccatttatttcaataatatcttatactatgactctatattattaattgggaagattttagaatacttaacgtatgttttctaattaagcagtgacccacttaatttctcagaagtacattttgttttattgctttaaactctattttgattgtttttaatctgatcatacagacttttattttggctgatattttcgttacttttttcttatttttatcctttctatgtctttatgattaaattgtgtgccttacaaggaggttttactttttccctcaatggatttggaagatatatgttctatttttatttctgttgttggtttcctgaaaatctcagcatgcatatttgacttaaattctaaaattaataaacactttcttaatttcctgaacaataaaaggaatttcaaacatattattggtcatcatcacctgcctattaaatatgctttcccactagggctggggctaatggaaaatacatcttaaaaagtcttctgtgtaaaacatgggactcaaaacaacactaggaaaatagcgtagatcagataattctcattaaatcagctgtttattaaaaaaagcaatgagcaaggaacaacaaagtctccttaggaggcaaaacaaagtattattaaaagtatgtttgatgttgctgaagattctttcataaacatattaaagtcaattataattctgtttttaatgaccttattagctcagatgatgttttaatgatttgagtttatgtattatttgaagaatctctaaatagcactattaagtgctctgatatgcagtaatatttatattgagaagcaacttttttaattgtttggggaaagacttctatttcttatgacatgcttccttttcattgaggaatacccaagataccaagttttctttcagaagtaatttgcattttccaccttgaagttgtatttgccattttgtttgttgccataggaaaattcttttttgagaatttttttcttataacgttcttcatctgattaaacaaacaaaaaacccatctttatttttagactaaaagcctttgaataaaatattatacaactttaaataaatttaagatgacattatgacttattaggccacagttaaatatgagcttcatctattagtgagtcaatcataggattttcacacatggcttttgttcacagtaagttatatcaattaagttgcttagaatgaacatatagctgaactaataagcatgaaatattttcactgatttataagaatccagaaattatcaatgagttttctttttctattatttaaaaaagtttttgcttggcaaatcttcccctctaggagattaaagtattttttgctcattaatcaatgtaagaacaccttactttacattcattgaactctgaggttatagaactgtgaacttttcgatttgttcggcttggggaatgtcatagttcattctgtgagtggaagttgcctttaaccacatgagaacaaataagggaatattaaggttttaactcaaggcagctgatatgcaatggctgggataatggccattacctaaaagaaagaaggcagcaaatggttccagacatttataattatgcatctgaagtcagaacaccttttctttttaaacattttcaatttgtgatctgcttgaggacttgtacatagataggctcaagatattttgagtcacatatgtaaatgaaatgttttgagcaaagttgtaaccctgcccacaaaatagctttgctagggaacagatgtaacttggagaagtaccaattttgtcattctagatgagaaatcttctggtgccatcaatgggatgcaatttggctagtcacacctgggtgaccaatatccggaggctctacgtcaagtcattgaacatggatggatgctccattaagtcatttaaaataaacttcctagcaagtgatctctagcatctcaatttaactgtatcctttggagatttaaggaaaactgacaaagctaaaaatacctctgctaggggatctattagtattctccacattgctactgaaacttgctgccttttcctagaagcacatgaaagaaaccctggtccaagcgaactgtctccttcaccaaagccaccttggagagagcccacacggagactggagatgtagactattaagagcactcagccacagagtcactttggttgtgtcacttaacctctgtgctcttctaagctccattcctggcttgtgttgcagggatgttttgaggatatgttgatgtgtgtgactccttctctgtgtgttgctattaaagacattaagaactgagctgagtaacaaactttctagaaatgaatgaagaaaacatagcaaaattatacctatttttttaaattgaagtacaaagaaactgtagctataattatctttcttgacactaacagtacatgattcctaaatgctattgctcacctcaagtcaatgtcactttgtattaatggatttagtgtcatgtatggtcttgttttttgaggtcgtctgatgaaatcagaatgatttcacttaaggcaaggcatattaaaatacaaattcgtaaagataataccttgatgtttatgtctatgccaaacttgctctgctgagttcctggtggaatgaaaagactgtctttttttaattgtgatttgtttatgactaacagcatggatttgagacagttatgaaaatgccatggtatcattctgtaaataactttgtctatgtaattgtagtgtatacttattattgacaacttgaagaaagtacataaagtacaaaataaaagttacccatattcttatcagccagatctaactaattttaccattttcatatctctgtgcatactcttaataaaaaatggtataatacatttaagca

SEQ ID NO: 7589 - DNA, 565 bp, Homo sapiens
  source 1..565: mol_type = unassigned DNA; mol_type = unassigned DNA
ttgtacgttcgaaacctgtcgccgtcacttgcgcgtttggcattatccattgtcaccgcggaggaacgagcgctcgagatatcatcagtgcccgcaaatctccgcgccaaggcgctgagctactcctttccgaggtgcgcctctggtcctccgtccctggtgcccagcagcggcgaggcggcatctccgctcccgccgccgtgtccaccgagccctgggatcagggtggcagttctcaacgatgggcaggagggacctcggcggcgacccctaaaacaataccatgccccgggatccccgctgctgccgcgccagcgtcttccctttccacctccctgaccctgtcggattcggatgagcccattgcaaggagaagacgcagccgtcagattttaatggacccgactgagattactgatgacttaattcacttcttgccagtgagaaaaggtagccatgtggtgagaaacttgaagacaggtaagacacggagacctttgggttgatggcaagatttggagggctgattatggcgcctttgatgtgaggaggtattcctgcaatc

SEQ ID NO: 7590 - DNA, 1049 bp, Homo sapiens
  source 1..1049: mol_type = unassigned DNA; mol_type = unassigned DNA
gtcgccgtcacttgcgcgtttggcattatccattgtcaccgcggaggaacgagcgctcgagatatcatcagtgcccgcaaatctccgcgccaaggcgctgagctactcctttccgaggtgcgcctctggtcctccgtccctggtgcccagcagcggcgaggcggcatctccgctcccgccgccgtgtccaccgagccctgggatcagggtggcagttctcaacgatgggcaggagggacctcggcggcgacccctaaaacaataccatgccccgggatccccgctgctgccgcgccagcgtcttccctttccacctccctgaccctgtcggattcggatgagcccattgcaaggagaagacgcagccgtcagagcgcctgcggaggtggcgaaggcttggagagcatacgaggcggaatccggatcgaacaggtaagacacggagacctttgggttgatggcaagatttggagggctgattatggcgcctttgatgtgaggaggtattcctgcaatccttccgagacacctaagctgcttttcagaagctatctcctgagcagtgtgtaattctctcctggctgtttgatggtaatgggagctgtacatgtatctggagagaggagaaccagcctggggactcaagatatattaaagactatgctcatggacatcaattctttcctgtcctttagggcagtattcaggccacacggttcaataacgggaaagaatgtcgtcacatgattgcatcatgttcttcaaaatgaaatctattgaacagtataaacaacaaagaacatcatttgtcagaatgacctgggggaaatagtccagtgaaactaagcaaagggaactttataccgtgagggaaaatcaatggattgtaacagaaccctgcaagaagagacatagctttcaagttccagagacctagaggtgactgagaagcaggatgtaccagaaactgggcttcttgttctacttatctagcgcccttttcacagtgttgtatatgtaaataaataataaagcagtgtgatttttaa

SEQ ID NO: 7591 - DNA, 3278 bp, Homo sapiens
  source 1..3278: mol_type = unassigned DNA; mol_type = unassigned DNA
catcagtgcccgcaaatctccgcgccaaggcgctgagctactcctttccgaggtgcgcctctggtcctccgtccctggtgcccagcagcggcgaggcggcatctccgctcccgccgccgtgtccaccgagccctgggatcagggtggcagttctcaacgatgggcaggagggacctcggcggcgacccctaaaacaataccatgccccgggatccccgctgctgccgcgccagcgtcttccctttccacctccctgaccctgtcggattcggatgagcccattgcaaggagaagacgcagccgtcaggtaaaaggggctgcgttgccagattgcagattgagcttaaccaagaagttcgtaggctaatcaaggctggcttgacctacaaaagaagaagagagttctgcctgcccacttgggcttgtgttgacacggctgataacttgccatcacctgttgccagtgtggaaaaattctccctgttgaattttttgcacatggaggacagcagcaaagagggcaacacaggctgataagaccagagacagcagggagattattttaccatacgccctcaggacgttccctctagctggagttctggacttcaacagaaccccatccagtcattttgattttgctgtttattttttttttctttttctttttcccaccacattgtattttatttccgtacttcagaaatgggcctacagaccacaaagtggcccagccatggggcttttttcctgaagtcttggcttatcatttccctggggctctactcacaggtgtccaaactcctggcctgccctagtgtgtgccgctgcgacaggaactttgtctactgtaatgagcgaagcttgacctcagtgcctcttgggatcccggagggcgtaactgtactctacctccacaacaaccaaattaataatgctggatttcctgcagaactgcacaatgtacagtcggtgcacacggtctacctgtatggcaaccaactggacgaattccccatgaaccttcccaagaatgtcagagttctccatttgcaggaaaacaatattcagaccatttcacgggctgctcttgcccagctcttgaagcttgaagagctgcacctggatgacaactccatatccacagtgggggtggaagacggggccttccgggaggctattagcctcaaattgttgtttttgtctaagaatcacctgagcagtgtgcctgttgggcttcctgtggacttgcaagagctgagagtggatgaaaatcgaattgctgtcatatccgacatggccttccagaatctcacgagcttggagcgtcttattgtggacgggaacctcctgaccaacaagggtatcgccgagggcaccttcagccatctcaccaagctcaaggaattttcaattgtacgtaattcgctgtcccaccctcctcccgatctcccaggtacgcatctgatcaggctctatttgcaggacaaccagataaaccacattcctttgacagccttctcaaatctgcgtaagctggaacggctggatatatccaacaaccaactgcggatgctgactcaaggggtttttgataatctctccaacctgaagcagctcactgctcggaataacccttggttttgtgactgcagtattaaatgggtcacagaatggctcaaatatatcccttcatctctcaacgtgcggggtttcatgtgccaaggtcctgaacaagtccgggggatggccgtcagggaattaaatatgaatcttttgtcctgtcccaccacgacccccggcctgcctctcttcaccccagccccaagtacagcttctccgaccactcagcctcccaccctctctattccaaaccctagcagaagctacacgcctccaactcctaccacatcgaaacttcccacgattcctgactgggatggcagagaaagagtgaccccacctatttctgaacggatccagctctctatccattttgtgaatgatacttccattcaagtcagctggctctctctcttcaccgtgatggcatacaaactcacatgggtgaaaatgggccacagtttagtagggggcatcgttcaggagcgcatagtcagcggtgagaagcaacacctgagcctggttaacttagagccccgatccacctatcggatttgtttagtgccactggatgcttttaactaccgcgcggtagaagacaccatttgttcagaggccaccacccatgcctcctatctgaacaacggcagcaacacagcgtccagccatgagcagacgacgtcccacagcatgggctccccctttctgctggcgggcttgatcgggggcgcggtgatatttgtgctggtggtcttgctcagcgtcttttgctggcatatgcacaaaaaggggcgctacacctcccagaagtggaaatacaaccggggccggcggaaagatgattattgcgaggcaggcaccaagaaggacaactccatcctggagatgacagaaaccagttttcagatcgtctccttaaataacgatcaactccttaaaggagatttcagactgcagcccatttacaccccaaatgggggcattaattacacagactgccatatccccaacaacatgcgatactgcaacagcagcgtgccagacctggagcactgccatacgtgacagccagaggcccagcgttatcaaggcggacaattagactcttgagaacacactcgtgtgtgcacataaagacacgcagattacatttgataaatgttacacagatgcatttgtgcatttgaatactctgtaatttatacggtgtactatataatgggatttaaaaaaagtgctatcttttctatttcaagttaattacaaacagttttgtaactctttgctttttaaatcttaaaaaaaaaaaagttgctgaagtactgtacagggttgtacaatgagaacccaatgccaaggcaaaaagaacgagtgatttttccttaggatacacatcaaccactttgctgttgaagctgtcagaataaattcctggtggtcagatgaaagggcagattaaatggactcatcagggtaagaggaataatatgggtaaaacaagaaatggcccgatagtttcacactattcctatacctccaggtccggaagacaggtaaaaaattctataatgtaagaatggaggtagttaccctgatttgaccctgtgtgggaaatgctgaaagcaccaggaggaagccggttcccgtgagataag

SEQ ID NO: 7592 - DNA, 559 bp, Homo sapiens
  source 1..559: mol_type = unassigned DNA; mol_type = unassigned DNA
tcgggcccctgggaagactccaggaggtgatggatgaactttgagctggtcattggtgaaagaacatggattagctgagcagaaaagaagaaggaatactggatgcatttcagaagctatctcctgagcagtgtgtaattctctcctggctgtttgatggtaatgggagctgtacatgtatctggagagaggagaaccagcctggggggcagtattcaggccacacggttcaataacgggaaagaatgtcgtcacatgattgcatcatgttcttcaaaatgaaatctattgaacagtataaacaacaaagaacatcatttgtcagaatgacctgggggaaatagtccagtgaaactaagcaaagggaactttataccgtgagggaaaatcaatggattgtaacagaaccctgcaagaagagacatagctttcaagttccagagacctagaggtgactgagaagcaggatgtaccagaaactgggcttcttgttctacttatctagcgcccttttcacagtgttgtatatgtaaataaataataaagcagtgtgattttt

SEQ ID NO: 7593 - DNA, 528 bp, Homo sapiens
  source 1..528: mol_type = unassigned DNA; mol_type = unassigned DNA
cgtgcaattagatcttcttgactaagaaaaaatgcagacaagcaattactccgttactttaattactctcctaattataacgataaccttgtcacattatcataattccccaaacagaaaaacgcatgctccaaattgcaccaatatttgataattttaccttgttaacggctcactgtcagtatgtagagcactacattttttccccattacctttctattgcacagtctatatttctttgcctcagaaaatgataatacattctgtacaacatgtttgtgttgcacaaccccgtgatttgaatatggctttttaacgtctcgcagtttcagaagctatctcctgagcagtgtgtaattctctcctggctgtttgatggtaatgggagctgtacatgtatctggagagaggagaaccagcctggggactcaagatatattaaagactatgctcatggacatcaattctttcctgtcctttagggcagtattcaggccacacggttcaataacgggaaagaatgtcgt

SEQ ID NO: 7594 - DNA, 566 bp, Homo sapiens
  source 1..566: mol_type = unassigned DNA; mol_type = unassigned DNA
taattacaaacagttttgtaactctttgctttttaaatcttaaaaaaaaaaaagttgctgaagtactgtacagggttgtacaatgagaacccaatgccaaggcaaaaagaacgagtgatttttccttaggatacacatcaaccactttgctgttgaagctgtcagaataaattcctggtggtcagatgaaagggcagattaaatggactcatcaggtgggatttctggctgctgaaaccactttgggccaggaagaacaaggatgaagaggttcctgtcatttcttatggggttcacagaattatttggggcttaaatggtacaatggagacagtcatgtgcaatgcttaagatggtctgacagggtcccttttgctggaggtgttcctgaagagattgaacctagtaacaggctttattttcaccttgtgtacaacatggcaaagactgctaagattaaaatccgtctcccatttgttacagcctcacctgcaccaggatagaaagcacgtgatggaatctgtgatgtctaatgtgtcttatgaaaattgccaaacaactgtccc

SEQ ID NO: 7595 - DNA, 3842 bp, Homo sapiens
  source 1..3842: mol_type = unassigned DNA; mol_type = unassigned DNA
acctgcagcgcgaggcgcgccgctccaggcggcatcgcagggctgggccggcgcggcctggggaccccgggctccggaggccatgccggcgttggcgcgcgacggcggccagctgccgctgctcgttgttttttctgcaatgatatttgggactattacaaatcaagatctgcctgtgatcaagtgtgttttaatcaatcataagaacaatgattcatcagtggggaagtcatcatcatatcccatggtatcagaatccccggaagacctcgggtgtgcgttgagaccccagagctcagggacagtgtacgaagctgccgctgtggaagtggatgtatctgcttccatcacactgcaagtgctggtcgacgccccagggaacatttcctgtctctgggtctttaagcacagctccctgaattgccagccacattttgatttacaaaacagaggagttgtttccatggtcattttgaaaatgacagaaacccaagctggagaatacctactttttattcagagtgaagctaccaattacacaatattgtttacagtgagtataagaaataccctgctttacacattaagaagaccttactttagaaaaatggaaaaccaggacgccctggtctgcatatctgagagcgttccagagccgatcgtggaatgggtgctttgcgattcacagggggaaagctgtaaagaagaaagtccagctgttgttaaaaaggaggaaaaagtgcttcatgaattatttgggacggacataaggtgctgtgccagaaatgaactgggcagggaatgcaccaggctgttcacaatagatctaaatcaaactcctcagaccacattgccacaattatttcttaaagtaggggaacccttatggataaggtgcaaagctgttcatgtgaaccatggattcgggctcacctgggaattagaaaacaaagcactcgaggagggcaactactttgagatgagtacctattcaacaaacagaactatgatacggattctgtttgcttttgtatcatcagtggcaagaaacgacaccggatactacacttgttcctcttcaaagcatcccagtcaatcagctttggttaccatcgtagaaaagggatttataaatgctaccaattcaagtgaagattatgaaattgaccaatatgaagagttttgtttttctgtcaggtttaaagcctacccacaaatcagatgtacgtggaccttctctcgaaaatcatttccttgtgagcaaaagggtcttgataacggatacagcatatccaagttttgcaatcataagcaccagccaggagaatatatattccatgcagaaaatgatgatgcccaatttaccaaaatgttcacgctgaatataagaaggaaacctcaagtgctcgcagaagcatcggcaagtcaggcgtcctgtttctcggatggatacccattaccatcttggacctggaagaagtgttcagacaagtctcccaactgcacagaagagatcacagaaggagtctggaatagaaaggctaacagaaaagtgtttggacagtgggtgtcgagcagtactctaaacatgagtgaagccataaaagggttcctggtcaagtgctgtgcatacaattcccttggcacatcttgtgagacgatccttttaaactctccaggccccttccctttcatccaagacaacatctcattctatgcaacaattggtgtttgtctcctcttcattgtcgttttaaccctgctaatttgtcacaagtacaaaaagcaatttaggtatgaaagccagctacagatggtacaggtgaccggctcctcagataatgagtacttctacgttgatttcagagaatatgaatatgatctcaaatgggagtttccaagagaaaatttagagtttgggaaggtactaggatcaggtgcttttggaaaagtgatgaacgcaacagcttatggaattagcaaaacaggagtctcaatccaggttgccgtcaaaatgctgaaagaaaaagcagacagctctgaaagagaggcactcatgtcagaactcaagatgatgacccagctgggaagccacgagaatattgtgaacctgctgggggcgtgcacactgtcaggaccaatttacttgatttttgaatactgttgctatggtgatcttctcaactatctaagaagtaaaagagaaaaatttcacaggacttggacagagattttcaaggaacacaatttcagtttttaccccactttccaatcacatccaaattccagcatgcctggttcaagagaagttcagatacacccggactcggatcaaatctcagggcttcatgggaattcatttcactctgaagatgaaattgaatatgaaaaccaaaaaaggctggaagaagaggaggacttgaatgtgcttacatttgaagatcttctttgctttgcatatcaagttgccaaaggaatggaatttctggaatttaagtcgtgtgttcacagagacctggccgccaggaacgtgcttgtcacccacgggaaagtggtgaagatatgtgactttggattggctcgagatatcatgagtgattccaactatgttgtcaggggcaatgcccgtctgcctgtaaaatggatggcccccgaaagcctgtttgaaggcatctacaccattaagagtgatgtctggtcatatggaatattactgtgggaaatcttctcacttggtgtgaatccttaccctggcattccggttgatgctaacttctacaaactgattcaaaatggatttaaaatggatcagccattttatgctacagaagaaatatacattataatgcaatcctgctgggcttttgactcaaggaaacggccatccttccctaatttgacttcgtttttaggatgtcagctggcagatgcagaagaagcgatgtatcagaatgtggatggccgtgtttcggaatgtcctcacacctaccaaaacaggcgacctttcagcagagagatggatttggggctactctctccgcaggctcaggtcgaagattcgtagaggaacaatttagttttaaggacttcatccctccacctatccctaacaggctgtagattaccaaaacaagattaatttcatcactaaaagaaaatctattatcaactgctgcttcaccagacttttctctagaagctgtctgcgtttactcttgttttcaaagggacttttgtaaaatcaaatcatcctgtcacaaggcaggaggagctgataatgaactttattggagcattgatctgcatccaaggccttctcaggctggcttgagtgaattgtgtacctgaagtacagtatattcttgtaaatacataaaacaaaagcattttgctaaggagaagctaatatgattttttaagtctatgttttaaaataatatgtaaatttttcagctatttagtgatatattttatgggtgggaataaaatttctactacagaattgcccattattgaattatttacatggtataattagggcaagtcttaactggagttcacgaaccccctgaaattgtgcacccatagccacctacacattccttccagagcacgtgtgcttttaccccaagatacaaggaatgtgtaggcagctatggttgtcacagcctaagatttctgcaacaacaggggttgtattgggggaagtttataatgaataggtgttctaccataaagagtaatacatcacctagacactttggcggccttcccagactcagggccagtcagaagtaacatggaggattagtattttcaataaagttactcttgtccccaca

SEQ ID NO: 7596 - DNA, 3634 bp, Homo sapiens
  source 1..3634: mol_type = unassigned DNA; mol_type = unassigned DNA
acctgcagcgcgaggcgcgccgctccaggcggcatcgcagggctgggccggcgcggcctggggaccccgggctccggaggccatgccggcgttggcgcgcgacggcggccagctgccgctgctcgttgttttttctgcaatgatatttgggactattacaaatcaagatctgcctgtgatcaagtgtgttttaatcaatcataagaacaatgattcatcagtggggaagtcatcatcatatcccatggtatcagaatccccggaagacctcgggtgtgcgttgagaccccagagctcagggacagtgtacgaagctgccgctgtggaagtggatgtatctgcttccatcacactgcaagtgctggtcgacgccccagggaacatttcctgtctctgggtctttaagcacagctccctgaattgccagccacattttgatttacaaaacagaggagttgtttccatggtcattttgaaaatgacagaaacccaagctggagaatacctactttttattcagagtgaagctaccaattacacaatattgtttacagtgagtataagaaataccctgctttacacattaagaagaccttactttagaaaaatggaaaaccaggacgccctggtctgcatatctgagagcgttccagagccgatcgtggaatgggtgctttgcgattcacagggggaaagctgtaaagaagaaagtccagctgttgttaaaaaggaggaaaaagtgcttcatgaattatttgggacggacataaggtgctgtgccagaaatgaactgggcagggaatgcaccaggctgttcacaatagatctaaatcaaactcctcagaccacattgccacaattatttcttaaagtaggggaacccttatggataaggtgcaaagctgttcatgtgaaccatggattcgggctcacctgggaattagaaaacaaagcactcgaggagggcaactactttgagatgagtacctattcaacaaacagaactatgatacggattctgtttgcttttgtatcatcagtggcaagaaacgacaccggatactacacttgttcctcttcaaagcatcccagtcaatcagctttggttaccatcgtagaaaagggatttataaatgctaccaattcaagtgaagattatgaaattgaccaatatgaagagttttgtttttctgtcaggtttaaagcctacccacaaatcagatgtacgtggaccttctctcgaaaatcatttccttgtgagcaaaagggtcttgataacggatacagcatatccaagttttgcaatcataagcaccagccaggagaatatatattccatgcagaaaatgatgatgcccaatttaccaaaatgttcacgctgaatataagaaggaaacctcaagtgctcgcagaagcatcggcaagtcaggcgtcctgtttctcggatggatacccattaccatcttggacctggaagaagtgttcagacaagtctcccaactgcacagaagagatcacagaaggagtctggaatagaaaggctaacagaaaagtgtttggacagtgggtgtcgagcagtactctaaacatgagtgaagccataaaagggttcctggtcaagtgctgtgcatacaattcccttggcacatcttgtgagacgatccttttaaactctccaggccccttccctttcatccaagacaacatctcattctatgcaacaattggtgtttgtctcctcttcattgtcgttttaaccctgctaatttgtcacaagtacaaaaagcaatttaggtatgaaagccagctacagatggtacaggtgaccggctcctcagataatgagtacttctacgttgatttcagagaatatgaatatgatctcaaatgggagtttccaagagaaaatttagagtttgggaaggtactaggatcaggtgcttttggaaaagtgatgaacgcaacagcttatggaattagcaaaacaggagtctcaatccaggttgccgtcaaaatgctgaaagaaaaagcagacagctctgaaagagaggcactcatgtcagaactcaagatgatgacccagctgggaagccacgagaatattgtgaacctgctgggggcgtgcacactgtcaggaccaatttacttgatttttgaatactgttgctatggtgatcttctcaactatctaagaagtaaaagagaaaaatttcacaggacttggacagagattttcaaggaacacaatttcagtttttaccccactttccaatcacatccaaattccagtaaaaagaaatgagctttacaaaggcaaactggaaaaaagaaggatggtgaaacgcttacgggactctcgggaagatctgtattatgtgagggaaagtgggctgagttcagaaaccaaagaatgagatcgatcatgcctggttcaagagaagttcagatacacccggactcggatcaaatctcagggcttcatgggaattcatttcactctgaagatgaaattgaatatgaaaaccaaaaaaggctggaagaagaggaggacttgaatgtgcttacatttgaagatcttctttgctttgcatatcaagttgccaaaggaatggaatttctggaatttaagtcgtgtgttcacagagacctggccgccaggaacgtgcttgtcacccacgggaaagtggtgaagatatgtgactttggattggctcgagatatcatgagtgattccaactatgttgtcaggggcaatgcccgtctgcctgtaaaatggatggcccccgaaagcctgtttgaaggcatctacaccattaagagtgatgtctggtcatatggaatattactgtgggaaatcttctcacttggtgtgaatccttaccctggcattccggttgatgctaacttctacaaactgattcaaaatggatttaaaatggatcagccattttatgctacagaagaaatatacattataatgcaatcctgctgggcttttgactcaaggaaacggccatccttccctaatttgacttcgtttttaggatgtcagctggcagatgcagaagaagcgatgtatcagaatgtggatggccgtgtttcggaatgtcctcacacctaccaaaacaggcgacctttcagcagagagatggatttggggctactctctccgcaggctcaggtcgaagattcgtagaggaacaatttagttttaaggacttcatccctccacctatccctaacaggctgtagattaccaaaacaagattaatttcatcactaaaagaaaatctattatcaactgctgcttcaccagacttttctctagaagctgtctgcgtttactcttgttttcaaagggacttttgtaaaatcaaatcatcctgtcacaaggcaggaggagctgataatgaactttattggagcattgatctgcatccaaggccttctcaggctggcttgagtgaattgtgtacctgaagtacagtatattcttgtaaatacataaaacaaaagcattttgctaaggagaagctaatatgattttttaagtctatgttttaaaataatatgtaaatttttcagctatttagtgatatattttatgggtgggaataaaatttctactacagaa

SEQ ID NO: 7597 - DNA, 474 bp, Homo sapiens
  source 1..474: mol_type = unassigned DNA; mol_type = unassigned DNA
gccatccttccctaatttgacttcgtttttaggatgtcagctggcagatgcagaagaagcgaaactgtggaaaatccctgagacaatgaaagcagttaaaattgcactgcagagggaaaacccaccacagaggatgcctgggaaaaacaaggacaagggtaacacaaaggcagcaagaagtcctgggacactgcagaagttctgaagcaggagcagccacatggtgaaatcaacataagattaaatatgtatcagaatgtggatggccgtgtttcggaatgtcctcacacctaccaaaacaggcgacctttcagcagagagatggatttggggctactctctccgcaggctcaggtcgaagattcgtagaggaacaatttagttttaaggacttcatccctccacctatccctaacaggctgtagattaccaaaacaagattaatttcatcactaaaagaaaatctattatcaa

SEQ ID NO: 7598 - DNA, 393 bp, Homo sapiens
  source 1..393: mol_type = unassigned DNA; mol_type = unassigned DNA
ctcggtgcggagaagatgtgcccctccaatccccaggccgtgatccccttcacccagacccggccaatccctcgcccgaggcgagcgggaggatgcggttctaggacccggaggcgccgccgagcgcgccgccgcctcggcctcgcctcggtggcctcccgctccggcaggtgaagcggcgccggccgccccctctgcggcagctcgccgcccggtcccacggacggggccgccccgatgggacgccgcgctccggcccctgcgcgccgctgagccgagcgccccccgctgccgagacccccgccgccaccgccagccgctgccccctcgcccccgcccgggccgggagcctcgtccccgtcccccggaaagctggatttccgaggctggagg

SEQ ID NO: 7599 - DNA, 4101 bp, Homo sapiens
  source 1..4101: mol_type = unassigned DNA; mol_type = unassigned DNA
gagcgacagcagaagttcgaaaatcgccgaggggggagccagcgccgcagcttcctgcccccggcccagccctctggccccggcggcctgcagcctgacttcctcccccaaccctgcagctcgccgcccggtcccacggacggggccgccccgatgggacgccgcgctccggcccctgcgcgccgctgagccgagcgccccccgctgccgagacccccgccgccaccgccagccgctgccccctcgcccccgcccgggccgggagcctcgtccccgtcccccggaaagctggatttccgaggctggaggcgcctggccggctgggtggggaccaccatgggcaacgcggccggcagcgccgagcagcccgcgggccccgccgcgccgccccccaagcagcccgcgcctcccaagcagccgatgcccgcggccggagagctggaggagaggttcaaccgcgccctgaactgcatgaacttgcccccagacaaggtccagctgctgagccagtatgacaacgagaagaagtgggagctcatctgtgatcaggagcggtttcaagtcaagaatccccccgcagcctacatccagaagctgaagagctatgtggatactggtggggtcagccgaaaggtagcagctgattggatgtccaacctggggtttaagaggcgagttcaggagtccacgcaggtgctacgggagctggagacctccctgaggaccaaccacattgggtgggtgcaggagttcctcaatgaagagaaccgtggcctggatgtgctgctcgagtacctggcctttgcccagtgctctgtcacgtatgacatggagagcacagacaacggggcttccaactcagagaaaaacaagcccctggagcagtctgtggaagacctcagcaagggtccaccctcctccgtgcccaaaagccgccacctgaccatcaagctgaccccagcccacagcaggaaggccctgcggaattcccgcatcgtcagccagaaggacgacgtccacgtctgtattatgtgcctacgcgccatcatgaactaccagtctggcttcagccttgtcatgaaccacccagcctgtgtcaatgagattgctctgagcctcaacaacaagaaccccagaaccaaggctctggtgctggagctgctggcggccgtgtgcttggtgcggggaggacatgacatcatccttgcagcctttgacaacttcaaggaggtgtgtggggagcagcaccgctttgaaaagctgatggaatatttccggaatgaggacagcaacatcgacttcatggtggcctgcatgcagttcatcaacattgtggtacattcggtggagaacatgaacttccgtgtcttcctgcaatatgagttcacccacttgggcctggacctgtacttggagaggcttcggctcaccgagagtgacaagctgcaggtgcagatccaggcgtacctggacaatatttttgatgtgggggcgctgctggaggacacagagaccaagaacgctgtgctggagcacatggaggaactgcaggagcaagtggcgctgctgacagagcggcttcgggacgcggagaacgaatccatggccaagattgcagaactggaaaaacagctaagccaggcgcgcaaggagttggagaccctgcgggagcgcttcagcgaatcgaccgccatggggccctccaggcgtcccccagagcctgagaaagcgcctcccgctgccccgacgcggccctcggccctggagctgaaggtggaggagctggaggagaaggggttaatccgtattctgcgggggccgggggatgctgtctccatcgagatcctccccgtcgctgtggcaactccgagcggcggtgatgctccgactccgggggtgccgaccggctcccccagcccagatctcgcacctgcagcagagccggctcccggagcagcgccaccgccgccgcccccactgcccggcctcccctccccgcaggaagccccgccctctgcgcccccacaggccccgcctctccctggcagcccggagcccccgcctgcgccgccgctgcccggagacctgccgcccccacccccgccaccgccaccacctccgggcactgacgggccggtgcctccgccgccgccgccgccgccgccgcctcccggaggtcctcctgatgccctaggaagacgcgactcagaattgggcccaggagtgaaggccaagaagcccatccagactaagttccgaatgccactcttgaactgggtggcactgaaacccagccagatcaccggcactgtcttcacagagctcaatgatgagaaggtgctgcaggagctagacatgagtgattttgaggaacagttcaagaccaagtcccaaggccccagcctggacctcagcgctctcaagagtaaggcagcccagaaggcccccagcaaggcgacactcattgaggccaaccgggccaagaacttggccatcaccctgcggaagggcaacctgggggccgagcgcatctgccaagccattgaggcgtacgacctgcaggctctgggcctggacttcctggagctgctgatgcgcttcctgcccacagagtatgagcgcagcctcatcacccgctttgagcgggagcagcggccaatggaggagctgtcagaggaggaccgcttcatgctatgcttcagccgcatcccgcgcctgccggagcgcatgaccacactcaccttcctgggcaacttcccggacacagcccagctgctcatgccgcaactgaatgccatcattgcagcctcaatgtccatcaagtcctctgacaaactccgccagatcctggagattgtcctggcctttggcaactacatgaacagtagcaagcgtggggcagcctatggcttccggctccagagcctggatgcgctgttggagatgaagtcgactgatcgcaagcagacgctgctgcactacctggtgaaggtcattgctgagaagtacccgcaactcacaggcttccacagcgacctgcacttcctggacaaggcgggctcagtgtccctggacagtgtcctggcggacgtgcgctccctgcagcgaggcctagagttgacacagagagagtttgtgcggcaggatgactgcatggtgctcaaggagttcctgagggccaactcgcccaccatggacaagctgctggcagacagcaagacggctcaggaggcctttgagtctgtggtggagtacttcggagagaaccccaagaccacatccccaggcctgttcttctccctctttagccgcttcattaaggcctacaagaaagctgagcaggaggtggaacagtggaaaaaagaagccgctgcccaggaggcaggcgctgataccccgggcaaaggggagcccccagcacccaagtcaccgccaaaggcccggcggccacagatggacctcatctctgagctgaaacggaggcagcagaaggagccactcatttatgagagcgaccgtgatggggccattgaagacatcatcacagtgatcaagacggtgcccttcacggcccgcaccggcaagcggacatcccggctcctctgtgaggccagcctgggagaagagatgcccctctagcccctcagatctgcggaaccagccctacatccgcgcagacacaggccgccgcagtgcccgtcggcgtcccccgggccccccactgcaggtcacctccgacctctcgctgtagccgctatttctgcaggtggattctgcaggggtgtggggccgtggacaggctgaggctcaaggaaggtggtcctcagctcggctggccgggcagcccctcctccgctgtggcccgcctcaaacgggctggtgcatcctcctcttggccacagagggcagcatcgcccgccccttcccccaaatgctgcttgcagcacccaccctaaagccccctccaaatagccatacttagcctcagcaggagcctggcctgtaacttataaagtgcacctcgcccccgcaagccccagccccgaggaccgtccatggaccttatttttatatgagattaataaagatgtttgcaaaaga

SEQ ID NO: 7600 - DNA, 877 bp, Homo sapiens
  source 1..877: mol_type = unassigned DNA
ggagctcatctgtgatcaggagcggtttcaagtcaagaatccccccgcagcctacatccagaagctgaagagctatgtggatactggtggggtcagccgaaagtttaagaggcgagttcaggagtccacgcaggtgctacgggagctggagacctccctgaggaccaaccacattgggtgggtgcaggagttcctcaatgaagagaaccgtggcctggatgtgctgctcgagtacctggcctttgcccagtgctctgtcacgtatgacatggagagcacagacaacggggcttccaactcagagaaaaacaagcccctggagcagtctgtggaagacctcagcaagggtccaccctcctccgtgcccaaaagccgccacctgaccatcaagtatgtgggccacaaagtggggtggtgggagaacagagaattcagcccccacactgctgcatctagccagcccaccccgggcccttggggttggcgagaggggtagccatgcattaggggtccgagtaagggactcatacagagtttgggacaccagtatgttaagaagccatcaggggtggggctgggtgctgtggctcatgcctgtaatcccagcactttgggagactgaggtgggcagatcatttgaggacatgagtttgagaccagcctggctaacatggtgaaaccccatctctactaaaatacaaaaattagccgggtgtggtggtgcacgcctgtaatcctagctactcaggaagctgaggtgggagaatcgctggagcccaggggatggaggttgcagtgagctgagatcgcaccactgcactgcagcctgggtgacagagtgagaccctgtctcaaaaaaaaaaaaaaaaaaaaaaaa

SEQ ID NO: 7601 - DNA, 888 bp, Homo sapiens
  source 1..888: mol_type = unassigned DNA
gcagcagtccaggggagcggtttcaagtcaagaatccccccgcagcctacatccagaagctgaagagctatgtggatactggtggggtcagccgaaaggtagcagctgattggatgtccaacctggggtttaagaggcgagttcaggagtccacgcaggtgctacgggagctggagacctccctgaggaccaaccacattgggtgggtgcaggagttcctcaatgaagagaaccgtggcctggatgtgctgctcgagtacctggcctttgcccagtgctctgtcacgtatgacatggagagcacagacaacggggcttccaactcagagaaaaacaagcccctggagcagtctgtggaagacctcagcaagggtccaccctcctccgtgcccaaaagccgccacctgaccatcaagtgtcccccttctccccggctgaccccagcccacagcaggaaggccctgcggaattcccgcatcgtcagccagaaggacgacgtccacgtctgtattatgtgcctacgcgccatcatgaactaccagtctggcttcagccttgtcatgaaccacccagcctgtgtcaatgagattgctctgagcctcaacaacaagaaccccagaaccaaggctctggtgctggagctgctggcggccgtgtgcttggtgcggggaggacatgacatcatccttgcagcctttgacaacttcaaggaggtgtgtggggagcagcaccgctttgaaaagctgatggaatatttccggaatgaggacagcaacatcgacttcatggtggcctgcatgcagttcatcaacattgtggtacattcggtggagaacatgaacttccgtgtcttcctgcaatatgagttcacccacttgggcctggacc

SEQ ID NO: 7602 - DNA, 742 bp, Homo sapiens
  source 1..742: mol_type = unassigned DNA
catgtatggatgtgtggatattctatgtctgtatttagagtgcaggtatatggatgttcatgtgctgtgtgtgtgtgtgcgcacacacactctgcctctttgtgtgtgtgcatgtgtataccttgtgtgcccatgtatcgggggtgtgtgtaccctgcttgtctatgtatgggggagcacatgtagcctgtgagttcttattctgctgggcaggtgtgtggaggtggtgggggaggctgagcatgaaaggccacttgtgccagttggaggagggtgggcgctgctgcctgctgcctcaggacttggtgggcctgtgggaggccgggctccacccaccagccttccctgttctcggtccccagtttaagaggcgagttcaggagtccacgcaggtgctacgggagctggagacctccctgaggaccaaccacattgggtgggtgcaggagttcctcaatgaagagaaccgtggcctggatgtgctgctcgagtacctggcctttgcccagtgctctgtcacgtaagccccctgctcccagccctcatgccgctcctcagagctttgatccccgtctccctgcatctcacccactcccctggccagtttcaagccaggcagcccgagcctaccctggaaccctccacttggccttgagcgatgctccttccagaaggcctgcccccgacagggaggggtggcctctcttccaccactatgttcagcacagtgccaagaacacag

SEQ ID NO: 7603 - DNA, 4919 bp, Homo sapiens
  source 1..4919: mol_type = unassigned DNA
aggcctgcccccgacagggaggggtggcctctcttccaccactatgttcagcacagtgccaagaacacagcctcctcctcctgctccttagtctcacctgcaggtctgtctctccttgcgtttcctctgccccctcttaagtggcccctgcagtgttggcctccagccccattgcatcctgtccccaggtatgacatggagagcacagacaacggggcttccaactcagagaaaaacaagcccctggagcagtctgtggaagacctcagcaagggtccaccctcctccgtgcccaaaagccgccacctgaccatcaagctgaccccagcccacagcaggaaggccctgcggaattcccgcatcgtcagccagaaggacgacgtccacgtctgtattatgtgcctacgcgccatcatgaactaccagtctggcttcagccttgtcatgaaccacccagcctgtgtcaatgagattgctctgagcctcaacaacaagaaccccagaaccaaggctctggtgctggagctgctggcggccgtgtgcttggtgcggggaggacatgacatcatccttgcagcctttgacaacttcaaggaggtgtgtggggagcagcaccgctttgaaaagctgatggaatatttccggaatgaggacagcaacatcgacttcatggtggcctgcatgcagttcatcaacattgtggtacattcggtggagaacatgaacttccgtgtcttcctgcaatatgagttcacccacttgggcctggacctgtacttggagaggcttcggctcaccgagagtgacaagctgcaggtgcagatccaggcgtacctggacaatatttttgatgtgggggcgctgctggaggacacagagaccaagaacgctgtgctggagcacatggaggaactgcaggagcaagtggcgctggtgagagtgggtcctgaccccagcccagcacatcataggcccacagggcacacgggccacagggccacgcaagcatgggcactgggcagcagacagtgttataattgtgcattggaggtgctgcctgcctggccccagagcctggcctgaatccaaagcctgaatctgttgggtgtctttctcaatgagtgtgggtgagcaccctcactgacaggcccctcctctacccaggctcagaccccaggtgaactgaaatgggtgcctggggcccctcccagctcagtctcctcctctccctccacctcccgcatcactggtaccttggtttcctctccttatttgcttgggttcgagtgccaggctcggcccacccttggcacctgggctgagcggatctgggagcctcccccagtcttccaggcaggcatgcctgatgccgccccctcaccggcggtgccagtgccgggctgcgggtcggggctcaccatgtgctggtgctacagctgacagagcggcttcgggacgcggagaacgaatccatggccaagattgcagaactggaaaaacagctaagccaggcgcgcaaggagttggagaccctgcgggtgaggctggggcgggtggtaggccaggcgcccaagaacaggccagctgaggcttctaggcttgacatctccctccaccccgggaagaagatggaggcttggtgccaaggagcctgctggtgggcactgacccctcccgtggggttcgtaggagcgcttcagcgaatcgaccgccatggggccctccaggcgtcccccagagcctgagaaagcgcctcccgctgccccgacgcggccctcggccctggagctgaaggtggaggagctggaggagaaggggttaatccgtattctgcgggggccgggggatgctgtctccatcgagatcctccccgtcgctgtggcaactccgagcggcggtgatgctccgactccgggggtgccgaccggctcccccagcccaggtgcgcaggagcttcaggctggcggggatgcggggcagggtctggaggggagcccaggggcatctgtggcgggcagagttgggcgagggaggtttggattgtaggctcggctcaggtaggagcgcatgcgtagagcggagaggcggagaggggcccacccaagtcaaggagctgactcgcgcctcccccacgccgcgccctcgctggctcagatctcgcacctgcagcagagccggctcccggagcagcgccaccgccgccgcccccactgcccggcctcccctccccgcaggaagccccgccctctgcgcccccacaggccccgcctctccctggcagcccggagcccccgcctgcgccgccgctgcccggagacctgccgcccccacccccgccaccgccaccacctccgggcactgacgggccggtgcctccgccgccgccgccgccgccgccgcctcccggaggtcctcctgatgccctaggaagacgcgactcagaattgggcccaggagtgaaggccaagaagcccatccagactaagttccgaatgccactcttgaactgggtggcactgaaacccagccagatcaccggcactgtcttcacagagctcaatgatgagaaggtgctgcaggagctagacatgagtgattttgaggaacagttcaagaccaagtcccaaggccccagcctggacctcagcgctctcaagagtaaggcagcccagaaggcccccagcaaggcgacactcattgaggccaaccgggccaagaacttggccatcaccctgcggaagggcaacctgggggccgagcgcatctgccaagccattgaggcgtacgacctgcaggctctgggcctggacttcctggagctgctgatgcgcttcctgcccacagagtatgagcgcagcctcatcacccgctttgagcgggagcagcggccaatggaggagctgtcagaggaggaccgcttcatgctatgcttcagccgcatcccgcgcctgccggagcgcatgaccacactcaccttcctgggcaacttcccggacacagcccagctgctcatgccggtgtgggcggagcgggcagggcggtgtgacttgggaggggatgggcaggaggcaactcccagcctgggctgcggcagggaacctgggagtacttgagcctccagatggaggaggctccaacttatcttacctcccccatcccacccccagcaactgaatgccatcattgcagcctcaatgtccatcaagtcctctgacaaactccgccagatcctggagattgtcctggcctttggcaactacatgaacagtagcaagcgtggggcagcctatggcttccggctccagagcctggatgcgctgttggagatgaagtcgactgatcgcaagcagacgctgctgcactacctggtgaaggtcattgctgagaagtacccgcaactcacaggcttccacagcgacctgcacttcctggacaaggcgggctcagtgtccctggacagtgtcctggcggacgtgcgctccctgcagcgaggcctagagttgacacagagagagtttgtgcggcaggatgactgcatggtgctcaaggagttcctgagggccaactcgcccaccatggacaagctgctggcagacagcaagacggctcaggaggcctttgagtctgtggtggagtacttcggagagaaccccaagaccacatccccaggcctgttcttctccctctttagccgcttcattaaggcctacaagaaagctgagcaggaggtggaacagtggaaaaaagaagccgctgcccaggaggcaggcgctgataccccgggcaaaggggagcccccagcacccaagtcaccgccaaaggcccggcggccacagatggacctcatctctgagctgaaacggaggcagcagaaggagccactcatttatgagagcgaccgtgatggggccattgaagacatcatcacaggtaagggcttggccaggccttggtcttatcctcagtctgtccttctatgctttcttctgacccaatgcgctatcctctgggggactggctgccacactgcttcttgctaccttttctgtttttctttcctttttcctttctctactccccttcacctgccccacccccactcagtgatcaagacggtgcccttcacggcccgcaccggcaagcggacatcccggctcctctgtgaggccagcctgggagaagagatgcccctctagcccctcaggtacccagatgacctggcctctgataccacgctgcccacagcccctgggacccttgggagaactgaggcatgctgccttctcctgggccagtggatggctgggatgtgatttgtggggtggaggggtctggcaaacataaacggtacccctgccatgtgcacacaatctgagtccttaggaggctaagctttgtgccctggagccatgctcccagctctgggcggactcctgaatggtaaatgtgtctccttcggctgccagatctgcggaaccagccctacatccgcgcagacacaggccgccgcagtgcccgtcggcgtcccccgggccccccactgcaggtcacctccgacctctcgctgtagccgctatttctgcaggtggattctgcaggggtgtggggccgtggacaggctgaggctcaaggaaggtggtcctcagctcggctggccgggcagcccctcctccgctgtggcccgcctcaaacgggctggtgcatcctcctcttggccacagagggcagcatcgcccgccccttcccccaaatgctgcttgcagcacccaccctaaagccccctccaaatagccatacttagcctcagcaggagcctggcctgtaacttataaagtgcacctcgcccccgcaagccccagccccgaggaccgtccatggaccttatttttatatgagattaataaagatgtttgcaaaag

SEQ ID NO: 7604 - DNA, 580 bp, Homo sapiens
  source 1..580: mol_type = unassigned DNA; mol_type = unassigned DNA
tggagagcacagacaacggggcttccaactcagagaaaaacaagcccctggagcagtctgtggaagacctcagcaagggtccaccctcctccgtgcccaaaagccgccacctgaccatcaagctgaccccagcccacagcaggaaggccctgcggaattcccgcatcgtcagccagaaggacgacgtccacgtctgtattatgtgcctacgcgccatcatgaactaccaggtcagccgaggggcatgggactggcgactagggagcccagcctgtcctcactgggggctacacaagctgccgaggctctgggatccactgtccctttaccctgtgctgtgctggggaacttgcgcatctgggctgttggctcaggcttttaaggctgatgagtcttgaggggaagcccatgtttttgctgcctctgtcaggttctctgagtacccctgcccatggctgggcatgaaggagcctcacatagggactgggctcacctaccaagaagggctggccggagggccaggggagaacagcctcgggtcgattcatttggagggctgatgggtgaagctgggtcctcc

SEQ ID NO: 7605 - DNA, 2487 bp, Homo sapiens
  source 1..2487: mol_type = unassigned DNA; mol_type = unassigned DNA
ggcggtgccagtgccgggctgcgggtcggggctcaccatgtgctggtgctacagctgacagagcggcttcgggacgcggagaacgaatccatggccaagattgcagaactggaaaaacagctaagccaggcgcgcaaggagttggagaccctgcgggagcgcttcagcgaatcgaccgccatggggccctccaggcgtcccccagagcctgagaaagcgcctcccgctgccccgacgcggccctcggccctggagctgaaggtggaggagctggaggagaaggggttaatccgtattctgcgggggccgggggatgctgtctccatcgagatcctccccgtcgctgtggcaactccgagcggcggtgatgctccgactccgggggtgccgaccggctcccccagcccagatctcgcacctgcagcagagccggctcccggagcagcgccaccgccgccgcccccactgcccggcctcccctccccgcaggaagccccgccctctgcgcccccacaggccccgcctctccctggcagcccggagcccccgcctgcgccgccgctgcccggagacctgccgcccccacccccgccaccgccaccacctccgggcactgacgggccggtgcctccgccgccgccgccgccgccgccgcctcccggaggtcctcctgatgccctaggaagacgcgactcagaattgggcccaggagtgaaggccaagaagcccatccagactaagttccgaatgccactcttgaactgggtggcactgaaacccagccagatcaccggcactgtcttcacagagctcaatgatgagaaggtgctgcaggagctagacatgagtgattttgaggaacagttcaagaccaagtcccaaggccccagcctggacctcagcgctctcaagagtaaggcagcccagaaggcccccagcaaggcgacactcattgaggccaaccgggccaagaacttggccatcaccctgcggaagggcaacctgggggccgagcgcatctgccaagccattgaggcgtacgacctgcaggctctgggcctggacttcctggagctgctgatgcgcttcctgcccacagagtatgagcgcagcctcatcacccgctttgagcgggagcagcggccaatggaggagctgtcagaggaggaccgcttcatgctatgcttcagccgcatcccgcgcctgccggagcgcatgaccacactcaccttcctgggcaacttcccggacacagcccagctgctcatgccgcaactgaatgccatcattgcagcctcaatgtccatcaagtcctctgacaaactccgccagatcctggagattgtcctggcctttggcaactacatgaacagtagcaagcgtggggcagcctatggcttccggctccagagcctggatgcgctgttggagatgaagtcgactgatcgcaagcagacgctgctgcactacctggtgaaggtcattgctgagaagtacccgcaactcacaggcttccacagcgacctgcacttcctggacaaggcgggctcagtgtccctggacagtgtcctggcggacgtgcgctccctgcagcgaggcctagagttgacacagagagagtttgtgcggcaggatgactgcatggtgctcaaggagttcctgagggccaactcgcccaccatggacaagctgctggcagacagcaagacggctcaggaggcctttgagtctgtggtggagtacttcggagagaaccccaagaccacatccccaggcctgttcttctccctctttagccgcttcattaaggcctacaagaaagctgagcaggaggtggaacagtggaaaaaagaagccgctgcccaggaggcaggcgctgataccccgggcaaaggggagcccccagcacccaagtcaccgccaaaggcccggcggccacagatggacctcatctctgagctgaaacggaggcagcagaaggagccactcatttatgagagcgaccgtgatggggccattgaagacatcatcacagatctgcggaaccagccctacatccgcgcagacacaggccgccgcagtgcccgtcggcgtcccccgggccccccactgcaggtcacctccgacctctcgctgtagccgctatttctgcaggtggattctgcaggggtgtggggccgtggacaggctgaggctcaaggaaggtggtcctcagctcggctggccgggcagcccctcctccgctgtggcccgcctcaaacgggctggtgcatcctcctcttggccacagagggcagcatcgcccgccccttcccccaaatgctgcttgcagcacccaccctaaagccccctccaaatagccatacttagcctcagcaggagcctggcctgtaacttataaagtgcacctcgcccccgcaagccccagccccgaggaccgtccatggaccttatttttatatgagattaataaagatgtttgcaaaa

SEQ ID NO: 7606 - DNA, 1475 bp, Homo sapiens
  source 1..1475: mol_type = unassigned DNA; mol_type = unassigned DNA
gagctagacatgagtgattttgaggaacagttcaagaccaagtcccaaggccccagcctggacctcagcgctctcaagagtaaggcagcccagaaggcccccagcaaggcgacactcattgaggccaaccgggccaagaacttggccatcaccctgcggaagggcaacctgggggccgagcgcatctgccaagccattgaggcgtacgacctgcaggctctgggcctggacttcctggagctgctgatgcgcttcctgcccacagagtatgagcgcagcctcatcacccgctttgagcgggagcagcggccaatggaggagctgtcagaggaggaccgcttcatgctatgcttcagccgcatcccgcgcctgccggagcgcatgaccacactcaccttcctgggcaacttcccggacacagcccagctgctcatgccgcaactgaatgccatcattgcagcctcaatgtccatcaagtcctctgacaaactccgccagatcctggagattgtcctggcctttggcaactacatgaacagtagcaagcgtggggcagcctatggcttccggctccagagcctggatgcgctgttggagatgaagtcgactgatcgcaagcagacgctgctgcactacctggtgaaggtcattgctgagaagtacccgcaactcacaggcttccacagcgacctgcacttcctggacaaggcgggctcagtgtccctggacagtgtcctggcggacgtgcgctccctgcagcgaggcctagagttgacacagagagagtttgtgcggcaggatgactgcatggtgctcaaggagttcctgagggccaactcgcccaccatggacaagctgctggcagacagcaagacggctcaggaggcctttgagtctgtggtggagtacttcggagagaaccccaagaccacatccccaggcctgttcttctccctctttagccgcttcattaaggcctacaagaaagctgagcaggaggtggaacagtggaaaaaagaagccgctgcccaggaggcaggcgctgataccccgggcaaaggggagcccccagcacccaagtcaccgccaaaggcccggcggccacagatggacctcatctctgagctgaaacggaggcagcagaaggagccactcatttatgagagcgaccgtgatggggccattgaagacatcatcacaggtaagggcttggccaggccttggtcttatcctcagtctgtccttctatgctttcttctgacccaatgcgctatcctctgggggactggctgccacactgcttcttgctaccttttctgtttttctttcctttttcctttctctactccccttcacctgccccacccccactcagtgatcaagacggtgcccttcacggcccgcaccggcaagcggacatcccggctcctctgtgaggccagcctgggagaagagatgcccctctagcccctcag

SEQ ID NO: 7607 - DNA, 769 bp, Homo sapiens
  source 1..769: mol_type = unassigned DNA; mol_type = unassigned DNA
gtgcggcaggatgactgcatggtgctcaaggagttcctgagggccaactcgcccaccatggacaagctgctggcagacagcaagacggctcagaaagctgagcaggaggtggaacagtggaaaaaagaagccgctgcccaggaggcaggcgctgataccccgggcaaaggggagcccccagcacccaaggtaggcaactgctcctgggcttggtactgggctgcagggatgcatggcatctcatcaccctctggtgccacccccacaccctcactgttacagactgaccctgccccaggagcctgggatgggaaagggttctttctgctcaagccagctgtccttgctgtgggggaccaggcagatattccagggttttggtgatggggaggcatcctggagctggagctataaattccccctagtcaccgccaaaggcccggcggccacagatggacctcatctctgagctgaaacggaggcagcagaaggagccactcatttatgagagcgaccgtgatggggccattgaagacatcatcacaggtaagggcttggccaggccttggtcttatcctcagtctgtccttctatgctttcttctgacccaatgcgctatcctctgggggactggctgccacactgcttcttgctaccttttctgtttttctttcctttttcctttctctactccccttcacctgccccacccccactcagtgatcaagacggtgcccttcacggcccgcaccggcaagcggacatcccg

SEQ ID NO: 7608 - DNA, 453 bp, Homo sapiens
  source 1..453: mol_type = unassigned DNA; mol_type = unassigned DNA
gcggcaggatgactgcatggtgctcaaggagttcctgagggccaactcgcccaccatggacaagctgctggcagacagcaagacggctcagaaagctgagcaggaggtggaacagtggaaaaaagaagccgctgcccaggaggcaggcgctgataccccgggcaaaggggagcccccagcacccaagtcaccgccaaaggcccggcggccacagatggacctcatctctgagctgaaacggaggcagcagaaggagccactcatttatgagagcgaccgtgatggggccattgaagacatcatcacaggtaagggcttggccaggccttggtcttatcctcagtctgtccttctatgctttcttctgacccaatgcgctatcctctgggggactggctgccacactgcttcttgctaccttttctgtttttctttcctttttcctttctctac

SEQ ID NO: 7609 - DNA, 2330 bp, Homo sapiens
  source 1..2330: mol_type = unassigned DNA; mol_type = unassigned DNA
ctggatttccgaggctggaggcgcctggccggctgggtggggaccaccatgggcaacgcggccggcagcgccgagcagcccgcgggccccgccgcgccgccccccaagcagcaccgctttgaaaagctgatggaatatttccggaatgaggacagcaacatcgacttcatggtggcctgcatgcagttcatcaacattgtggtacattcggtggagaacatgaacttccgtgtcttcctgcaatatgagttcacccacttgggcctggacctgtacttggagaggcttcggctcaccgagagtgacaagctgcaggtgcagatccaggcgtacctggacaatatttttgatgtgggggcgctgctggaggacacagagaccaagaacgctgtgctggagcacatggaggaactgcaggagcaagtggcgctgctgacagagcggcttcgggacgcggagaacgaatccatggccaagattgcagaactggaaaaacagctaagccaggcgcgcaaggagttggagaccctgcgggagcgcttcagcgaatcgaccgccatggggccctccaggcgtcccccagagcctgagaaagcgcctcccgctgccccgacgcggccctcggccctggagctgaaggtggaggagctggaggagaaggggttaatccgtattctgcgggggccgggggatgctgtctccatcgagatcctccccgtcgctgtggcaactccgagcggcggtgatgctccgactccgggggtgccgaccggctcccccagcccagatctcgcacctgcagcagagccggctcccggagcagcgccaccgccgccgccgccgcctcccggaggtcctcctgatgccctaggaagacgcgactcagaattgggcccaggagtgaaggccaagaagcccatccagactaagttccgaatgccactcttgaactgggtggcactgaaacccagccagatcaccggcactgtcttcacagagctcaatgatgagaaggtgctgcaggagctagacatgagtgattttgaggaacagttcaagaccaagtcccaaggccccagcctggacctcagcgctctcaagagtaaggcagcccagaaggcccccagcaaggcgacactcattgaggccaaccgggccaagaacttggccatcaccctgcggaagggcaacctgggggccgagcgcatctgccaagccattgaggcgtacgacctgcaggctctgggcctggacttcctggagctgctgatgcgcttcctgcccacagagtatgagcgcagcctcatcacccgctttgagcgggagcagcggccaatggaggagctgtcagaggaggaccgcttcatgctatgcttcagccgcatcccgcgcctgccggagcgcatgaccacactcaccttcctgggcaacttcccggacacagcccagctgctcatgccgcaactgaatgccatcattgcagcctcaatgtccatcaagtcctctgacaaactccgccagatcctggagattgtcctggcctttggcaactacatgaacagtagcaagcgtggggcagcctatggcttccggctccagagcctggatgcgctgttggagatgaagtcgactgatcgcaagcagacgctgctgcactacctggtgaaggtcattgctgagaagtacccgcaactcacaggcttccacagcgacctgcacttcctggacaaggcgggctcagtgtccctggacagtgtcctggcggacgtgcgctccctgcagcgaggcctagagttgacacagagagagtttgtgcggcaggatgactgcatggtgctcaaggagttcctgagggccaactcgcccaccatggacaagctgctggcagacagcaagacggctcaggctgtgcccacaggaggcctttgagtctgtggtggagtacttcggagagaaccccaagaccacatccccaggcctgttcttctccctctttagccgcttcattaaggcctacaagaaagctgagcaggaggtggaacagtggaaaaaagaagccgctgcccaggaggcaggcgctgataccccgggcaaaggggagcccccagcacccaagtcaccgccaaaggcccggcggccacagatggacctcatctctgagctgaaacggaggcagcagaaggagccactcatttatgagagcgaccgtgatggggccattgaagacatcatcacagatctgcggaaccagccctacatccgcgcagacacaggccgccgcagtgcccgtcggcgtcccccgggccccccactgcaggtcacctccgacc

SEQ ID NO: 7610 - DNA, 12634 bp, Homo sapiens
  source 1..12634: mol_type = unassigned DNA; mol_type = unassigned DNA
gagccggccgcctccgtccgccttgcttcggtgcggctgtccgctacgctgcctccgccctcgccgcgcgcccccgccagcgggactccagggaacccccggcgccctcgacggggccgaggagtcgggactcggggagccggcgctgagggaggagcctggtcggagccgcggagccgaaagctccggagcgtggaggtggggggccgaggcccctgagggggccccgccgcgatgggcaacctggagagcgccgagggggtcccgggagagcccccctctgtcccgttgttgctgccgcccggcaagatgccgatgcctgagccctgtgagctggaggaaaggttcgccctggtgctgagctccatgaacctgcctccagacaaggcccggctcctgcggcagtatgacaatgagaagaaatgggatctgatctgtgaccaggaacgattccaggtgaagaatcctccccacacttacattcagaaactccagagcttcttggaccccagtgtaactcggaagaagttcaggaggagggtgcaggagtcaaccaaagtactaagggagctggagatctctcttcgcaccaaccacattgggtgggtgcgggaatttctgaatgatgaaaacaaaggcctggatgtactggtggattacctgtcctttgcccagtgttctgtcatgtttgactttgagggtctggaaagtggtgacgatggtgcatttgacaaactccggtcctggagcaggtcaatcgaggacctgcagccacccagcgccctgtcggcccccttcaccaacagcctcgctcgctctgcgcgccagtctgtgctccggtatagcactctccctgggcgcagggccctgaagaactcccgcctagtgagccagaaggatgacgtccacgtctgtatcctttgtctcagagccatcatgaactatcagtacggattcaacctggtcatgtcccacccccatgctgtcaatgagattgcacttagcctcaataacaagaatccaaggaccaaagcccttgtcttagagcttctggcagctgtgtgtttggtgcgaggaggtcacgaaatcatccttgctgcctttgacaatttcaaagaggtatgcaaggagctgcaccgctttgagaagctgatggagtatttccggaatgaggacagcaatattgacttcatggtggcctgcatgcagttcatcaacatcgtggtgcactcggtggaggacatgaacttccgggtccacctgcagtatgagtttaccaagctggggctagaggagttcctgcagaagtcaaggcacacagagagcgagaagctgcaggtgcagattcaggcatatctggacaacgtgtttgatgtcgggggtttgttggaggatgctgagaccaagaatgtagccctggagaaggtggaggagttggaggagcatgtgtcccatctcacagagaagcttctggacctagagaatgaaaacatgatgcgggtggcagaactagagaagcagctgctacagcgggagaaggaactagagagcatcaaggagacatatgagaacacaagccaccaggtgcacaccctgcggaggctcattaaagagaaggaggaggcctttcagcgtcgatgtcatttggagccaaatgtccggggcctggagtctgtggacagtgaggccctggccagagtaggccctgcagagctgagtgagggcatgccaccctccgacctggaccttctggctccagccccaccccctgaggaggtcctgcctcttcctccaccaccagctccgcccttgccccctccacctcccccattaccagacaagtgtcccccagccccacctctccctggtgctgcaccctctgtggtgttgacagtgggcctgtcagccattcgaattaagaaacctatcaagaccaagttccggctgcctgtcttcaactggacagcactgaaacccaaccagatcagtggcactgtcttcagcgaacttgatgatgagaagatcttggaggacctggatcttgataagtttgaagaattattcaagacaaaagcgcagggccctgcccttgacctcatctgctccaaaaacaagacagcgcaaaaagctgccagcaaggtgactctgttggaagccaatcgtgccaagaacctggccatcaccctacgcaaggctggccgctcggctgaggagatctgcagggccattcatacgtttgacttgcagacactacctgtggacttcgtggagtgcctgatgcgcttcctgcccacagaggctgaggtaaagctgctgcggcaatatgagcgggagcggcagcccctggaggagttggcagctgaggaccgcttcatgctgctcttcagcaaggtggaacggttgacccagcgaatggctggcatggccttcctggggaacttccaggataacctgcagatgctcacaccgcaactcaatgccatcattgcggcgtccgcttccgtcaagtcttcacagaagctgaagcagatgttggagatcatacttgcactggggaactacatgaacagcagcaagcggggagctgtgtatggcttcaagctccagagcctggatctgctgctggataccaagtccactgaccggaagatgacactgcttcatttcatcgccttgacagtgaaggagaaatacccagacctggctaacttctggcatgagctgcactttgttgagaaggctgcagcagtgtccctggagaacgtgctgctggacgtgaaggagctgggccggggcatggagctgattcggcgtgagtgcagcatccatgacaacagcgtcctccggaacttcctcagtaccaatgaaggcaaactagacaagctccagcgggacgccaagacggctgaggaggcctacaatgcagttgtgcgctactttggcgagagtcccaagactacacctccttctgtattcttcccagtatttgtccgattcattcgttcttacaaggaagcagaacaagagaatgaagcccgcaagaagcaggaggaggtaatgcgggagaagcagctggctcaggaagccaagaaactggatgccaagaccccatcccagcggaacaagtggcaacagcaggagttaatagcagagttgaggcggcgccaggccaaggaacaccggcctgtttatgaggggaaggatggtaccatcgaggacatcatcacaggcctccactgccagcctatggttgttcgccaccaagccaggagtgctgcaccgcccagtggtccccctcgggctccaggcccccactgagaccctctcggaggcagaagcacttcacccctcagagtcctacaagtccaaccagtggacctggaattggccaagggctcaggagagggctgtgttgctctctcaaccatgtccgccccagctcttgaggctggatctttctacttgtgccactatgggcactaggtctgtaggtccctggtgcttccagtactgcactttgcccccaaggtctttgacttcatttcctgaagggtcaccaagggtcagctcagggctaggaaaaaccatttccagccttagcctaaacagggcacatagatctctcccactagagcccagagggatgagaggagagagcaactgttctttctttttttttcccttcctttttgcaggcccatggtcagctctggtctagatgtatctaggcttagggagccctgggaccctgccagtctcagttcatctcttaccaggagcaaggccctctgaagcatgggccgtgccagctgtgccctagtgataagggtaagaggagagatgtcaggctcactgcccttatttctctgcccatttcattctaggctcacactgtccttgtcaaggtgggcagaagagcagaggtcttctctgcaccaaccactctctgcagatggctggagaaagggtgtgccaactcttcaccttctttcctcagctacggtttttttttttttttttttttttttggcaggggacaaggagcatggtggtcttggctatttgcttaccttcccgtttctcctctgcccctggaagggaatgtgggggcccacttttttgtacatgtaccacctccctttcctcttactgtacataaacctcagactctccccctctcaacaaaggcttgatgcaccaggcctgactttgtctcctctttctgagcttagggggctagggtggccatttagtctgacctgggctatggggatagaaaagaaatctttggggcactgcatctgttttggaggagatgagatcagaactctggggaaaggagaaccggctaggtgggctctagccacacaaagggaagcaggcctgccatgagacactagtgccctctgctgggcatgtgtccagtccccagcctgccccagtagcacatggaaaagagtcactggccatgttataaatattgttatttaaaaaacaaaaaacaaaacacacgtacattaggtcctgggtggaggaagaagtggtggagcctcagggccagggcaggcaggagcaggcactgatgctagagggtgatgaccctgccctctgccacccaggctgcgtccaacagcctgtgactcttccctggagaccccttctctcacacttttatctactggcatcacccaccccacatggcatataccacccatctctggtctggggctgagggcaaggactgcactagtccagggagtaggggacccttgaacaccaagagcaaccttgagaggtgccaacaatggtgtgctgggggtggggttactttagaaaaagtggacacagaccagactaaggaagaagtctgaggcagacggtgagggtggcccaggagccatggcctcacacagacccgaggcagagaacagctcattgggtcactggtgatcatccagctgctgtaggagtgtccgccgccgcctctccagctcaccctcactcagctcactttctgacgtgtcccagcctgtctgttggagcaaaggcacagttcacccttagcctgcactaagggccgtggaagcttgaccagcgtgctgactggcctagggcccctgcccctcaccttctccttcttgattccaaagcctggggaacggttagggagctctgcctgttggagctccctgtccttgtcctgttcttgttctttctcatcgctctccttgccagctttctcctcagggtctgtctcactctcaggactattctgtaagagtccagagcccacctcctcagttcctgtggatagcctgggaggcaggtagaacagaactcacaaaatagcaggggcttaggtagaagttccttcactcaccgacttgtgtcttctcttcttagttttcttttttggtttcttggctttccgaaggccatgatctagagatagaaaaatccctactaagtcccaacaggagaaagacaggctctttttctttgttctagcccctctgttcattcttcacaggcaggaacctcatgctctgaggaagtctaagtccagttttccttctccagcttcttgcttgggcaggtagaggaagttctttctacttccacaggtgcagccctcccaatccagtctaccctcaaaggagctggggcttgtggagggcatcctctcagtctgggacaacagttctccagcttctacgctcacagcaactgcttacctgctccaagaagatgggaggaaggggagccccgtcctccaagggcagcacccccactttcaactgaatcaagtgaggaagagggctcagagcctgactctgaggggttccgcctcctccgcttggggggccggagagatggtgggggcagctcctcttcttctgactcagagccctgggcagatcagcagatacatgtcagtgcagaggttctctgccctccagaagccctcgtctgggaattcgagagaggaggaggacccagggccaaaggaatcctcaaacttccctccaagggagatattgtaaggggaaaacaaagtgtttatttccccaaaacaacccagcttcaccccatgtcccttctacacgcttactcactgagggtgagtgggaacgcttgtgatggtgcttcttgcctttcctgccatgctttcggcctttggtgtggaggtgctggcattcagtctgctagaggcagaggaagaagggtgaggacagcaccagacttagccccaggaaggatcctacttcctaaaatctggctttgcctccctttctcagactagagccttctgcctatcccagggatcctcaggcctccccttccttagctggccaggagtgccctaagggtaagagggaggccactgaggtctctgttgaactggtctaatgagttcaagggcctgaggcagatccagaggacaagcctgcctcacctccagcacctgtaggaactcccggaagagccggatccgctccgactccagggtgatctgctcaaaggctgagtcacacacaaaacgctcacggaccttgaacgaggagagcactgctgatcagactaggccccactcagcctggcctggacaccgccatgagcacagggcagggctggggcagagaaaggaagggaactggagctggcccagggctgtgacgtgactggggtgggccctcagtggtgaagcaccgctgccctcaggcttgaggggtgcttggggccaggctacgctcctgacctcttcccaggcagtgcctagctccagagcaggcacagcctgcctcagcatgcttcgaaaggcagcttccctgcgccgcatcctgcgtgcctcctccttctcccgctccctctcccgtgcctctgctttctccagcagctgaggaaagaagggacacggaacagggtcacccaggagggtggatgccaggtcccactcaggcataccttaggaggtggaaagttagggtctgggcttctaccaccatcccctgaattgggaatatagtcagtgggacagtgagtgagaaggaatggagcaagacacagatgaattagagaacttcccacgccccgcccagcccctcacactattgaaggtcagcttgatgttgcctgcgtccagtgcggcagccctcttgtcaaagcttatgacgtgggcgaagtcctcaaaggccgtgttcacctccacgcagaagccccggtcctgtgggtacagcagtgcatgaagcaggggcaccacgtgcctgaggccaaagctggcaggcagagtggtcacattacagatggtcaagaaggcccttgcctctggaagagatccacaggactgtggtctgcattagaaaccaagttatccaagtcctcatcacttgacaattaagcccccatgcctacccttggtttggatgtcacacagagctgaaggggttgggagatgtctcccaactgctgattaatgctgagtttctcaaaattaacttttgttcctttggcttaaagctctggccccagctgggccctcctgctgctcagcagtgcttccatgcattctcaatcaacatttgctggcccctaccctttgggtctatttattgagtgcttactatgtaccaggtaccatgatgagtgtttcacacattatctcatttaatcctcttggttctacatttaagaataggtcctagtatcctaattttacacagaaggagaaaccaaggttcagagaaactagagcacttgcccaaggtctcacagctgatatacggctgggcaagaaccctaccctgggggggctctctatccccaaagtgtctgctttcaagcaccacacccacccagatgacttagtccatgggagaaacggaggccaccaggtgtgcagctccccaccaatactaaaaacatgtccacaggccaggctctatgcttctcatttaggcctcacaacattccagtgaagcagaggcttagaaaagtgatctcagttggcccaagatgacatgagtggtaaatgaagccactggagttcaaagtctggctctcacgtcagttaagcacaggccagattccctttctctccctccacatagctctcacctcctctggcctttttgctgatggcagaggtgtgctcctctttcttctttccaagggtacttcctcaaccctgctacagtccttatcaacacagcattcattctcagggaattgaaagctccaagtcacccttgttactggctccttccatcaagcagacacctcacctaacctggaacatcctttccaccatgctctccccttcatcaagctaactacctctgctcttttccattgtttcaaaacctcttgaaatgcagcagaaaggaaaaggaataaacatttattgagaacctattagacactttacagatgttatttaattctcacaaccttacctatgaattatccctgatttacaggtgagcaaacaggctcagagacacggaacttacggaggtctcagagccaataagcaaccaggagtaatctgactctaaaacatgtgctgcccccatgccacctccatgactctactctcccaaaggttgcttgtgtctactagccaaatccaaggccgccttctttgtcctcactcatctggtcctcagtgcctctaccacttacttcttcaacactcccctctccaggtcacaccctctctgaccttttattctcttgcatatgcatgttcctgagaacagcacttagtcctctttcactacccaatctgtactccctcgcaatctcatccttcatctctcctgattttcaaacatcctagactggatatttcagacacttaaaattcaacagatctcaagagaatatatttctcatgagcatcctccatggatctccctgacccggatctgtctgcctgttctaagtccagggctctttgcattatcctatgggatgaaaggcaccatcatggtctgcctggctgtggaaagcaagagggactcctgggctcatctgccctccataggcaggaacccaaatggggaaagaggaagggaactgtctaaaaaagttgctttctcaggttgtgtggagagacaggactcagtgaggataggcccctacaggcctatcaaccagccactctgtggctaaaagttaattgtccaataaaatttagctatcccaggataaggcatttctactttatacgattattctgttttaaaatatatttgctttgagagtaattccccaaatagaattcctattttctacagccttgctcttcttgttttatccttatcaatagtgccatcatccactgccctgacacctctgattccttcctttccctccatttcacaaaatctatcaattctacttagtgactctatcccactggtgttgaattctcccttttttttttaaacagcagaaacagtttattaaaatagaaatcttatgtagaacctttatgcataaaaaagattcaagctgcttcacttgaaaacaggaagcagcaccaaatccccccatactcaactccaacccttgcttgtctcaaggcacctacatagaaacccagagtgtctcagaagaacagctggagcgctacagcctgctctcttctgctgtccccactgcccccggctaggatcacctcctacaagattcctgcacagcctactgacttttctccctgctcaccctcttccatccctctaacccagctcctagcatctagtgcttcttggacttttgtaccaagtagccccaacagtaggagagaggtctggggataagtgaaatgaatatgactatttgaattaccactatcagttttagtatcttgaggcttcaagaactgctctacctagcaccaccaccttccctaaggacataagtacgtactctagactgaaaggttctactatacaccatctaatctgatcattccccggttcctcattacttacgagagaaaaatccaaatttcttattttagcattcaaggcactttacatgcagggctctacttccaagctggggcatgtggttccagagaaagagaggatacctcaggacagtatgatacatcttacctaatggtaagtaatttaaaatattaaatttatattaaataggtaatatggtgttaaaatgcaacacctacgtgaatttgtaaggcaaaacagtacttcaaagaaatgtatatgcagtgagacatttctagctttatttccagatccctttcaacccaggtaccatttaatctctgtaattaggtgtactctggtggaacactcaccattttttagatgaggaaacagggtcagaaaggtcaagtgacctatccaaggtcacacaactagcaagcagttaagctagacttttactgtaggcagtctgcctccagtcccgctcctaaccactgtactgtattatctcctcaaatgcattagaatcttcacttccataaagaaatatgctctttgtttttttcttttggaacacaaggtttagtccatcactcactcacttttccacttttgataagatgtaaatattgagaactatttctcttctccagtagaagaagagcaacaggccatgtgtgatggtaaatggcagctgacacttgcgacagtatcaagaaggcactaaggaatggtgagaaggatgacttgccctttctaaagtggcatctcagcttgagtctgcagaatgccttgcaaatccagctcagtactgctagataatccatattgacaagagaagctaaagattcagattttctatgtgaagtttcctggttttaaaatgttagcaacaaattccaaatttttacagaacactgtacaggccagaaagaacaatctgtgtgctaccagtttacaattagctatgcttcttcctcctcagacctggcatgccctttccacccccttgcctttgctcttagtaccccgtgtacactccaacctcttccacctacaaatttctaaatgcacagttcaaatgttagttcttcagattcctgtctctgtaataacacttgcccctttgtataacagttctcatgtatatcttcctattagaccatgagctcctgtggtagaaattgtgtattcattactgtatccctagtgtgcagtaaaggatcacagtagatatctgctgaaccaagctgtaatgcttctgcaaaacaggacttatcagggagtcctctgcagggagtgtgccctgcatccatcctgtatccatccataaccccagcctccctcaccttaaggatgtccttaatgatcttcttttcatcatggaatcgtgccttcaactcctccacatagaacttgaataagtccagaggggtggagcctgtaaggagggagggaggggggcctggcgggcggcagcttcccaaggcctgggggctgggccgaggacaggagccggtagtagggggtgcagagaggctggcagggcaggaagccaggccagagaagggggagcctggctgccttacccggctggcccagcatgttggcaaagcggacatcagtgctgactgctggatatagctccatccaggtggacatagagtgcagctgccctgtctcatgcagctcgtccaggaaggtctgagcagggagaggccagttatagggagagtgagacagggaggcagagccacagactgagggggaagagagggaatggcagaggaagaggcagggacaatcaagattgaggaaatgcaggcaagagaggcagagatgaagagatgcagatggaaggctgagaacaatgcaaaaagagagaaagtaaatacacagagagggacagaacaaaaaggtgagaacaagccagtcccgggatgcaaagaaacagaaacctgcctgcagtaacccctagcactaccaccaccactgccacccccaagctgagggaataaactctgcctgtcgggtgccccaccaagggaaataaacatggcctagctgccaagtcatgcctgtagggtgctctctactggcagtttctgggtggtgcatacatctagtctccctagaagagcacagtccagaattgaggaggtacagcagaaacagactgcaggcagagagaggtctcatagagcttggacagggctaggcacagaaagaacaggcagcgtatccagaagggggcagggaatgggtgaagaggttgtgctctagggcagagctgagctctgatctagaaaggacagcaaagatacctggaaggcctcccgattcttgcgttgttggcgtcgctcccgaagccgggcccgctcccgttcctcctcctcttccctctccaaagctcggatgtgctcctcaaaacagatcagtgcatcttccttgtccatgtctaaagacaggcaggaggttccgcgggcattgtcccagcaggataccctctcagaccccagcacccctaatgtttcaacgatgctgtcctacaggtgctagggatacccagggtggtgggggaagggcctggagggggctctgtgggagcagccactgcaatggtagttcttaagaggggatcattaattgtataagaataaataagcaagtattca

SEQ ID NO: 7611 - DNA, 720 bp, Homo sapiens
  source 1..720: mol_type = unassigned DNA; mol_type = unassigned DNA
attacttacgagagaaaaatccaaatttcttattttagcattcaaggcactttacatgcagggctctacttccaagctggggcatgtggttccagagaaagagaggatacctcaggacagtatgatacatcttacctaatgtagaagaagagcaacaggccatgtgtgatggtaaatggcagctgacacttgcgacagtatcaagaaggcactaaggaatggtgagaaggatgacttgccctttctaaagtggcatctcagcttgagtctgcagaatgccttgcaaatccagctcagtactgctagataatccatattgacaagagaagctaaagattcagattttctatgtgaagtttcctggttttaaaatgttagcaacaaattccaaatttttacagaacactgtacaggccagaaagaacaatctgtgtgctaccagtttacaattagctatgcttcttcctcctcagacctggcatgccctttccacccccttgcctttgctcttagtaccccgtgtacactccaacctcttccacctacaaatttctaaatgcacagttcaaatgttagttcttcagattcctgtctctgtaataacacttgcccctttgtataacagttctcatgtatatcttcctattagaccatgagctcctgtggtagaaattgtgtattcattactgtatccctagtgtgcagtaaaggatcacagta

SEQ ID NO: 7612 - DNA, 4120 bp, Homo sapiens
  source 1..4120: mol_type = unassigned DNA; mol_type = unassigned DNA
ggaggtggggggccgaggcccctgagggggccccgccgcgatgggcaacctggagagcgccgagggggtcccgggagagcccccctctgtcccgttgttgctgccgcccggcaagatgccgatgcctgagccctgtgagctggaggaaaggttcgccctggtgctgagctccatgaacctgcctccagacaaggcccggctcctgcggcagtatgacaatgagaagaaatgggatctgatctgtgaccaggaacgattccaggtgaagaatcctccccacacttacattcagaaactccagagcttcttggaccccagtgtaactcggaagaagttcaggaggagggtgcaggagtcaaccaaagtactaagggagctggagatctctcttcgcaccaaccacattgggtgggtgcgggaatttctgaatgatgaaaacaaaggcctggatgtactggtggattacctgtcctttgcccagtgttctgtcatgtttgactttgagggtctggaaagtggtgacgatggtgcatttgacaaactccggtcctggagcaggtcaatcgaggacctgcagccacccagcgccctgtcggcccccttcaccaacagcctcgctcgctctgcgcgccagtctgtgctccggtatagcactctccctgggcgcagggccctgaagaactcccgcctagtgagccagaaggatgacgtccacgtctgtatcctttgtctcagagccatcatgaactatcagtacggattcaacctggtcatgtcccacccccatgctgtcaatgagattgcacttagcctcaataacaagaatccaaggaccaaagcccttgtcttagagcttctggcagctgtgtgtttggtgcgaggaggtcacgaaatcatccttgctgcctttgacaatttcaaagaggtatgcaaggagctgcaccgctttgagaagctgatggagtatttccggaatgaggacagcaatattgacttcatggtggcctgcatgcagttcatcaacatcgtggtgcactcggtggaggacatgaacttccgggtccacctgcagtatgagtttaccaagctggggctagaggagttcctgcagaagtcaaggcacacagagagcgagaagctgcaggtgcagattcaggcatatctggacaacgtgtttgatgtcgggggtttgttggaggatgctgagaccaagaatgtagccctggagaaggtggaggagttggaggagcatgtgtcccatctcacagagaagcttctggacctagagaatgaaaacatgatgcgggtggcagaactagagaagcagctgctacagcgggagaaggaactagagagcatcaaggagacatatgagaacacaagccaccaggtgcacaccctgcggaggctcattaaagagaaggaggaggcctttcagcgtcgatgtcatttggagccaaatgtccggggcctggagtctgtggacagtgaggccctggccagagtaggccctgcagagctgagtgagggcatgccaccctccgacctggaccttctggctccagccccaccccctgaggaggtcctgcctcttcctccaccaccagctccgcccttgccccctccacctcccccattaccagacaagtgtcccccagccccacctctccctggtgctgcaccctctgtggtgttgacagtgggcctgtcagccattcgaattaagaaacctatcaagaccaagttccggctgcctgtcttcaactggacagcactgaaacccaaccagatcagtggcactgtcttcagcgaacttgatgatgagaagatcttggaggacctggatcttgataagtttgaagaattattcaagacaaaagcgcagggccctgcccttgacctcatctgctccaaaaacaagacagcgcaaaaagctgccagcaaggtgactctgttggaagccaatcgtgccaagaacctggccatcaccctacgcaaggctggccgctcggctgaggagatctgcagggccattcatacgtttgacttgcagacactacctgtggacttcgtggagtgcctgatgcgcttcctgcccacagaggctgaggtaaagctgctgcggcaatatgagcgggagcggcagcccctggaggagttggcagctgaggaccgcttcatgctgctcttcagcaaggtggaacggttgacccagcgaatggctggcatggccttcctggggaacttccaggataacctgcagatgctcacaccgcaactcaatgccatcattgcggcgtccgcttccgtcaagtcttcacagaagctgaagcagatgttggagatcatacttgcactggggaactacatgaacagcagcaagcggggagctgtgtatggcttcaagctccagagcctggatctgctgctggataccaagtccactgaccggaagatgacactgcttcatttcatcgccttgacagtgaaggagaaatacccagacctggctaacttctggcatgagctgcactttgttgagaaggctgcagcagtgtccctggagaacgtgctgctggacgtgaaggagctgggccggggcatggagctgattcggcgtgagtgcagcatccatgacaacagcgtcctccggaacttcctcagtaccaatgaaggcaaactagacaagctccagcgggacgccaagacggctgaggcctacaatgcagttgtgcgctactttggcgagagtcccaagactacacctccttctgtattcttcccagtatttgtccgattcattcgttcttacaaggaagcagaacaagagaatgaagcccgcaagaagcaggaggaggtaatgcgggagaagcagctggctcaggaagccaagaaactggatgccaagaccccatcccagcggaacaagtggcaacagcaggagttaatagcagagttgaggcggcgccaggccaaggaacaccggcctgtttatgaggggaaggatggtaccatcgaggacatcatcacagtgctgaagagtgtccctttcacggcccgtactgccaagcggggctcacgcttcttctgtgatgcagcccaccatgatgagtcaaactgttagcccccaaggttggggcccgacaggcctccactgccagcctatggttgttcgccaccaagccaggagtgctgcaccgcccagtggtccccctcgggctccaggcccccactgagaccctctcggaggcagaagcacttcacccctcagagtcctacaagtccaaccagtggacctggaattggccaagggctcaggagagggctgtgttgctctctcaaccatgtccgccccagctcttgaggctggatctttctacttgtgccactatgggcactaggtctgtaggtccctggtgcttccagtactgcactttgcccccaaggtctttgacttcatttcctgaagggtcaccaagggtcagctcagggctaggaaaaaccatttccagccttagcctaaacagggcacatagatctctcccactagagcccagagggatgagaggagagagcaactgttctttctttttttttcccttcctttttgcaggcccatggtcagctctggtctagatgtatctaggcttagggagccctgggaccctgccagtctcagttcatctcttaccaggagcaaggccctctgaagcatgggccgtgccagctgtgccctagtgataagggtaagaggagagatgtcaggctcactgcccttatttctctgcccatttcattctaggctcacactgtccttgtcaaggtgggcagaagagcagaggtcttctctgcaccaaccactctctgcagatggctggagaaagggtgtgccaactcttcaccttctttcctcagctacggtttttttttttttttttttttttttggcaggggacaaggagcatggtggtcttggctatttgcttaccttcccgtttctcctctgcccctggaagggaatgtgggggcccacttttttgtacatgtaccacctccctttcctcttactgtacataaacctcagactctccccctctcaacaaaggcttgatgcaccagg

SEQ ID NO: 7613 - DNA, 2650 bp, Homo sapiens
  source 1..2650: mol_type = unassigned DNA; mol_type = unassigned DNA
tttcccttaatggtgctgtctgcctgccaggagacatatgagaacacaagccaccaggtgcacaccctgcggaggctcattaaagagaaggaggaggcctttcagcgtcgatgtcatttggagccaaatgtccggggcctggagtctgtggacagtgaggccctggccagagtaggccctgcagagctgagtgagggcatgccaccctccgacctggaccttctggctccagccccaccccctgaggaggtcctgcctcttcctccaccaccagctccgcccttgccccctccacctcccccattaccagacaagtgtcccccagccccacctctccctggtgctgcaccctctgtggtgttgacagtgggcctgtcagccattcgaattaagaaacctatcaagaccaagttccggctgcctgtcttcaactggacagcactgaaacccaaccagatcagtggcactgtcttcagcgaacttgatgatgagaagatcttggaggacctggatcttgataagtttgaagaattattcaagacaaaagcgcagggccctgcccttgacctcatctgctccaaaaacaagacagcgcaaaaagctgccagcaaggtgactctgttggaagccaatcgtgccaagaacctggccatcaccctacgcaaggctggccgctcggctgaggagatctgcagggccattcatacgtttgacttgcagacactacctgtggacttcgtggagtgcctgatgcgcttcctgcccacagaggctgaggtaaagctgctgcggcaatatgagcgggagcggcagcccctggaggagttggcagctgaggaccgcttcatgctgctcttcagcaaggtggaacggttgacccagcgaatggctggcatggccttcctggggaacttccaggataacctgcagatgctcacaccgcaactcaatgccatcattgcggcgtccgcttccgtcaagtcttcacagaagctgaagcagatgttggagatcatacttgcactggggaactacatgaacagcagcaagcggggagctgtgtatggcttcaagctccagagcctggatctgctgctggataccaagtccactgaccggaagatgacactgcttcatttcatcgccttgacagtgaaggagaaatacccagacctggctaacttctggcatgagctgcactttgttgagaaggctgcagcagtgtccctggagaacgtgctgctggacgtgaaggagctgggccggggcatggagctgattcggcgtgagtgcagcatccatgacaacagcgtcctccggaacttcctcagtaccaatgaaggcaaactagacaagctccagcgggacgccaagacggctgaggcctacaatgcagttgtgcgctactttggcgagagtcccaagactacacctccttctgtattcttcccagtatttgtccgattcattcgttcttacaaggaagcagaacaagagaatgaagcccgcaagaagcaggaggaggtaatgcgggagaagcagctggctcaggaagccaagaaactggatgccaagaccccatcccagcggaacaagtggcaacagcaggagttaatagcagagttgaggcggcgccaggccaaggaacaccggcctgtttatgaggggaaggatggtaccatcgaggacatcatcacaggcctccactgccagcctatggttgttcgccaccaagccaggagtgctgcaccgcccagtggtccccctcgggctccaggcccccactgagaccctctcggaggcagaagcacttcacccctcagagtcctacaagtccaaccagtggacctggaattggccaagggctcaggagagggctgtgttgctctctcaaccatgtccgccccagctcttgaggctggatctttctacttgtgccactatgggcactaggtctgtaggtccctggtgcttccagtactgcactttgcccccaaggtctttgacttcatttcctgaagggtcaccaagggtcagctcagggctaggaaaaaccatttccagccttagcctaaacagggcacatagatctctcccactagagcccagagggatgagaggagagagcaactgttctttctttttttttcccttcctttttgcaggcccatggtcagctctggtctagatgtatctaggcttagggagccctgggaccctgccagtctcagttcatctcttaccaggagcaaggccctctgaagcatgggccgtgccagctgtgccctagtgataagggtaagaggagagatgtcaggctcactgcccttatttctctgcccatttcattctaggctcacactgtccttgtcaaggtgggcagaagagcagaggtcttctctgcaccaaccactctctgcagatggctggagaaagggtgtgccaactcttcaccttctttcctcagctacggtttttttttttttttttttttttttggcaggggacaaggagcatggtggtcttggctatttgcttaccttcccgtttctcctctgcccctggaagggaatgtgggggcccacttttttgtacatgtaccacctccctttcctcttactgtacataaacctcagactctccccctctc

SEQ ID NO: 7614 - DNA, 4006 bp, Homo sapiens
  source 1..4006: mol_type = unassigned DNA; mol_type = unassigned DNA
cttgcttcggtgcggctgtccgctacgctgcctccgccctcgccgcgcgcccccgccagcgggactccagggaacccccggcgccctcgacggggccgaggagtcgggactcggggagccggcgctgagggaggagcctggtcggagccgcggagccgaaagctccggagcgtggaggtggggggccgaggcccctgagggggccccgccgcgatgggcaacctggagagcgccgagggggtcccgggagagcccccctctgtcccgttgttgctgccgcccggcaagatgccgatgcctgagccctgtgagctggaggaaaggttcgccctggtgctgagctccatgaacctgcctccagacaaggcccggctcctgcggcagtatgacaatgagaagaaatgggatctgatctgtgaccaggaacgattccaggtgaagaatcctccccacacttacattcagaaactccagagcttcttggaccccagtgtaactcggaagaagttcaggaggagggtgcaggagtcaaccaaagtactaagggagctggagatctctcttcgcaccaaccacattgggtgggtgcgggaatttctgaatgatgaaaacaaaggcctggatgtactggtggattacctgtcctttgcccagtgttctgtcatgtatagcactctccctgggcgcagggccctgaagaactcccgcctagtgagccagaaggatgacgtccacgtctgtatcctttgtctcagagccatcatgaactatcagtacggattcaacctggtcatgtcccacccccatgctgtcaatgagattgcacttagcctcaataacaagaatccaaggaccaaagcccttgtcttagagcttctggcagctgtgtgtttggtgcgaggaggtcacgaaatcatccttgctgcctttgacaatttcaaagaggtatgcaaggagctgcaccgctttgagaagctgatggagtatttccggaatgaggacagcaatattgacttcatggtggcctgcatgcagttcatcaacatcgtggtgcactcggtggaggacatgaacttccgggtccacctgcagtatgagtttaccaagctggggctagaggagttcctgcagaagtcaaggcacacagagagcgagaagctgcaggtgcagattcaggcatatctggacaacgtgtttgatgtcgggggtttgttggaggatgctgagaccaagaatgtagccctggagaaggtggaggagttggaggagcatgtgtcccatctcacagagaagcttctggacctagagaatgaaaacatgatgcgggtggcagaactagagaagcagctgctacagcgggagaaggaactagagagcatcaaggagacatatgagaacacaagccaccaggtgcacaccctgcggaggctcattaaagagaaggaggaggcctttcagcgtcgatgtcatttggagccaaatgtccggggcctggagtctgtggacagtgaggccctggccagagtaggccctgcagagctgagtgagggcatgccaccctccgacctggaccttctggctccagccccaccccctgaggaggtcctgcctcttcctccaccaccagctccgcccttgccccctccacctcccccattaccagacaagtgtcccccagccccacctctccctggtgctgcaccctctgtggtgttgacagtgggcctgtcagccattcgaattaagaaacctatcaagaccaagttccggctgcctgtcttcaactggacagcactgaaacccaaccagatcagtggcactgtcttcagcgaacttgatgatgagaagatcttggaggacctggatcttgataagtttgaagaattattcaagacaaaagcgcagggccctgcccttgacctcatctgctccaaaaacaagacagcgcaaaaagctgccagcaaggtgactctgttggaagccaatcgtgccaagaacctggccatcaccctacgcaaggctggccgctcggctgaggagatctgcagggccattcatacgtttgacttgcagacactacctgtggacttcgtggagtgcctgatgcgcttcctgcccacagaggctgaggtaaagctgctgcggcaatatgagcgggagcggcagcccctggaggagttggcagctgaggaccgcttcatgctgctcttcagcaaggtggaacggttgacccagcgaatggctggcatggccttcctggggaacttccaggataacctgcagatgctcacaccgcaactcaatgccatcattgcggcgtccgcttccgtcaagtcttcacagaagctgaagcagatgttggagatcatacttgcactggggaactacatgaacagcagcaagcggggagctgtgtatggcttcaagctccagagcctggatctgctgctggataccaagtccactgaccggaagatgacactgcttcatttcatcgccttgacagtgaaggagaaatacccagacctggctaacttctggcatgagctgcactttgttgagaaggctgcagcagtgtccctggagaacgtgctgctggacgtgaaggagctgggccggggcatggagctgattcggcgtgagtgcagcatccatgacaacagcgtcctccggaacttcctcagtaccaatgaaggcaaactagacaagctccagcgggacgccaagacggctgaggaggcctacaatgcagttgtgcgctactttggcgagagtcccaagactacacctccttctgtattcttcccagtatttgtccgattcattcgttcttacaaggaagcagaacaagagaatgaagcccgcaagaagcaggaggaggtaatgcgggagaagcagctggctcaggaagccaagaaactggatgccaagaccccatcccagcggaacaagtggcaacagcaggagttaatagcagagttgaggcggcgccaggccaaggaacaccggcctgtttatgaggggaaggatggtaccatcgaggacatcatcacaggcctccactgccagcctatggttgttcgccaccaagccaggagtgctgcaccgcccagtggtccccctcgggctccaggcccccactgagaccctctcggaggcagaagcacttcacccctcagagtcctacaagtccaaccagtggacctggaattggccaagggctcaggagagggctgtgttgctctctcaaccatgtccgccccagctcttgaggctggatctttctacttgtgccactatgggcactaggtctgtaggtccctggtgcttccagtactgcactttgcccccaaggtctttgacttcatttcctgaagggtcaccaagggtcagctcagggctaggaaaaaccatttccagccttagcctaaacagggcacatagatctctcccactagagcccagagggatgagaggagagagcaactgttctttctttttttttcccttcctttttgcaggcccatggtcagctctggtctagatgtatctaggcttagggagccctgggaccctgccagtctcagttcatctcttaccaggagcaaggccctctgaagcatgggccgtgccagctgtgccctagtgataagggtaagaggagagatgtcaggctcactgcccttatttctctgcccatttcattctaggctcacactgtccttgtcaaggtgggcagaagagcagaggtcttctctgcaccaaccactctctgcagatggctggagaaagggtgtgccaactcttcaccttctttcctcagctacggtttttttttttttttttttttttttggcaggggacaaggagcatggtggtcttggctatttgcttaccttcccgtttctcctctgcccctggaagggaatgtgggggcccacttttttgtacatgtaccacctccctttcctcttactgtacataaacctcagactctccccctctc

SEQ ID NO: 7615 - DNA, 557 bp, Homo sapiens
  source 1..557: mol_type = unassigned DNA; mol_type = unassigned DNA
agctccatgaacctgcctccagacaaggcccggctcctgcggcagtatgacaatgagaagaaatgggatctgatctgtgaccaggaacgattccaggtgaagaatcctccccacacttacattcagaaactccagagcttcttggaccccagtgtaactcggaagaagttcaggaggagggtgcaggagtcaaccaaagtactaagggagctggagatctctcttcgcaccaaccacattgggtgggtgcgggaatttctgaatgatgaaaacaaaggcctggatgtactggtggattacctgtcctttgcccagtgttctgtcatgtgagtaccaccccggggctgaagttggggaccagttgggggaggacatagttccattctactttgataaggaagggtgagagttcaacaatgaagatggaaatgggaatcctggacaggaaggagtagcccaagcagtggtgtggaagtaggcaggcaagcccggagatgtctggggatcagtgaagaatggcacttggctggagtagaagataagatgcattttggaga

SEQ ID NO: 7616 - DNA, 547 bp, Homo sapiens
  source 1..547: mol_type = unassigned DNA; mol_type = unassigned DNA
actggaagaagatggcggctagacaacaaatttccaccgcaaatgtcaacgacccagccgccgactgagcccagaacagcgttcttctcccgcctctccattttcacacgcagccagatggttaagcttctctcctcccaaacgttttttcccctgcctctgtcgggtaagggcttcctcatccctcaatgcctggtccaactatgatctccctcaccccgactcttaacagacccacttaccacaagccatcatcatagctatatataaagatctgggggatgagttttctaggaagagaacaacttttgcaaagccctggggtggaaaagaactttgcacatttgaggaactgcaagaaggccagactggtctacaaggatgctgaggagagtccgagaaggtataggaaagagctccatgaacctgcctccagacaaggcccggctcctgcggcagtatgacaatgagaagaaatgggatctgatctgtgaccaggaacgattccaggtgaagaatcctccccacacttacattcagaaactcc

SEQ ID NO: 7617 - DNA, 2087 bp, Homo sapiens
  source 1..2087: mol_type = unassigned DNA; mol_type = unassigned DNA
gtaggctcactagaacattttctctttcaaactgcccagacggttggacaggacgtagacacacagaagaaaagaagacaaagaacgggtaggaaaattaaaaaggttaccatggggaagaaagtggccatcattggagctggtgtgagtggcttggcctccatcaggagctgtctggaagaggggctggagcccacctgctttgagaagagcaatgacattgggggcctgtggaaattttcagaccatgcagaggagggcagggctagcatttacaaatcagtcttttccaactcttccaaagagatgatgtgtttcccagacttcccatttcccgatgacttccccaactttatgcacaacagcaagatccaggaatatatcattgcatttgccaaagaaaagaacctcctgaagtacatacaatttaagacatttgtatccagtgtaaataaacatcctgattttgcaactactggccagtgggatgttaccactgaaagggatggtaaaaaagaatcggctgtctttgatgctgtaatggtttgttccggacatcatgtgtatcccaacctaccaaaagagtcctttccaggactaaaccactttaaaggcaaatgcttccacagcagggactataaagaaccaggtgtattcaatggaaagcgtgtcctggtggttggcctggggaattcgggctgtgatattgccacagaactcagccgcacagcagaacaggtcatgatcagttccagaagtggctcctgggtgatgagccgggtctgggacaatggttatccttgggacatgctgctcgtcactcgatttggaaccttcctcaagaacaatttaccgacagccatctctgactggttgtacgtgaagcagatgaatgcaagattcaagcatgaaaactatggcttgatgcctttaaatggagtcctgaggaaagagcctgtatttaacgatgagctcccagcaagcattctgtgtggcattgtgtccgtaaagcctaacgtgaaggaattcacagagacctcggccatttttgaggatgggaccatatttgagggcattgactgtgtaatctttgcaacagggtatagttttgcctaccccttccttgatgagtctatcatcaaaagcagaaacaatgagatcattttatttaaaggagtatttcctcctctacttgagaagtcaaccatagcagtgattggctttgtccagtcccttggggctgccattcccacagttgacctccagtcccgctgggcagcacaagtaataaagggaacttgtactttgccttctatggaagacatgatgaatgatattaatgagaaaatggagaaaaagcgcaaatggtttggcaaaagcgagaccatacagacagattacattgtttatatggatgaactctcctccttcattggggcaaagcccaacatcccatggctgtttctcacagatcccaaattggccatggaagtttattttggcccttgtagtccctaccagtttaggctggtgggcccagggcagtggccaggagccagaaatgccatactgacccagtgggaccggtcgttgaaacccatgcagacacgagtggtcgggagacttcagaagccttgcttctttttccattggctgaagctctttgcaattcctattctgttaatcgctgttttccttgtgttgacctaatcatcattttctctaggatttctgaaagttactgacaatacccagacaggggctttgctatttaaaaattaaaattttcacaccacctgcttttctattcagcatcttttgcagtactctgtagacattagtcagtaatacagtgttatttctaggctctgaaatagccactttaagaatcatgtcatgatcttaagagagcactaatcatttctgtttgagttccactaacacttcaaaatcagaactatgttctttatatctaacttaaatcatttcctgaaacattttgacatgattcctttttccttttaaacaatgtatgaaagatgtattttaaatctaaataaagagcaaattaagcagaataattataa

SEQ ID NO: 7618 - DNA, 828 bp, Homo sapiens
  source 1..828: mol_type = unassigned DNA; mol_type = unassigned DNA
tttcaaactgcccagacggttggacaggacgtagacacacagaagaaaagaagacaaagaacgggtaggaaaattaaaaaggttaccatggggaagaaagtggccatcattggagctggtgtgagtggcttggcctccatcaggagctgtctggaagaggggctggagcccacctgctttgagaagagcaatgacattgggggcctgtggaaattttcaacagagtttctctcttgttgcccaggctggagtgcaatggcacaatctgagctcactacaacctccacctcctgggatcaagggattctcctgcctcagcctcccgaatagttgggattacaggtgtgtgccatcacgccccgctaatttttgtatttttagtagagatggggtttcgccatgttggccaggctggtctcgaactcctgacatcaggtgatacacccgcctcggcctcccaaagtgctggaattataggcatgagccaccactcctggccagccatatcttatacacagtgatcttaaccaaagcctcatactcaaatttagtttgcaagacgttgctgaagatagaacgcactgctgatatggctattgagaggaacacagccaaagacagctaatttgtcttttcttgctgctcgaggaagactttaaaatttgaacctggcagcataggttgataaaactgaactgcaacatgtgctacccttcaagaaaaagaaaggatagcccagagggtagagcctcaggccctgagggcagaggcctgagccaaagccttcaagcctgaaggaatttgtcctactggatttcaaaattgctt

SEQ ID NO: 7619 - DNA, 1142 bp, Homo sapiens
  source 1..1142: mol_type = unassigned DNA; mol_type = unassigned DNA
aaactgcccagacggttggacaggacgtagacacacagaagaaaagaagacaaagaacgggtaggaaaattaaaaaggttaccatggggaagaaagtggccatcattggagctggtgtgagtggcttggcctccatcaggagctgtctggaagaggggctggagcccacctgctttgagaagagcaatgacattgggggcctgtggaaattttcaagtttctctcttgttgcccaggctggagtgcaatggcacaatctgagctcactacaacctccacctcctgggatcaagggattctcctgcctcagcctcccgaatagttgggattacaggtgtgtgccatcacgccccgctaatttttgtatttttagtagagatggggtttcgccatgttggccaggctggtctcgaactcctgacatcaggtgatacacccgcctcggcctcccaaagtgctggaattataggcatgagccaccactcctggccagccatatcttatacacagtgatcttaaccaaagcctcatactcaaatttagtttgcaagacgttgctgaagatagaacgcactgctgatatggctattgagaggaacacagccaaagacagctaatttgtcttttcttgctgctcgaggaagactttaaaatttgaacctggcagcataggttgataaaactgaactgcaacatgtgctacccttcaagaaaaagaaaggatagcccagagggtagagcctcaggccctgagggcagaggcctgagccaaagccttcaagcctgaaggaatttgtcctactggatttcaaaattgcttgggattagtgattcttttctttcctcctttttcctccccggttaaatgggaatgtcgataacggttacccatgcttgtcccaccattgtattttggaagaagataacttgttttctagtttcacaggttcacagatagaaattttgcctcatcctggtccatatccagagtctcatttatacctgatttagataatttatatgatgatgagattttggacttttgaattgaaaatatataaatgagagttgagacttgatttcatgctgctatgggttgagactttgaggatgttgggattgggttaatgtattttgcagat

SEQ ID NO: 7620 - DNA, 582 bp, Homo sapiens
  source 1..582: mol_type = unassigned DNA; mol_type = unassigned DNA
cggttggacaggacgtagacacacagaagaaaagaagacaaagaacgggtaggaaaattaaaaaggttaccatggggaagaaagtggccatcattggagctggtgtgagtggcttggcctccatcaggagctgtctggaagaggggctggagcccacctgctttgagaagagcaatgacattgggggcctgtggaaattttcaaggagccatgagtgaaggcgtacaagaggggtcttgccactgaaaaaaataagaaatgccagcatccaccagaagccagaagcggcaaggaatggattctctcctggagcctctgaaaatgaacatggaccatgcagaggagggcagggctagcatttacaaatcagtcttttccaactcttccaaagagatgatgtgtttcccagacttcccatttcccgatgacttccccaactttatgcacaacagcaagatccaggaatatatcattgcatttgccaaagaaaagaacctcctgaagtacatacaatttaagacatttgtatccagtgtaaataaacatcctgattttgcaactactggccagtgggatgttacc

SEQ ID NO: 7621 - DNA, 723 bp, Homo sapiens
  source 1..723: mol_type = unassigned DNA; mol_type = unassigned DNA
gttggacaggacgtagacacacagaagaaaagaagacaaagaacgggtaggaaaattaaaaaggttaccatggggaagaaagtggccatcattggagctggtgtgagtggcttggcctccatcaggagctgtctggaagaggggctggagcccacctgctttgagaagagcaatgacattgggggcctgtggaaattttcagaccatgcagaggagggcagggctagcatttacaaatcagtcttttccaactcttccaaagagatgatgtgtttcccagacttcccatttcccgatgacttccccaactttatgcacaacagcaagatccaggaatatatcattgcatttgccaaagaaaagaacctcctgaagtacatacaatttaagacatttgtatccagtgtaaataaacatcctgattttgcaactactggccagtgggatgttaccactgaaagggatggtaaaaaagaatcggctgtctttgatgctgtaatggtttgttccggacatcatgtgtatcccaacctaccggactataaagaaccaggtgtattcaatggaaagcgtgtcctggtggttggcctggggaattcgggctgtgatattgccacagaactcagccgcacagcagaacaggtcatgatcagttccagaagtggctcctgggtgatgagccgggtctgggacaatggttatccttgggacatgctgctcgtc

SEQ ID NO: 7622 - DNA, 713 bp, Homo sapiens
  source 1..713: mol_type = unassigned DNA; mol_type = unassigned DNA
agaggatggcctgtaataggctgaacaatttaacaatgcccctcctcaaagatatcacatccaaattcctggaacctgtaaatgttatcttacttacaagagaaaagggtatttgcaaatataattaagttaaaaatcttaagatggagagatttttctgcattatgtgggtgagccccaaacgctataatgaatgcatcgttaaaagagagaggcagagggagatttaacacaaagagaagagagaaggtgatgtgatgacctcaacagaaagagagaaatttgaagatgctatgctctatctttgatgatggccagaggagccatgagtgaaggcgtacaagaggggtcttgccactgaaaaaaataagaaatgccagcatccaccagaagccagaagcggcaaggaatggattctctcctggagcctctgaaaatgaacatggaccatgcagaggagggcagggctagcatttacaaatcagtcttttccaactcttccaaagagatgatgtgtttcccagacttcccatttcccgatgacttccccaactttatgcacaacagcaagatccaggaatatatcattgcatttgccaaagaaaagaacctcctgaagtacatacaatttaagacatttgtatccagtgtaaataaacatcctgattttgcaactactggccagtgggatgttaccactgaaagggatggta

SEQ ID NO: 7623 - DNA, 946 bp, Homo sapiens
  source 1..946: mol_type = unassigned DNA; mol_type = unassigned DNA
gcggcggcggcggctggaggaggagagcggcggcggcgggagcagcgaagggggcggcagggatcctccaggctgccggctgggaaggcgtgggcgacccggtgtgtggcgcgcccagagccccgcgtttcagccctagggaaggaagccagttgagggaagttctccatgaatgtacgtcacaatgatgatgaccgaccaaatccctctggaactgccaccattgctgaacggagaggtagccatgatgccccacttggtgaatggagatgcagctcagcaggttattctcgttcaagttaatccaggtgagactttcacaataagagcagaggatggaacacttcagtgcattcaagatgaagtggtgaagagagcctgcgattgaagattttttcatctcagctttttcccccttaccttgttctctctcatgtttcatgatctgtgtcatagatatttcttcattacgagcacttcgcggtgtggcttttcaatgtctgaagtggattaagtggcccacagtcagttctgtgacttgagtttcaaaagtaaaattaccatcaacaatgtgattcaattttattttctatactagctaaaagcaaggaactatattattaacaatcttggctttactgtagtttaaggcaggtgatgatgatgcttattagtccacctgaaagagtccttccaggtttttggaagctttattcctgcttattaccttgcccttgagaagtccttcatggaaagtggaaacactgggttgacttcttttccccatatcctagttgaaagggacagcttatatgtatgttagactgtccaaaagtgtttgtagaacctcattttaaaaaatcaactgtattgtactttttaaaaaatgggatcttaaactctttattaaaaataataaatggaaatgtgttaagcaaaaacatta

SEQ ID NO: 7624 - DNA, 5083 bp, Homo sapiens
  source 1..5083: mol_type = unassigned DNA; mol_type = unassigned DNA
gcggcggcggcggctggaggaggagagcggcggcggcgggagcagcgaagggggcggcagggatcctccaggctgccggctgggaaggcgtgggcgacccggtgtgtggcgcgcccagagccccgcgtttcagccctagggaaggaagccagttgagggaagttctccatgaatgtacgtcacaatgatgatgaccgaccaaatccctctggaactgccaccattgctgaacggagaggtagccatgatgccccacttggtgaatggagatgcagctcagcaggttattctcgttcaagttaatccaggtgagactttcacaataagagcagaggatggaacacttcagtgcattcaaggacctgctgaagttcccatgatgtcacccaatggatccattcctcccattcatgtgcctccaggttatatctcacaggtgattgaagatagtactggagtccgccgggtggtggtcacaccccagtctcctgagtgttatcccccaagctacccctcagccatgtctccaacccatcatctccctccctatctgactcaccatccacattttattcataactcacacacggcttactacccacctgttaccggacctggagatatgccgcctcagttttttccccagcatcatcttccccacacaatatatggtgagcaagaaattataccattttatggaatgtcaacctacatcacccgagaagaccagtacagcaagcctccgcacaaaaaactgaaagaccgccagatcgatcgccagaaccgcctcaacagccctccttcttctatctacaaaagcagctgcacaacagtatacaatggctatgggaagggccatagtggtggaagtggcggaggcggcagcggtagtggtcccggaattaagaaaacagagcgacgagcaagaagcagcccaaagtcgaatgattcagacttgcaagaatatgagttggaagtaaagagggtgcaagacattctttcgggaatagagaaaccacaggtttctaatattcaggcaagagcagttgtgttgtcctgggctccccctgttggactttcctgtggaccccacagtggtctttccttcccctacagttacgaggtggccttatcagacaaaggacgagatggaaaatacaagataatttacagtggagaagaattagaatgtaacctgaaagatcttagaccagcaacagattatcatgtgagggtgtatgccatgtacaattccgtaaagggatcctgctccgagcctgttagcttcaccacccacagctgtgcacccgagtgtcctttcccccctaagctggcacataggagcaaaagttcactaaccctgcagtggaaggcaccaattgacaacggttcaaaaatcaccaactaccttttagagtgggatgagggaaaaagaaatagtggtttcagacagtgcttcttcgggagccagaagcactgcaagttgacaaagctttgtccggcaatggggtacacattcaggctggccgctcgaaacgacattggtaccagtggttatagccaagaggtggtgtgctacacattaggaaatatccctcagatgccttctgcaccaaggctggttcgagctggcatcacatgggtcacgttgcagtggagtaagccagaaggctgttcacccgaggaagtgatcacctacaccttggaaattcaggaggatgaaaatgataaccttttccacccaaaatacactggagaggatttaacctgtactgtgaaaaatctcaaaagaagcacacagtataaattcaggctgactgcttctaatacggaaggaaaaagctgtccaagcgaagttcttgtttgtacgacgagtcctgacaggcctggacctcctaccagaccgcttgtcaaaggcccagttacatctcatggctttagtgtcaaatgggatccccctaaggacaatggtggttcagaaatcctcaagtacttgctagagattactgatggaaattctgaagcgaatcagtgggaagtggcctacagtgggtcggctaccgaatacaccttcacccacttgaaaccaggcactttgtacaaactccgagcatgctgcatcagtaccggcggacacagccagtgttctgaaagtctccctgttcgcacactaagcattgcaccaggtcaatgtcgaccaccgagggttttgggtagaccaaagcacaaagaagtccacttagagtgggatgttcctgcatcggaaagtggctgtgaggtctcagagtacagcgtggagatgacggagcccgaagacgtagcctcggaagtgtaccatggcccagagctggagtgcaccgtcggcaacctgcttcctggaaccgtgtatcgcttccgggtgagggctctgaatgatggagggtatggtccctattctgatgtctcagaaattaccactgctgcagggcctcctggacaatgcaaagcaccttgtatttcttgtacacctgatggatgtgtcttagtgggttgggagagtcctgatagttctggtgctgacatctcagagtacaggttggaatggggagaagatgaagaatccttagaactcatttatcatgggacagacacccgttttgaaataagagacctgttgcctgctgcacagtattgctgtagactacaggccttcaatcaagcaggggcagggccgtacagtgaacttgtcctttgccagacgccagcgtctgcccctgaccccgtctccactctctgtgtcctggaggaggagccccttgatgcctaccctgattcaccttctgcgtgccttgtactgaactgggaagagccgtgcaataacggatctgaaatccttgcttacaccattgatctaggagacactagcattaccgtgggcaacaccaccatgcatgttatgaaagatctccttccagaaaccacctaccggatcagaattcaggctataaatgaaattggagctggaccatttagtcagttcattaaagcaaaaactcggccattaccacccttgcctcctaggctagaatgtgctgctgctggtcctcagagcctgaagctaaaatggggagacagtaactccaagacacatgctgctgaggacattgtgtacacactacagctggaggacagaaacaagaggtttatttcaatctacagaggacccagccacacctacaaggtccagagactgacggaattcacatgctactccttcagaatccaggcagcaagcgaggctggagaagggcccttctcagaaacctataccttcagcacaaccaaaagtgtcccccccaccatcaaagcacctcgagtaacacagttagaaggaaattcatgtgaaattttatgggagacggtaccatcaatgaaaggtgaccctgttaactacattctgcaggtattggttggaagagaatctgagtacaaacaggtgtacaagggagaagaagccacattccaaatctcaggcctccagaccaacacagactacaggttccgcgtatgtgcgtgtcgtcgctgtttagacacctctcaggagctaagcggagccttcagcccctctgcggcttttgtattacaacgaagtgaggtcatgcttacaggggacatggggagcttagatgatcccaaaatgaagagcatgatgcctactgatgaacagtttgcagccatcattgtgcttggctttgcaactttgtccattttatttgcctttatattacagtacttcttaatgaagtaaacccaacaaaactagaggtatgaattaatgctacacattttaatacacacatttattcagatactcccctttttaaagcccttttgttttttgatttatatactctgttttacagatttagctagaaaaaaaatgtcagtgttttggtgcacctttttgaaatgcaaaactaggaaaaggttaaactggatttttttttttaaaaaaaagaaaaaaaaagaagaaaagtataccagataccaaaagctagctttcttatgttttcctttaaattttcagatttaccttcattctgttttcactgatgtcttttgcaagcctttgatttttttttttttgttacagtttagtaatttatattcaccagtcacttcatatgtcttgaacatctgtatctgtaaacatgaatcaccgtgtgtgtacttacagggctaggatttcagtgttgtcagagtattaccacacagcaacagcaacatacagaagatatgttcactcagataagactgccctaaacaaccattttgtcactcagttatttaactgtgtttagctcatttaaatcaaaatgtgtactttaatctaaaatgttttaataatctgtatttcttataattttaacactatgagctgcctgtataagaaatcaagtaaccagaatgcacctataaattatggagcattgtagattttaccacatcaattcatagcagtaactttaagagggcattgtgcaatagttagttgttttcttgttcagctattttaaaggctgctttaacttgtttgtttgtctttgtatataactacttctaatctaatcactagagttattatattctgttatgtttgaccagaattatatgacaagaactggtgacagtttagtgcctctgcccattgtccatgatttacactaattgtgagcagtcttcttatgtgtcagctcattatttttgaaacatttgcctttaggctgttctttgaggtatcaatgaagtgattgaatttcaataccttaattcagtgcacataatactaatgtaacagcagatgaaaattgataaaacccaaaagagagtcatctaaatttgtagttcctatttctgtgggtttgcctggccatggttggagagggaatggtgtttgatggtaaacacagggtgtttggggatcaaggagcctagattctctccctggatctgtcactaacttgctgcgtgacctgaacacgtcactttacctctctgtgcctcagttttcccatgcatgaaaaataaaataaaataaaacggg

SEQ ID NO: 7625 - DNA, 2916 bp, Homo sapiens
  source 1..2916: mol_type = unassigned DNA; mol_type = unassigned DNA
ggcggcgggagcagcgaagggggcggcagggatcctccaggctgccggctgggaaggcgtgggcgacccggtgtgtggcgcgcccagagccccgcgtttcagccctagggaaggaagccagttgagggaagttctccatgaatgtacgtcacaatgatgatgaccgaccaaatccctctggaactgccaccattgctgaacggagaggtagccatgatgccccacttggtgaatggagatgcagctcagcaggttattctcgttcaagttaatccaggtgagactttcacaataagagcagaggatggaacacttcagtgcattcaaggacctgctgaagttcccatgatgtcacccaatggatccattcctcccattcatgtgcctccaggttatatctcacaggtgattgaagatagtactggagtccgccgggtggtggtcacaccccagtctcctgagtgttatcccccaagctacccctcagccatgtctccaacccatcatctccctccctatctgactcaccatccacattttattcataactcacacacggcttactacccacctgttaccggacctggagatatgccgcctcagttttttccccagcatcatcttccccacacaatatatggtgagcaagaaattataccattttatggaatgtcaacctacatcacccgagaagaccagtacagcaagcctccgcacaaaaaactgaaagaccgccagatcgatcgccagaaccgcctcaacagccctccttcttctatctacaaaagcagctgcacaacagtatacaatggctatgggaagggccatagtggtggaagtggcggaggcggcagcggtagtggtcccggaattaagaaaacagagcgacgagcaagaagcagcccaaagtcgaatgattcagacttgcaagaatatgagttggaagtaaagagggtgcaagacattctttcgggaatagagaaaccacaggtttctaatattcaggcaagagcagttgtgttgtcctgggctccccctgttggactttcctgtggaccccacagtggtctttccttcccctacagttacgaggtggccttatcagacaaaggacgagatggaaaatacaagataatttacagtggagaagaattagaatgtaacctgaaagatcttagaccagcaacagattatcatgtgagggtgtatgccatgtacaattccgtaaagggatcctgctccgagcctgttagcttcaccacccacagctgtgcacccgagtgtcctttcccccctaagctggcacataggagcaaaagttcactaaccctgcagtggaaggcaccaattgacaacggttcaaaaatcaccaactaccttttagagtgggatgagggaaaaagaaatagtggtttcagacagtgcttcttcgggagccagaagcactgcaagttgacaaagctttgtccggcaatggggtacacattcaggctggccgctcgaaacgacattggtaccagtggttatagccaagaggtggtgtgctacacattaggaaatatccctcagatgccttctgcaccaaggctggttcgagctggcatcacatgggtcacgttgcagtggagtaagccagaaggctgttcacccgaggaagtgatcacctacaccttggaaattcaggaggatgaaaatgataaccttttccacccaaaatacactggagaggatttaacctgtactgtgaaaaatctcaaaagaagcacacagtataaattcaggctgactgcttctaatacggaaggaaaaagctgtccaagcgaagttcttgtttgtacgacgagtcctgacaggcctggacctcctaccagaccgcttgtcaaaggcccagttacatctcatggctttagtgtcaaatgggatccccctaaggacaatggtggttcagaaatcctcaagtacttgctagagattactgatggaaattctgaaggtgaagtttttggcaattgttttattcaaatccaatagcaagctctgttttctaatatagtaaatgtctttatagtaatagtgagtaatcattaattctaaagatagaattattattacaataaacaaactttagtcacatattggcagtttttctatttcaaacacagcaccagagatcagagtctacttgaaacttacatttgtgttatttaacaatttttctgtatctttttcattggtgttttgttttgtttatcttttgtttttgtttctttggtttggtttgtttttgttttgttttttgagatacgatctctgtcacacaggctggagggcagtggcacaaacatggcccattgcagtctcaaactcctgggcttaagtgactcttctgccacagaagatgaggaagaatacatttttcatagtgatggggtctcactatgttatctaggctggtctcaaactcctggcctcaagcaaccctccaccttggcctcccaaagtgctgggactatagacatgaatcaccacactcagcttccatgtctttttatgaactagggttcctaattaatcagataaatttggtattttcatctcctaacttgccatatgttttctggaaattcttataagcagccgagagtggtggctcacgctgtaatcccagcactttgggaggctgaggtgggtggtcaagagatcaagaccatcctggccaacatggtgaaaccccgtctctactaaaaatacaaaaattagctgggtgtggtggcaggcacctgtagtcccagctacttgggaggctgaggcagaagaattgcttgaacccagcaggcggaggttgcagtgagctgagattgcaccactgcactccagcctggtgacagagtgagactctgtctcaaaaaaaaaaaa

SEQ ID NO: 7626 - DNA, 7904 bp, Homo sapiens
  source 1..7904: mol_type = unassigned DNA; mol_type = unassigned DNA
aagctcgggcgggggagcggggcgcggcgggaaggagcgggcgacccggtgtgtgggccagcggagctccggaagccagttgagggaagttctccatgaatgtacgtcacaatgatgatgaccgaccaaatccctctggaactgccaccattgctgaacggagaggtagccatgatgccccacttggtgaatggagatgcagctcagcaggttattctcgttcaagttaatccaggtgagactttcacaataagagcagaggatggaacacttcagtgcattcaaggacctgctgaagttcccatgatgtcacccaatggatccattcctcccattcatgtgcctccaggttatatctcacaggtgattgaagatagtactggagtccgccgggtggtggtcacaccccagtctcctgagtgttatcccccaagctacccctcagccatgtctccaacccatcatctccctccctatctgactcaccatccacattttattcataactcacacacggcttactacccacctgttaccggacctggagatatgccgcctcagttttttccccagcatcatcttccccacacaatatatggtgagcaagaaattataccattttatggaatgtcaacctacatcacccgagaagaccagtacagcaagcctccgcacaaaaaactgaaagaccgccagatcgatcgccagaaccgcctcaacagccctccttcttctatctacaaaagcagctgcacaacagtatacaatggctatgggaagggccatagtggtggaagtggcggaggcggcagcggtagtggtcccggaattaagaaaacagagcgacgagcaagaagcagcccaaagtcgaatgattcagacttgcaagaatatgagttggaagtaaagagggtgcaagacattctttcgggaatagagaaaccacaggtttctaatattcaggcaagagcagttgtgttgtcctgggctccccctgttggactttcctgtggaccccacagtggtctttccttcccctacagttacgaggtggccttatcagacaaaggacgagatggaaaatacaagataatttacagtggagaagaattagaatgtaacctgaaagatcttagaccagcaacagattatcatgtgagggtgtatgccatgtacaattccgtaaagggatcctgctccgagcctgttagcttcaccacccacagctgtgcacccgagtgtcctttcccccctaagctggcacataggagcaaaagttcactaaccctgcagtggaaggcaccaattgacaacggttcaaaaatcaccaactaccttttagagtgggatgagggaaaaagaaatagtggtttcagacagtgcttcttcgggagccagaagcactgcaagttgacaaagctttgtccggcaatggggtacacattcaggctggccgctcgaaacgacattggtaccagtggttatagccaagaggtggtgtgctacacattaggaaatatccctcagatgccttctgcaccaaggctggttcgagctggcatcacatgggtcacgttgcagtggagtaagccagaaggctgttcacccgaggaagtgatcacctacaccttggaaattcaggaggatgaaaatgataaccttttccacccaaaatacactggagaggatttaacctgtactgtgaaaaatctcaaaagaagcacacagtataaattcaggctgactgcttctaatacggaaggaaaaagctgtccaagcgaagttcttgtttgtacgacgagtcctgacaggcctggacctcctaccagaccgcttgtcaaaggcccagttacatctcatggctttagtgtcaaatgggatccccctaaggacaatggtggttcagaaatcctcaagtacttgctagagattactgatggaaattctgaagcgaatcagtgggaagtggcctacagtgggtcggctaccgaatacaccttcacccacttgaaaccaggcactttgtacaaactccgagcatgctgcatcagtaccggcggacacagccagtgttctgaaagtctccctgttcgcacactaagcattgcaccaggtcaatgtcgaccaccgagggttttgggtagaccaaagcacaaagaagtccacttagagtgggatgttcctgcatcggaaagtggctgtgaggtctcagagtacagcgtggagatgacggagcccgaagacgtagcctcggaagtgtaccatggcccagagctggagtgcaccgtcggcaacctgcttcctggaaccgtgtatcgcttccgggtgagggctctgaatgatggagggtatggtccctattctgatgtctcagaaattaccactgctgcagggcctcctggacaatgcaaagcaccttgtatttcttgtacacctgatggatgtgtcttagtgggttgggagagtcctgatagttctggtgctgacatctcagagtacaggttggaatggggagaagatgaagaatccttagaactcatttatcatgggacagacacccgttttgaaataagagacctgttgcctgctgcacagtattgctgtagactacaggccttcaatcaagcaggggcagggccgtacagtgaacttgtcctttgccagacgccagcgtctgcccctgaccccgtctccactctctgtgtcctggaggaggagccccttgatgcctaccctgattcaccttctgcgtgccttgtactgaactgggaagagccgtgcaataacggatctgaaatccttgcttacaccattgatctaggagacactagcattaccgtgggcaacaccaccatgcatgttatgaaagatctccttccagaaaccacctaccggatcagaattcaggctataaatgaaattggagctggaccatttagtcagttcattaaagcaaaaactcggccattaccacccttgcctcctaggctagaatgtgctgctgctggtcctcagagcctgaagctaaaatggggagacagtaactccaagacacatgctgctgaggacattgtgtacacactacagctggaggacagaaacaagaggtttatttcaatctacagaggacccagccacacctacaaggtccagagactgacggaattcacatgctactccttcagaatccaggcagcaagcgaggctggagaagggcccttctcagaaacctataccttcagcacaaccaaaagtgtcccccccaccatcaaagcacctcgagtaacacagttagaaggaaattcatgtgaaattttatgggagacggtaccatcaatgaaaggtgaccctgttaactacattctgcaggtattggttggaagagaatctgagtacaaacaggtgtacaagggagaagaagccacattccaaatctcaggcctccagaccaacacagactacaggttccgcgtatgtgcgtgtcgtcgctgtttagacacctctcaggagctaagcggagccttcagcccctctgcggcttttgtattacaacgaagtgaggtcatgcttacaggggacatggggagcttagatgatcccaaaatgaagagcatgatgcctactgatgaacagtttgcagccatcattgtgcttggctttgcaactttgtccattttatttgcctttatattacagtacttcttaatgaagtaaacccaacaaaactagaggtatgaattaatgctacacattttaatacacacatttattcagatactcccctttttaaagcccttttgttttttgatttatatactctgttttacagatttagctagaaaaaaaatgtcagtgttttggtgcacctttttgaaatgcaaaactaggaaaaggttaaactggatttttttttttaaaaaaaagaaaaaaaaagaagaaaagtataccagataccaaaagctagctttcttatgttttcctttaaattttcagatttaccttcattctgttttcactgatgtcttttgcaagcctttgatttttttttttttgttacagtttagtaatttatattcaccagtcacttcatatgtcttgaacatctgtatctgtaaacatgaatcaccgtgtgtgtacttacagggctaggatttcagtgttgtcagagtattaccacacagcaacagcaacatacagaagatatgttcactcagataagactgccctaaacaaccattttgtcactcagttatttaactgtgtttagctcatttaaatcaaaatgtgtactttaatctaaaatgttttaataatctgtatttcttataattttaacactatgagctgcctgtataagaaatcaagtaaccagaatgcacctataaattatggagcattgtagattttaccacatcaattcatagcagtaactttaagagggcattgtgcaatagttagttgttttcttgttcagctattttaaaggctgctttaacttgtttgtttgtctttgtatataactacttctaatctaatcactagagttattatattctgttatgtttgaccagaattatatgacaagaactggtgacagtttagtgcctctgcccattgtccatgatttacactaattgtgagcagtcttcttatgtgtcagctcattatttttgaaacatttgcctttaggctgttctttgaggtatcaatgaagtgattgaatttcaataccttaattcagtgcacataatactaatgtaacagcagatgaaaattgataaaacccaaaagagagtcatctaaatttgtagttcctatttctgtgggtttgcctggccatggttggagagggaatggtgtttgatggtaaacacagggtgtttggggatcaaggagcctagattctctccctggatctgtcactaacttgctgcgtgacctgaacacgtcactttacctctctgtgcctcagttttcccatgcatgaaaaataaaataaaataaaacggggattctaatgtttgtaagtgctttgagatctttgaccaacaggtgctattggagtgcaaagtgttactcttacgtgtttattttgagtcatgagataatcaattttaacccaaagtcattggattatttatatgaagtccataatgttcgagtacctcagggacatttaagagttggaggtgcaaatatattccaaaagggtgcaacagacacagtgtatccccctgcttctgtttttgtatatttttgctacttggtttttcttgatcatagctattttgtgcttgatctttattgtctaagatgcagtatcctgtactagcttataatattcccataccaaagtcatggggaaacaaacattattttgtttttggtttatttatactatattctgcatacagtactttaaatgccaattacagtgcaatctttatttattgtaaaattttttaagtgtacttatgtactaattttcccttgtagcatgttatatttttgtgttttatacttttgtaattttaggtcagtcttgttccttggcaacatctgtagtattattaatcttctgacattttcttatgtttttaaaaagataagagcatctagtgcattaaatgccaaaaaaaaaatacattatcagtgattgaaacgtttacatgtacccaaaaaccataatcatctcttggaagaaaatgctgagatcaatgaattattctgtgtgcctatattgacgtagtgagtactagagagttctgtattttattattgactataataattagtttaattagctttgcaaactgatggcatcaaggtaaatatatttttgccaaagttctggccttccaaaactcacccccttatttaaatgtgtgctatgacccactatgaccacagcatctgcattttctaaaaaattccatgcaggtgttttggggagaggtattttttaagcaatgaaaattcaactgagtacaaagccccctcttggggggttggggaagtctcttttttgaaacacttcagaactgctgctataaagaaattctctaattggttgaattttttttttaagtaaatagtactttaggccaaaatttatatgaatatttgatcttcttgagattttcatactatcatttaaccaccaggaagctgaagtgtgtgaagtacaaagctgacagcactttattttattgctctccattatttggtattcattatattccttcagtcagaaaattattactctctatggcactgttttttatcacaaatatgtatatgtgatattgatatataactatatatattgccatcacacacgaacaataaaataaagtgttctattaacctgatctctttgcccttttgctatgtgaggagtgaatgagtggccttctgatgctctgactcttctctgtatgtcaaactcatccctggcacaagaaattccagtcatgtgaagcaaactgccctttgtcctcaaagaaattgttgaaaaagaaaactttttaaagagattttttgcatattctctgccttgttcttatcaacttgaaatgttggcattttctaaccttgttttgttggctacaataattcagtattcatgtcaaaattgagaagtgccctaattgaatgtgtttgaatgttatccttgcacaattctttaaattgaaagataaaatgttttacctcactgttggacatacattccaagcttttcaactctaggagaaaaagaaaatcatgttttcctgtattgtaaattttagactatttcatatacattgtattaaaactgccatatcaattttaatgtatagattttgcaaatattatgctatatgtaatacctaactgtatctgtagtgtatatgtaatatatttatgcccaataaatgttttaattctttctgacttaaatagggtttttctgccatgactaggattgcttttgttgttgttgttgttgtttctttctttttttttttttttgagacggagtcttgctctgtcgccaggctggagtgcagtggcgcgatctcagctcactgcaacctccagctcccaggttcaagtgattcccctgcctcagcctcccaagtagctggggattacaggcactcgccaccatgcccggataattttttttttttttttgagttggagtcttgctctgtcgcccaggctggagtgcagtgacccaatctcggctcactgcaagctccacctcccgggttcatgccattctcctgcctcagcctcccaagtagctgggactacaggtgcccgccaccacgcccggctaatttttttaattttagtagagtcggggtttcaccatgttggccaagatggtctcgatctgacctcgtgatctgcccgcctcggcctcccaaagtgctgggattacaggtgtgagcccccgcacccagccttattcttcccttttaaatacttaaagcacattcagattagttgaaaattcacgtgtttttggaggccaggcaggtggccttctgcagagacagcagcagctcagctcttgctgaccaaggccttggaggactgtgagccacaatcacatatgtccatgtttcaaaagaagctaaatatccagatttcctccatgggccaactaaaaggtgattgtggactatacaggctgccagtttaatcctttatcagagtctctgtggataatgtaccttgttgcctaatactttatctgtctaccaaaactcagtccagatctccctctgttcacctggcacactgggtgcttcctctcccctgacgaactctatagagtgttcatgtcctttcctgcaggtctcattcaacaacaacaacaacaacagcaataaaacacagtgttcctgcta

SEQ ID NO: 7627 - DNA, 408 bp, Homo sapiens
  source 1..408: mol_type = unassigned DNA; mol_type = unassigned DNA
agctcgggcgggggagcggggcgcggcgggaaggagcgggcgacccggtgtgtgggccagcggagctccggaagccagttgagggaagttctccatgaatgtacgtcacaatgatgatgaccgaccaaatccctctggaactgccaccattgctgaacggagaggtagccatgatgccccacttggtgaatggagatgcagctcagcaggttattctcgttcaagttaatccaggtgagactttcacaataagagcagaggatggaacacttcagtgcattcaagatgaagtggtgaagagagcctgcgattgaagattttttcatctcagctttttcccccttaccttgttctctctcatgtttcatgatctgtgtcatagatatttcttcattacgagcacttcgc

SEQ ID NO: 7628 - DNA, 3684 bp, Homo sapiens
  source 1..3684: mol_type = unassigned DNA; mol_type = unassigned DNA
agtgtctaccaccaaactcctaaggctggatggtggaagccagttgagggaagttctccatgaatgtacgtcacaatgatgatgaccgaccaaatccctctggaactgccaccattgctgaacggagaggtagccatgatgccccacttggtgaatggagatgcagctcagcaggttattctcgttcaagttaatccaggtgagactttcacaataagagcagaggatggaacacttcagtgcattcaaggacctgctgaagttcccatgatgtcacccaatggatccattcctcccattcatgtgcctccaggttatatctcacaggtgattgaagatagtactggagtccgccgggtggtggtcacaccccagtctcctgagtgttatcccccaagctacccctcagccatgtctccaacccatcatctccctccctatctgactcaccatccacattttattcataactcacacacggcttactacccacctgttaccggacctggagatatgccgcctcagttttttccccagcatcatcttccccacacaatatatggtgagcaagaaattataccattttatggaatgtcaacctacatcacccgagaagaccagtacagcaagcctccgcacaaaaaactgaaagaccgccagatcgatcgccagaaccgcctcaacagccctccttcttctatctacaaaagcagctgcacaacagtatacaatggctatgggaagggccatagtggtggaagtggcggaggcggcagcggtagtggtcccggaattaagaaaacagagcgacgagcaagaagcagcccaaagtcgaatgattcagacttgcaagaatatgagttggaagtaaagagggtgcaagacattctttcgggaatagagaaaccacaggtttctaatattcaggcaagagcagttgtgttgtcctgggctccccctgttggactttcctgtggaccccacagtggtctttccttcccctacagttacgaggtggccttatcagacaaaggacgagatggaaaatacaagataatttacagtggagaagaattagaatgtaacctgaaagatcttagaccagcaacagattatcatgtgagggtgtatgccatgtacaattccgtaaagggatcctgctccgagcctgttagcttcaccacccacagctgtgcacccgagtgtcctttcccccctaagctggcacataggagcaaaagttcactaaccctgcagtggaaggcaccaattgacaacggttcaaaaatcaccaactaccttttagagtgggatgagggaaaaagaaatagtggtttcagacagtgcttcttcgggagccagaagcactgcaagttgacaaagctttgtccggcaatggggtacacattcaggctggccgctcgaaacgacattggtaccagtggttatagccaagaggtggtgtgctacacattaggaaatatccctcagatgccttctgcaccaaggctggttcgagctggcatcacatgggtcacgttgcagtggagtaagccagaaggctgttcacccgaggaagtgatcacctacaccttggaaattcaggaggatgaaaatgataaccttttccacccaaaatacactggagaggatttaacctgtactgtgaaaaatctcaaaagaagcacacagtataaattcaggctgactgcttctaatacggaaggaaaaagctgtccaagcgaagttcttgtttgtacgacgagtcctgacaggcctggacctcctaccagaccgcttgtcaaaggcccagttacatctcatggctttagtgtcaaatgggatccccctaaggacaatggtggttcagaaatcctcaagtacttgctagagattactgatggaaattctgaagcgaatcagtgggaagtggcctacagtgggtcggctaccgaatacaccttcacccacttgaaaccaggcactttgtacaaactccgagcatgctgcatcagtaccggcggacacagccagtgttctgaaagtctccctgttcgcacactaagcattgcaccaggtcaatgtcgaccaccgagggttttgggtagaccaaagcacaaagaagtccacttagagtgggatgttcctgcatcggaaagtggctgtgaggtctcagagtacagcgtggagatgacggagcccgaagacgtagcctcggaagtgtaccatggcccagagctggagtgcaccgtcggcaacctgcttcctggaaccgtgtatcgcttccgggtgagggctctgaatgatggagggtatggtccctattctgatgtctcagaaattaccactgctgcagggcctcctggacaatgcaaagcaccttgtatttcttgtacacctgatggatgtgtcttagtgggttgggagagtcctgatagttctggtgctgacatctcagagtacaggttggaatggggagaagatgaagaatccttagaactcatttatcatgggacagacacccgttttgaaataagagacctgttgcctgctgcacagtattgctgtagactacaggccttcaatcaagcaggggcagggccgtacagtgaacttgtcctttgccagacgccagcgtctgcccctgaccccgtctccactctctgtgtcctggaggaggagccccttgatgcctaccctgattcaccttctgcgtgccttgtactgaactgggaagagccgtgcaataacggatctgaaatccttgcttacaccattgatctaggagacactagcattaccgtgggcaacaccaccatgcatgttatgaaagatctccttccagaaaccacctaccggatcagaattcaggctataaatgaaattggagctggaccatttagtcagttcattaaagcaaaaactcggccattaccacccttgcctcctaggctagaatgtgctgctgctggtcctcagagcctgaagctaaaatggggagacagtaactccaagacacatgctgctgaggacattgtgtacacactacagctggaggacagaaacaagaggtttatttcaatctacagaggacccagccacacctacaaggtccagagactgacggaattcacatgctactccttcagaatccaggcagcaagcgaggctggagaagggcccttctcagaaacctataccttcagcacaaccaaaagtgtcccccccaccatcaaagcacctcgagtaacacagttagaaggaaattcatgtgaaattttatgggagacggtaccatcaatgaaaggtgaccctgttaactacattctgcaggtattggttggaagagaatctgagtacaaacaggtgtacaagggagaagaagccacattccaaatctcaggcctccagaccaacacagactacaggttccgcgtatgtgcgtgtcgtcgctgtttagacacctctcaggagctaagcggagccttcagcccctctgcggcttttgtattacaacgaagtgaggtcatgcttacaggggacatggggagcttagatgatcccaaaatgaagagcatgatgcctactgatgaacagtttgcagccatcattgtgcttggctttgcaactttgtccattttatttgcctttatattacagtacttcttaatgaagtaaacccaa

SEQ ID NO: 7629 - DNA, 554 bp, Homo sapiens
  source 1..554: mol_type = unassigned DNA; mol_type = unassigned DNA
gagcagacactggaatgtgaatgcattgggaggtgagcccttaaggagagcccaaatgtttaccaaagagaaaatctggtcagaggttattctcgttcaagttaatccaggtgagactttcacaataagagcagaggatggaacacttcagtgcattcaaggacctgctgaagttcccatgatgtcacccaatggatccattcctcccattcatgtgcctccaggttatatctcacaggtaatccatttgatggacttctctactcactatggacactgtcgttgctccaacagaatatatgttgaggcttcaaagccatattccaggagttaatttgggtaccgtagtgctaggtttgccatcattttgtggcaccacatggcgtttcttgtgtcttgccacttgacgtaccagagaaccagagaaaaggagacacagaaggcctactagactgtcctctgccaagtggggtttttatatttgattgtttggttgtgatttctttatggagtctcctgcttcagacatttccttccacctgtaatacaacttt

SEQ ID NO: 7630 - DNA, 678 bp, Homo sapiens
  source 1..678: mol_type = unassigned DNA; mol_type = unassigned DNA
agcagacactggaatgtgaatgcattgggaggtgagcccttaaggagagcccaaatgtttaccaaagagaaaatctggtcagaggttattctcgttcaagttaatccaggtgagactttcacaataagagcagaggatggaacacttcagtgcattcaaggacctgctgaagttcccatgatgtcacccaatggatccattcctcccattcatgtgcctccaggttatatctcacaggtgattgaagatagtactggagtccgccgggtggtggtcacaccccagtctcctgagtgttatcccccaagctacccctcagccatgtctccaacccatcatctccctccctatctgactcaccatccacattttattcataactcacacacggcttactacccacctgttaccggacctggagatatgccgcctcagttttttccccagcatcatcttccccacacaatatatggtgagcaagaaattataccattttatggaatgtcaacctacatcacccgagaagaccagtacagcaagcctccgcacaaaaaactgaaagaccgccagatcgatcgccagaaccgcctcaacagccctccttcttctatctacaaaagcagctgcacaacagtatacaatggctatgggaagggccatagtggtggaagtggcgga

SEQ ID NO: 7631 - DNA, 682 bp, Homo sapiens
  source 1..682: mol_type = unassigned DNA; mol_type = unassigned DNA
gcctacagaagagagaagccatgagagacagttgagctcatattaatgagcactcaccatgccaggcttggttctgggtgctgagaagacagcagcaaacagaactgacaatgaagaaagagttaaacaaataaacatataccagaggaggtgatggcgatcaagaaaatactagatgaagtggtgaagagagcctgcgattgaagattttttcatctcagctttttcccccttaccttgttctctctcatgtttcatgatctgtgtcatagatatttcttcattacgagcacttcgcggtgtggcttttcaatgtctgaagtggattaagtggcccacagtcagttctgtgacttgagtttcaaaagtaaaattaccatcaacaatgtgattcaattttattttctatactagctaaaagcaaggaactatattattaacaatcttggctttactgtagtttaaggcaggtgatgatgatgcttattagtccacctgaaagagtccttccaggtttttggaagctttattcctgcttattaccttgcccttgagaagtccttcatggaaagtggaaacactgggttgacttcttttccccatatcctagttgaaagggacagcttatatgtatgttagactgtccaaaagtgtttgtagaacctcattttaaaaaatcaac

SEQ ID NO: 7632 - DNA, 666 bp, Homo sapiens
  source 1..666: mol_type = unassigned DNA; mol_type = unassigned DNA
ttctctccagtctgtgacctcttattactgtttcttttgcctttttatccagctcttaactcttagcctttttccagataaagtcaaccagagagtagctcatggggttttagaacatatatttggagatcgttctggggttaaggtttattttcttacttagaataatctcttctagtcagtagatcctgcctatcttgaaatggagctgggtggcacacactgagacaaatacctgttgggatgactgtcccctgttaatgctaaccataggtcaggacaagaccaacagataagagcaagagcatgatactcactccgtaagaaattctgttcatctacagaaagccttagggtgaaacaaagataagaatcctggtcttctatgatgagtcactgccactgactgtgtctgttttgttttcagggtgtatgccatgtacaattccgtaaagggatcctgctccgagcctgttagcttcaccacccacagctgtgcacccgagtgtcctttcccccctaagctggcacataggagcaaaagttcactaaccctgcagtggaaggcaccaattgacaacggttcaaaaatcaccaactaccttttagagtgggatgaggtaagcttattttcatattcacccatctaaaacaccatttcaaaaa

SEQ ID NO: 7633 - DNA, 2600 bp, Homo sapiens
  source 1..2600: mol_type = unassigned DNA; mol_type = unassigned DNA
caggtatgacgtttccttgtcctcttgcccttcagcctttggatggtgatcctgagccttcttttacatagctggaaggcatgaggaagcctgctgcctccacactaaatcaactggaggttttccaagagggaatcctaatcagaggagagaaggcctcctttaagctggtgaatgtcactatggcctctgcagtcttgcaagctgtattgcgaaggccccactaggggtctctaagaaccaaggtgaaggtagcagtacagatcttgaaaggaattcctcttggagctttaattttttagatcacatgcctttttcttttatcactttagcaagctcttcattcacttgccttttttcaattatgtgagtgtttcctggtacaaagaaagagatgctgggccagccattgttgtcaagcccagggcagatacggaattggagaaaacctggactgtcttagaggcctctgcaggcctctaggctgtatgagaaaggcgagaacgggtgtactgtaaggtatcaattgattaaagaggctttgaaaaggccatgtttcagttgcacttggggggtaactcttcattaagggaaaaatctttttctttcatcactgcttgttgaaatcttcttaaaggttttgcacatcggtggtccccaaccctctttccaacctaaagaacctctttttaacatcacaaagttttacagacctgcctccaccaccatggtagccattacagcttcagagttcactggttgaaaaaataccgacacaaagccctttatggctcaagaatttttaaatgaattggaagcatccacaaacttttgaaaaacagcactgtatatattgtaaaacattatttcatcaacaaatatttgttgctcacattgatttgaaggctccttgacccgtaacttgataaacattgccttgtgctataccttctttccagtgcttttgaggggggaaaatgaattcttaagtacaattgtcctttggtttccacaggggattggtttcaggacttcccccacctccctgccatgaataccaaaatctatggatgccccagtcactgatataaaatggcatagtctttgcatataacctacacacatccttctctccttaaatcttctctaacttgcttataatatccaatataatgcccacacgtcacttcattcacgtggactcaagatgcagaacccaaggatacagaaggccaactgtatattgtcctgtgacttggtgtgtgtgtctagtagaagatcatggggtggggggatggggaagctgaaggtggttatagggaatatcacacacagcatccttacctggctttgcttactctacctgctaggctgagttgggtagtgtgcaggctgagccttcctcttttaaaatgccaagcctcttcacatgcttctaactgtgtgcctcactttctttctctacagtggttatagccaagaggtggtgtgctacacattaggaaatatccctcagatgccttctgcaccaaggctggttcgagctggcatcacatgggtcacgttgcagtggagtaagccagaaggctgttcacccgaggaagtgatcacctacaccttggaaattcaggaggatgaaaatgataaccttttccacccaaaatacactggagaggatttaacctgtactgtgaaaaatctcaaaagaagcacacagtataaattcaggctgactgcttctaatacggaaggaaaaagctgtccaagcgaagttcttgtttgtacgacgagtcctgacaggcctggacctcctaccagaccgcttgtcaaaggcccagttacatctcatggctttagtgtcaaatggggtatgttttgctgctgctgctactgttttttttttttttttcttttgatagatttttaaaaaatgattcattttagtagtgacaagccaaaaaaattgtggatggtatttgcagaagttttctgcattcggaatatatgtgtgagaaacatcctgagaattctacaaattggaatggacaatttcattaaaatgtaatcgtaatggacaattaaattttagtggaaattaaaatggatgatttttaagagtatctcatttactctatgattttcctgtttacatatttttttctcctatatttttaaggcatggatttgaatgtagtaatctctgcatgcatcgttcattcttcaatagttcatccttaaaaaattagcaatacttaatagaaaaattttgatttataaagttaatattgaaaataaatttcaaaatttaggtttgttaagtaaactttagcatacagaacatttaagttgcaatgaattagggatagttttgtttccattggtgtttgttgtataaagtcttgaactttgggaaattttaacattaaagttcataaggagtttgaggttgtctggcaaaaggatattgtgcctcacctctgttgtgtgaattatttcaataaaatgaatacaattagaaggttgacaattaatatgtaaaagtgttatgcgtatcatttttactaatgtcataataatattaactaataggcaaaaaaaaa

SEQ ID NO: 7634 - DNA, 772 bp, Homo sapiens
  source 1..772: mol_type = unassigned DNA; mol_type = unassigned DNA
aagaaatacctagaatttgatcaccaacaattccaagtatatttttattcattaaaaattaaactgcagtgggcatctgacttagttttcttggatgtcctctgagaaatatgaaagcagattgccctgttttgtcaaaaatcagcatatttttatttcatgtcccaagaaagggaaaatattttgtcaaccaactaattattttacaattaaaaaaatgacagacatctactactcagggactgtatataggagaaaaacttacacacattgaattgaaagtgaaaatcattgggtaatatttgttaattagttgtgttgatgatgatgttagcctagcttttatttggttataagcttttgtatgcacacacattcacaaacacatacacgcatatatacatacgtgtgtgtgcgtgtgttttctttcagtatggtccctattctgatgtctcagaaattaccactgctgcagggcctcctggacaatgcaaagcaccttgtatttcttgtacacctgatggatgtgtcttagtgggttgggagagtcctgatagttctggtgctgacatctcagagtacaggttggaatggggagaagatgaagaatccttagaactcatttatcatgggacagacacccgttttgaaataagagacctgttgcctgctgcacagtattgctgtagactacaggccttcaatcaagcaggggcagggccgtacagtgaacttgtcctttgccagacgccagcgtctgcccctgaccccg

SEQ ID NO: 7635 - DNA, 1976 bp, Homo sapiens
  source 1..1976: mol_type = unassigned DNA; mol_type = unassigned DNA
agcaaatgctcactaccactaataagaacatttctaaatctgatgttctgaggatttttagagcttatagtagcaaaaagaaaagggaaattctatccgagatgtcctttgttgtaggcctaatgagaaaaggttgaagataaagttctggtactcatttaagtgtaatattgaaaattgatattaccgaatctggaacaaccaatttaaaataaggaaagaaagacactgtgttttctaggttaaaaatgcccagctggcaggggccaaaggagtcattctctactccgaccctgctgactactttgctcctggggtgaagtcctatccagatggttggaatcttcctggaggtggtgtccagcgtggaaatatcctaaatctgaatggtgcaggagaccctctcacaccaggttacccagcaaatgaatatgcttataggcgtggaattgcagaggctgttggtcttccaagtattcctgttcatccaattggatactatgatgcacagaagctcctagaaaaaatgggtggctcagcaccaccagatagcagctggagaggaagtctcaaagtgccctacaatgttggacctggctttactggaaacttttctacacaaaaagtcaagatgcacatccactctaccaatgaagtgacaagaatttacaatgtgataggtactctcagaggagcagtggaaccagacagatatgtcattctgggaggtcaccgggactcatgggtgtttggtggtattgaccctcagagtggagcagctgttgttcatgaaattgtgaggagctttggaacactgaaaaaggaagggtggagacctagaagaacaattttgtttgcaagctgggatgcagaagaatttggtcttcttggttctactgagtgggcagaggagaattcaagactccttcaagagcgtggcgtggcttatattaatgctgactcatctatagaaggaaactacactctgagagttgattgtacaccgctgatgtacagcttggtacacaacctaacaaaagagctgaaaagccctgatgaaggctttgaaggcaaatctctttatgaaagttggactaaaaaaagtccttccccagagttcagtggcatgcccaggataagcaaattgggatctggaaatgattttgaggtgttcttccaacgacttggaattgcttcaggcagagcacggtatactaaaaattgggaaacaaacaaattcagcggctatccactgtatcacagtgtctatgaaacatatgagttggtggaaaagttttatgatccaatgtttaaatatcacctcactgtggcccaggttcgaggagggatggtgtttgagctagccaattccatagtgctcccttttgattgtcgagattatgctgtagttttaagaaagtatgctgacaaaatctacagtatttctatgaaacatccacaggaaatgaagacatacagtgtatcatttgattcacttttttctgcagtaaagaattttacagaaattgcttccaagttcagtgagagactccaggactttgacaaaagcaacccaatagtattaagaatgatgaatgatcaactcatgtttctggaaagagcatttattgatccattagggttaccagacaggcctttttataggcatgtcatctatgctccaagcagccacaacaagtatgcaggggagtcattcccaggaatttatgatgctctgtttgatattgaaagcaaagtggacccttccaaggcctggggagaagtgaagagacagatttatgttgcagccttcacagtgcaggcagctgcagagactttgagtgaagtagcctaagaggattctttagagaatccgtattgaatttgtgtggtatgtcactcagaaagaatcgtaatgggtatattgataaattttaaaattggtatatttgaaataaagttgaatattatatata

SEQ ID NO: 7636 - DNA, 2635 bp, Homo sapiens
  source 1..2635: mol_type = unassigned DNA; mol_type = unassigned DNA
ctcaaaaggggccggatttccttctcctggaggcagatgttgcctctctctctcgctcggattggttcagtgcactctagaaacactgctgtggtggagaaactggaccccaggtctggagcgaattccagcctgcagggctgataagcgaggcattagtgagattgagagagactttaccccgccgtggtggttggagggcgcgcagtagagcagcagcacaggcgcgggtcccgggaggccggctctgctcgcgccgagatgtggaatctccttcacgaaaccgactcggctgtggccaccgcgcgccgcccgcgctggctgtgcgctggggcgctggtgctggcgggtggcttctttctcctcggcttcctcttcgggtggtttataaaatcctccaatgaagctactaacattactccaaagcataatatgaaagcatttttggatgaattgaaagctgagaacatcaagaagttcttatataattttacacagataccacatttagcaggaacagaacaaaactttcagcttgcaaagcaaattcaatcccagtggaaagaatttggcctggattctgttgagctagcacattatgatgtcctgttgtcctacccaaataagactcatcccaactacatctcaataattaatgaagatggaaatgagattttcaacacatcattatttgaaccacctcctccaggatatgaaaatgtttcggatattgtaccacctttcagtgctttctctcctcaaggaatgccagagggcgatctagtgtatgttaactatgcacgaactgaagacttctttaaattggaacgggacatgaaaatcaattgctctgggaaaattgtaattgccagatatgggaaagttttcagaggaaataaggttaaaaatgcccagctggcaggggccaaaggagtcattctctactccgaccctgctgactactttgctcctggggtgaagtcctatccagatggttggaatcttcctggaggtggtgtccagcgtggaaatatcctaaatctgaatggtgcaggagaccctctcacaccaggttacccagcaaatgaatatgcttataggcgtggaattgcagaggctgttggtcttccaagtattcctgttcatccaattggatactatgatgcacagaagctcctagaaaaaatgggtggctcagcaccaccagatagcagctggagaggaagtctcaaagtgccctacaatgttggacctggctttactggaaacttttctacacaaaaagtcaagatgcacatccactctaccaatgaagtgacaagaatttacaatgtgataggtactctcagaggagcagtggaaccagacagatatgtcattctgggaggtcaccgggactcatgggtgtttggtggtattgaccctcagagtggagcagctgttgttcatgaaattgtgaggagctttggaacactgaaaaaggaagggtggagacctagaagaacaattttgtttgcaagctgggatgcagaagaatttggtcttcttggttctactgagtgggcagaggagaattcaagactccttcaagagcgtggcgtggcttatattaatgctgactcatctatagaaggaaactacactctgagagttgattgtacaccgctgatgtacagcttggtacacaacctaacaaaagagctgaaaagccctgatgaaggctttgaaggcaaatctctttatgaaagttggactaaaaaaagtccttccccagagttcagtggcatgcccaggataagcaaattgggatctggaaatgattttgaggtgttcttccaacgacttggaattgcttcaggcagagcacggtatactaaaaattgggaaacaaacaaattcagcggctatccactgtatcacagtgtctatgaaacatatgagttggtggaaaagttttatgatccaatgtttaaatatcacctcactgtggcccaggttcgaggagggatggtgtttgagctagccaattccatagtgctcccttttgattgtcgagattatgctgtagttttaagaaagtatgctgacaaaatctacagtatttctatgaaacatccacaggaaatgaagacatacagtgtatcatttgattcacttttttctgcagtaaagaattttacagaaattgcttccaagttcagtgagagactccaggactttgacaaaagcaacccaatagtattaagaatgatgaatgatcaactcatgtttctggaaagagcatttattgatccattagggttaccagacaggcctttttataggcatgtcatctatgctccaagcagccacaacaagtatgcaggggagtcattcccaggaatttatgatgctctgtttgatattgaaagcaaagtggacccttccaaggcctggggagaagtgaagagacagatttatgttgcagccttcacagtgcaggcagctgcagagactttgagtgaagtagcctaagaggattctttagagaatccgtattgaatttgtgtggtatgtcactcagaaagaatcgtaatgggtatattgataaattttaaaattggtatatttgaaataaagttgaatattatatata

SEQ ID NO: 7637 - DNA, 2403 bp, Homo sapiens
  source 1..2403: mol_type = unassigned DNA; mol_type = unassigned DNA
ggctgataagcgaggcattagtgagattgagagagactttaccccgccgtggtggttggagggcgcgcagtagagcagcagcacaggcgcgggtcccgggaggccggctctgctcgcgccgagatgtggaatctccttcacgaaaccgactcggctgtggccaccgcgcgccgcccgcgctggctgtgcgctggggcgctggtgctggcgggtggcttctttctcctcggcttcctcttcgggtggtttataaaatcctccaatgaagctactaacattactccaaagcataatatgaaagcatttttggatgaattgaaagctgagaacatcaagaagttcttatataattttacacagataccacatttagcaggaacagaacaaaactttcagcttgcaaagcaaattcaatcccagtggaaagaatttggcctggattctgttgagctagcacattatgatgtcctgttgtcctacccaaataagactcatcccaactacatctcaataattaatgaagatggaaatgagattttcaacacatcattatttgaaccacctcctccaggatatgaaaatgtttcggatattgtaccacctttcagtgctttctctcctcaaggaatgccagagggcgatctagtgtatgttaactatgcacgaactgaagacttctttaaattggaacgggacatgaaaatcaattgctctgggaaaattgtaattgccagatatgggaaagttttcagaggaaataaggttaaaaatgcccagctggcaggggccaaaggagtcattctctactccgaccctgctgactactttgctcctggggtgaagtcctatccagatggttggaatcttcctggaggtggtgtccagcgtggaaatatcctaaatctgaatggtgcaggagaccctctcacaccaggttacccagcaaatgaatatgcttataggcgtggaattgcagaggctgttggtcttccaagtattcctgttcatccaattggatactatgatgcacagaagctcctagaaaaaatgggtggctcagcaccaccagatagcagctggagaggaagtctcaaagtgccctacaatgttggacctggctttactggaaacttttctacacaaaaagtcaagatgcacatccactctaccaatgaagtgacaagaatttacaatgtgataggtactctcagaggagcagtggaaccagacagatatgtcattctgggaggtcaccgggactcatgggtgtttggtggtattgaccctcagagtggagcagctgttgttcatgaaattgtgaggagctttggaacactgaaaaaggaagggtggagacctagaagaacaattttgtttgcaagctgggatgcagaagaatttggtcttcttggttctactgagtgggcagaggagaattcaagactccttcaagagcgtggcgtggcttatattaatgctgactcatctatagaaggaaactacactctgagagttgattgtacaccgctgatgtacagcttggtacacaacctaacaaaagagctgaaaagccctgatgaaggctttgaaggcaaatctctttatgaaagttggactaaaaaaagtccttccccagagttcagtggcatgcccaggataagcaaattgggatctggaaatgattttgaggtgttcttccaacgacttggaattgcttcaggcagagcacggtatactaaaaattgggaaacaaacaaattcagcggctatccactgtatcacagtgtctatgaaacatatgagttggtggaaaagttttatgatccaatgtttaaatatcacctcactgtggcccaggttcgaggagggatggtgtttgagctagccaattccatagtgctcccttttgattgtcgagattatgctgtagttttaagaaagtatgctgacaaaatctacagtatttctatgaaacatccacaggaaatgaagacatacagtgtatcatttgattcacttttttctgcagtaaagaattttacagaaattgcttccaagttcagtgagagactccaggactttgacaaaagcaagcatgtcatctatgctccaagcagccacaacaagtatgcaggggagtcattcccaggaatttatgatgctctgtttgatattgaaagcaaagtggacccttccaaggcctggggagaagtgaagagacagatttatgttgcagccttcacagtgcaggcagctgcagagactttgagtgaagtagcctaagaggattctttagagaatccgtattgaatttgtgtggtatgtcactcagaaagaatcgtaatgggtatattgataaattttaaaattggtatatttgaaataaagttgaatattatatat

SEQ ID NO: 7638 - DNA, 2192 bp, Homo sapiens
  source 1..2192: mol_type = unassigned DNA
agtgcactctagaaacactgctgtggtggagaaactggaccccaggtctggagcgaattccagcctgcagggctgataagcgaggcattagtgagattgagagagactttaccccgccgtggtggttggagggcgcgcagtagagcagcagcacaggcgcgggtcccgggaggccggctctgctcgcgccgagatgtggaatctccttcacgaaaccgactcggctgtggccaccgcgcgccgcccgcgctggctgtgcgctggggcgctggtgctggcgggtggcttctttctcctcggcttcctcttcgggtggtttataaaatcctccaatgaagctactaacattactccaaagcataatatgaaagcatttttggatgaattgaaagctgagaacatcaagaagttcttataattttcaacacatcattatttgaaccacctcctccaggatatgaaaatgtttcggatattgtaccacctttcagtgctttctctcctcaaggaatgccagagggcgatctagtgtatgttaactatgcacgaactgaagacttctttaaattggaacgggacatgaaaatcaattgctctgggaaaattgtaattgccagatatgggaaagttttcagaggaaataagaatatgcttataggcgtggaattgcagaggctgttggtcttccaagtattcctgttcatccaattggatactatgatgcacagaagctcctagaaaaaatgggtggctcagcaccaccagatagcagctggagaggaagtctcaaagtgccctacaatgttggacctggctttactggaaacttttctacacaaaaagtcaagatgcacatccactctaccaatgaagtgacaagaatttacaatgtgataggtactctcagaggagcagtggaaccagacagatatgtcattctgggaggtcaccgggactcatgggtgtttggtggtattgaccctcagagtggagcagctgttgttcatgaaattgtgaggagctttggaacactgaaaaaggaagggtggagacctagaagaacaattttgtttgcaagctgggatgcagaagaatttggtcttcttggttctactgagtgggcagaggagaattcaagactccttcaagagcgtggcgtggcttatattaatgctgactcatctatagaaggaaactacactctgagagttgattgtacaccgctgatgtacagcttggtacacaacctaacaaaagagctgaaaagccctgatgaaggctttgaaggcaaatctctttatgaaagttggactaaaaaaagtccttccccagagttcagtggcatgcccaggataagcaaattgggatctggaaatgattttgaggtgttcttccaacgacttggaattgcttcaggcagagcacggtatactaaaaattgggaaacaaacaaattcagcggctatccactgtatcacagtgtctatgaaacatatgagttggtggaaaagttttatgatccaatgtttaaatatcacctcactgtggcccaggttcgaggagggatggtgtttgagctagccaattccatagtgctcccttttgattgtcgagattatgctgtagttttaagaaagtatgctgacaaaatctacagtatttctatgaaacatccacaggaaatgaagacatacagtgtatcatttgattcacttttttctgcagtaaagaattttacagaaattgcttccaagttcagtgagagactccaggactttgacaaaagcaacccaatagtattaagaatgatgaatgatcaactcatgtttctggaaagagcatttattgatccattagggttaccagacaggcctttttataggcatgtcatctatgctccaagcagccacaacaagtatgcaggggagtcattcccaggaatttatgatgctctgtttgatattgaaagcaaagtggacccttccaaggcctggggagaagtgaagagacagatttatgttgcagccttcacagtgcaggcagctgcagagactttgagtgaagtagcctaagaggattctttagagaatccgtattgaatttgtgtggtatgtcactcagaaagaatcgtaatgggtatattgataaattttaaaattggtatatttgaaataaagttgaatattatatat

SEQ ID NO: 7639 - DNA, 2697 bp, Homo sapiens
  source 1..2697: mol_type = unassigned DNA
agatgttgcctctctctctcgctcggattggttcagtgcactctagaaacactgctgtggtggagaaactggaccccaggtctggagcgaattccagcctgcagggctgataagcgaggcattagtgagattgagagagactttaccccgccgtggtggttggagggcgcgcagtagagcagcagcacaggcgcgggtcccgggaggccggctctgctcgcgccgagatgtggaatctccttcacgaaaccgactcggctgtggccaccgcgcgccgcccgcgctggctgtgcgctggggcgctggtgctggcgggtggcttctttctcctcggcttcctcttcggttaaaagccaactgcaaggtctaatgactgcaggatctagctatccattgtttctggccgcctatgcgtgcactgggtgtctggcagagaggctggggtggtttataaaatcctccaatgaagctactaacattactccaaagcataatatgaaagcatttttggatgaattgaaagctgagaacatcaagaagttcttatataattttacacagataccacatttagcaggaacagaacaaaactttcagcttgcaaagcaaattcaatcccagtggaaagaatttggcctggattctgttgagctagcacattatgatgtcctgttgtcctacccaaataagactcatcccaactacatctcaataattaatgaagatggaaatgagattttcaacacatcattatttgaaccacctcctccaggatatgaaaatgtttcggatattgtaccacctttcagtgctttctctcctcaaggaatgccagagggcgatctagtgtatgttaactatgcacgaactgaagacttctttaaattggaacgggacatgaaaatcaattgctctgggaaaattgtaattgccagatatgggaaagttttcagaggaaataaggttaaaaatgcccagctggcaggggccaaaggagtcattctctactccgaccctgctgactactttgctcctggggtgaagtcctatccagatggttggaatcttcctggaggtggtgtccagcgtggaaatatcctaaatctgaatggtgcaggagaccctctcacaccaggttacccagcaaatgaatatgcttataggcgtggaattgcagaggctgttggtcttccaagtattcctgttcatccaattggatactatgatgcacagaagctcctagaaaaaatgggtggctcagcaccaccagatagcagctggagaggaagtctcaaagtgccctacaatgttggacctggctttactggaaacttttctacacaaaaagtcaagatgcacatccactctaccaatgaagtgacaagaatttacaatgtgataggtactctcagaggagcagtggaaccagacagatatgtcattctgggaggtcaccgggactcatgggtgtttggtggtattgaccctcagagtggagcagctgttgttcatgaaattgtgaggagctttggaacactgaaaaaggaagggtggagacctagaagaacaattttgtttgcaagctgggatgcagaagaatttggtcttcttggttctactgagtgggcagaggagaattcaagactccttcaagagcgtggcgtggcttatattaatgctgactcatctatagaaggaaactacactctgagagttgattgtacaccgctgatgtacagcttggtacacaacctaacaaaagagctgaaaagccctgatgaaggctttgaaggcaaatctctttatgaaagttggactaaaaaaagtccttccccagagttcagtggcatgcccaggataagcaaattgggatctggaaatgattttgaggtgttcttccaacgacttggaattgcttcaggcagagcacggtatactaaaaattgggaaacaaacaaattcagcggctatccactgtatcacagtgtctatgaaacatatgagttggtggaaaagttttatgatccaatgtttaaatatcacctcactgtggcccaggttcgaggagggatggtgtttgagctagccaattccatagtgctcccttttgattgtcgagattatgctgtagttttaagaaagtatgctgacaaaatctacagtatttctatgaaacatccacaggaaatgaagacatacagtgtatcatttgattcacttttttctgcagtaaagaattttacagaaattgcttccaagttcagtgagagactccaggactttgacaaaagcaacccaatagtattaagaatgatgaatgatcaactcatgtttctggaaagagcatttattgatccattagggttaccagacaggcctttttataggcatgtcatctatgctccaagcagccacaacaagtatgcaggggagtcattcccaggaatttatgatgctctgtttgatattgaaagcaaagtggacccttccaaggcctggggagaagtgaagagacagatttatgttgcagccttcacagtgcaggcagctgcagagactttgagtgaagtagcctaagaggattctttagagaatccgtattgaatttgtgtggtatgtcactcagaaagaatcgtaatgggtatattgataaattttaaaattggtatatttgaaataaagttgaatattatatat

SEQ ID NO: 7640 - DNA, 2225 bp, Homo sapiens
  source 1..2225: mol_type = unassigned DNA
ccaccgcgcgccgcccgcgctggctgtgcgctggggcgctggtgctggcgggtggcttctttctcctcggcttcctcttcggttaaaagccaactgcaaggtctaatgactgcaggatctagctatccattgtttctggccgcctatgcgtgcactgggtgtctggcagagaggctggggtggtttataaaatcctccaatgaagctactaacattactccaaagcataatatgaaagcatttttggatgaattgaaagctgagaacatcaagaagttcttatataattttacacagataccacatttagcaggaacagaacaaaactttcagcttgcaaagcaaattcaatcccagtggaaagaatttggcctggattctgttgagctagcacattatgatgtcctgttgtcctacccaaataagactcatcccaactacatctcaataattaatgaagatggaaatgagattttcaacacatcattatttgaaccacctcctccaggatatgaaaatgtttcggatattgtaccacctttcagtgctttctctcctcaaggaatgccagagggcgatctagtgtatgttaactatgcacgaactgaagacttctttaaattggaacgggacatgaaaatcaattgctctgggaaaattgtaattgccagatatgggaaagttttcagaggaaataaggttaaaaatgcccagctggcaggggccaaaggagtcattctctactccgaccctgctgactactttgctcctggggtgaagtcctatccagatggttggaatcttcctggaggtggtgtccagcgtggaaatatcctaaatctgaatggtgcaggagaccctctcacaccaggttacccagcaaatgaatatgcttataggcgtggaattgcagaggctgttggtcttccaagtattcctgttcatccaattggatactatgatgcacagaagctcctagaaaaaatgggtggctcagcaccaccagatagcagctggagaggaagtctcaaagtgccctacaatgttggacctggctttactggaaacttttctacacaaaaagtcaagatgcacatccactctaccaatgaagtgacaagaatttacaatgtgataggtactctcagaggagcagtggaaccagacagatatgtcattctgggaggtcaccgggactcatgggtgtttggtggtattgaccctcagagtggagcagctgttgttcatgaaattgtgaggagctttggaacactgaaaaaggaagggtggagacctagaagaacaattttgtttgcaagctgggatgcagaagaatttggtcttcttggttctactgagtgggcagaggagaattcaagactccttcaagagcgtggcgtggcttatattaatgctgactcatctatagaaggaaactacactctgagagttgattgtacaccgctgatgtacagcttggtacacaacctaacaaaagagctgaaaagccctgatgaaggctttgaaggcaaatctctttatgaaagttggactaaaaaaagtccttccccagagttcagtggcatgcccaggataagcaaattgggatctggaaatgattttgaggtgttcttccaacgacttggaattgcttcaggcagagcacggtatactaaaaattgggaaacaaacaaattcagcggctatccactgtatcacagtgtctatgaaacatatgagttggtggaaaagttttatgatccaatgtttaaatatcacctcactgtggcccaggttcgaggagggatggtgtttgagctagccaattccatagtgctcccttttgattgtcgagattatgctgtagttttaagaaagtatgctgacaaaatctacagtatttctatgaaacatccacaggaaatgaagacatacagtgtatcatttgattcacttttttctgcagtaaagaattttacagaaattgcttccaagttcagtgagagactccaggactttgacaaaagcaagcatgtcatctatgctccaagcagccacaacaagtatgcaggggagtcattcccaggaatttatgatgctctgtttgatattgaaagcaaagtggacccttccaaggcctggggagaagtgaagagacagatttatgttgcagccttcacagtgcaggcagctgcagagactttgagtgaagtagcctaagagga

SEQ ID NO: 7641 - DNA, 498 bp, Homo sapiens
  source 1..498: mol_type = unassigned DNA; mol_type = unassigned DNA
aattgcttcaggcagagcacggtatactaaaaattgggaaacaaacaaattcagcggctatccactgtatcacagtgtctatgaaacatatgagttggtggaaaagttttatgatccaatgtttaaatatcacctcactgtggcccaggttcgaggagggatggtgtttgagctagccaattccatagtgctcccttttgattgtcgagattatgctgtagttttaagaaagtatgctgacaaaatctacagtatttctatgaaacatccacaggaaatgaagacatacagtgtatcatttggtatgttacccttcctttttcaaattcctcatctgtatggttctattaatctcctaaatataatgggctatcttaggtcatttattatttattgctatttcaagtgatccaatattctgtttatgtctataaatgtattttccattttatggatgctcacgtcttataatataaaaatataaataccttgtaaaac

SEQ ID NO: 7642 - DNA, 611 bp, Homo sapiens
  source 1..611: mol_type = unassigned DNA; mol_type = unassigned DNA
tagaaaaatgggtggctcagcaccaccagatagcagctggagaggaagtctcaaagtgccctacaatgttggacctggctttactggaaacttttctacacaaaaagtcaagatgcacatccactctaccaatgaagtgacaagaatttacaatgtgataggtactctcagaggagcagtggaaccagacagatatgtcattctgggaggtcaccgggactcatgggtgtttggtggtattgaccctcagagtggagcagctgttgttcatgaaattgtgaggagctttggaacactgaaaaaggaagggtggagacctagaagaacaattttgtttgcaagctgggatgcagaagaatttggtcttcttggttctactgagtgggcagaggagaattcaagactccttcaagagcgtggcgtggcttatattaatgctgactcatctatagaaggaaactacactctgagagttgattgtacaccgctgatgtacagcttggtacacaacctaacaaaagaggtactgtaaaatctgaggcaactagcgattggagtcgaccccccagcacaacacagcagccctgcagaaaagtggctagactgtttaa

SEQ ID NO: 7643 - DNA, 387 bp, Homo sapiens
  source 1..387: mol_type = unassigned DNA; mol_type = unassigned DNA
gcgatctagtgtatgttaactatgcacgaactgaagacttctttaaattggaacgggacatgaaaatcaattgctctgggaaaattgtaattgccagatatgggaaagttttcagaggaaataaggttaaaaatgcccagctggcaggggccaaaggagtcattctctactccgaccctgctgactactttgctcctggggtgaagtcctatccagatggttggaatcttcctggaggtggtgtccagcgtggaaatatcctaaatctgaatggtgcaggagaccctctcacaccaggttacccagcaaatggtgaatgatcaatccttgaatatcataggaaacttaacatttgaaagagactttattaaagaatttcctttggta

SEQ ID NO: 7644 - DNA, 567 bp, Homo sapiens
  source 1..567: mol_type = unassigned DNA; mol_type = unassigned DNA
tggcgggtggcttctttctcctcggcttcctcttcggttaaaagccaactgcaaggtctaatgactgcaggatctagctatccattgtttctggccgcctatgcgtgcactgggtgtctggcagagaggctggggtggtttataaaatcctccaatgaagctactaacattactccaaagcataatatgaaagcatttttggatgaattgaaagctgagaacatcaagaagttcttatataattttacacagataccacatttagcaggaacagaacaaaactttcagcttgcaaagcaaattcaatcccagtggaaagaatttggcctggattctgttgagctagcacattatgatgtcctgttgtcctacccaaataagactcatcccaactacatctcaataattaatgaagatggaaatgagattttcaacacatcattatttgaaccacctcctccaggatatgaaaatgtttcggatattgtaccacctttcagtgctttctctcctcaaggaatgccagaggtaaaaacacagtgcaacaaataaaaatgacaaaaagaa

SEQ ID NO: 7645 - DNA, 751 bp, Homo sapiens
  source 1..751: mol_type = unassigned DNA; mol_type = unassigned DNA
tagaaacactgctgtggtggagaaactggaccccaggtctggagcgaattccagcctgcagggctgataagcgaggcattagtgagattgagagagactttaccccgccgtggtggttggagggcgcgcagtagagcagcagcacaggcgcgggtcccgggaggccggctctgctcgcgccgagatgtggaatctccttcacgaaaccgactcggctgtggccaccgcgcgccgcccgcgctggctgtgcgctggggcgctggtgctggcgggtggcttctttctcctcggcttcctcttcgtgaaagtaggcaagagaaattaaaattcagaaatatctcacctaatgtcagagggtggtttataaaatcctccaatgaagctactaacattactccaaagcataatatgaaagcatttttggatgaattgaaagctgagaacatcaagaagttcttatataattttacacagataccacatttagcaggaacagaacaaaactttcagcttgcaaagcaaattcaatcccagtggaaagaatttggcctggattctgttgagctagcacattatgatgtcctgttgtcctacccaaataagactcatcccaactacatctcaataattaatgaagatggaaatgagattttcaacacatcattatttgaaccacctcctccaggatatgaaaatgtttcggatattgtaccacctttcagtgctttctctcctcaaggaatgccagagg

SEQ ID NO: 7646 - DNA, 540 bp, Homo sapiens
  source 1..540: mol_type = unassigned DNA; mol_type = unassigned DNA
atgtggggtgagcacccctcgagttaggaggagggtagctgggaacggtgcagggctgagttctcgacaagctgctggtaggacagtcactcaggttgagggtagaactgagagaacctgaaactgggcgtaggaaggttccaagtgctggagccctgcaagacagaggaagttttttttttgcttttgttttgttttgttttgttttgtttgtttgtttgtttttttacctctctgtgcattctttcttccttggaagtaacagaggcaagcttgggaactgtgtgaaccagggtggtttataaaatcctccaatgaagctactaacattactccaaagcataatatgaaagcatttttggatgaattgaaagctgagaacatcaagaagttcttatataattttacacagataccacatttagcaggaacagaacaaaactttcagcttgcaaagcaaattcaatcccagtggaaagaatttggcctggattctgttgagctagcacattatgatgtcctgttgtcctacccaaataa

SEQ ID NO: 7647 - DNA, 660 bp, Homo sapiens
  source 1..660: mol_type = unassigned DNA; mol_type = unassigned DNA
gcagatgttgcctctctctctcgctcggattggttcagtgcactctagaaacactgctgtggtggagaaactggaccccaggtctggagcgaattccagcctgcagggctgataagcgaggcattagtgagattgagagagactttaccccgccgtggtggttggagggcgcgcagtagagcagcagcacaggcgcgggtcccgggaggccggctctgctcgcgccgagatgtggaatctccttcacgaaaccgactcggctgtggccaccgcgcgccgcccgcgctggctgtgcgctggggcgctggtgctggcgggtggcttctttctcctcggcttcctcttcgtaacagaggcaagcttgggaactgtgtgaaccaggtcagcaatctggacaggtctttaccagcgggtcttttgctgtttttcctgggtactgatttgcagacttgatccaactttctaagaaaagcagaaccacacagggtggtttataaaatcctccaatgaagctactaacattactccaaagcataatatgaaagcatttttggatgaattgaaagctgagaacatcaagaagttcttatataattttacacagataccacatttagcaggaacagaacaaaactttcagcttgcaaagcaaattcaatc

SEQ ID NO: 7648 - DNA, 2258 bp, Homo sapiens
  source 1..2258: mol_type = unassigned DNA; mol_type = unassigned DNA
ctcaaaaggggccggatttccttctcctggaggcagatgttgcctctctctctcgctcggattggttcagtgcactctagaaacactgctgtggtggagaaactggaccccaggtctggagcgaattccagcctgcagggctgataagcgaggcattagtgagattgagagagactttaccccgccgtggtggttggagggcgcgcagtagagcagcagcacaggcgcgggtcccgggaggccggctctgctcgcgccgagatgtggaatctccttcacgaaaccgactcggctgtggccaccgcgcgccgcccgcgctggctgtgcgctggggcgctggtgctggcgggtggcttctttctcctcggcttcctcttcgggtggtttataaaatcctccaatgaagctactaacattactccaaagcataatatgaaagcatttttggatgaattgaaagctgagaacatcaagaagttcttataattttcaacacatcattatttgaaccacctcctccaggatatgaaaatgtttcggatattgtaccacctttcagtgctttctctcctcaaggaatgccagagggcgatctagtgtatgttaactatgcacgaactgaagacttctttaaattggaacgggacatgaaaatcaattgctctgggaaaattgtaattgccagatatgggaaagttttcagaggaaataagaatatgcttataggcgtggaattgcagaggctgttggtcttccaagtattcctgttcatccaattggatactatgatgcacagaagctcctagaaaaaatgggtggctcagcaccaccagatagcagctggagaggaagtctcaaagtgccctacaatgttggacctggctttactggaaacttttctacacaaaaagtcaagatgcacatccactctaccaatgaagtgacaagaatttacaatgtgataggtactctcagaggagcagtggaaccagacagatatgtcattctgggaggtcaccgggactcatgggtgtttggtggtattgaccctcagagtggagcagctgttgttcatgaaattgtgaggagctttggaacactgaaaaaggaagggtggagacctagaagaacaattttgtttgcaagctgggatgcagaagaatttggtcttcttggttctactgagtgggcagaggagaattcaagactccttcaagagcgtggcgtggcttatattaatgctgactcatctatagaaggaaactacactctgagagttgattgtacaccgctgatgtacagcttggtacacaacctaacaaaagagctgaaaagccctgatgaaggctttgaaggcaaatctctttatgaaagttggactaaaaaaagtccttccccagagttcagtggcatgcccaggataagcaaattgggatctggaaatgattttgaggtgttcttccaacgacttggaattgcttcaggcagagcacggtatactaaaaattgggaaacaaacaaattcagcggctatccactgtatcacagtgtctatgaaacatatgagttggtggaaaagttttatgatccaatgtttaaatatcacctcactgtggcccaggttcgaggagggatggtgtttgagctagccaattccatagtgctcccttttgattgtcgagattatgctgtagttttaagaaagtatgctgacaaaatctacagtatttctatgaaacatccacaggaaatgaagacatacagtgtatcatttgattcacttttttctgcagtaaagaattttacagaaattgcttccaagttcagtgagagactccaggactttgacaaaagcaacccaatagtattaagaatgatgaatgatcaactcatgtttctggaaagagcatttattgatccattagggttaccagacaggcctttttataggcatgtcatctatgctccaagcagccacaacaagtatgcaggggagtcattcccaggaatttatgatgctctgtttgatattgaaagcaaagtggacccttccaaggcctggggagaagtgaagagacagatttatgttgcagccttcacagtgcaggcagctgcagagactttgagtgaagtagcctaagaggattctttagagaatccgtattgaatttgtgtggtatgtcactcagaaagaatcgtaatgggtatattgataaattttaaaattggtatatttgaaataaagttgaatattatat

SEQ ID NO: 7649 - DNA, 3550 bp, Homo sapiens
  source 1..3550: mol_type = unassigned DNA; mol_type = unassigned DNA
cattcataagactcagagctacggccacggcagggacacgcggaaccaagacttggaaacttgattgttgtggttcttcttgggggttatgaaatttcattaatctttttttttccggggagaaagtttttggaaagattcttccagatatttcttcattttcttttggaggaccgacttactttttttggtcttctttattactcccctccccccgtgggacccgccggacgcgtggaggagaccgtagctgaagctgattctgtacagcgggacagcgctttctgcccctgggggagcaacccctccctcgcccctgggtcctacggagcctgcactttcaagaggtacagcggcatcctgtgggggcctgggcaccgcaggaagactgcacagaaactttgccattgttggaacgggacgttgctccttccccgagcttccccggacagcgtactttgaggactcgctcagctcaccggggactcccacggctcaccccggacttgcaccttacttccccaacccggccatagccttggcttcccggcgacctcagcgtggtcacaggggcccccctgtgcccagggaaatgtttcaggctttccccggagactacgactccggctcccggtgcagctcctcaccctctgccgagtctcaatatctgtcttcggtggactccttcggcagtccacccaccgccgccgcctcccagtcccaggggcagccactggcctcccagcccccggtcgtcgacccctacgacatgccgggaaccagctactccacaccaggcatgagtggctacagcagtggcggagcgagtggcagtggtgggccttccaccagcggaactaccagtgggcctgggcctgcccgcccagcccgagcccggcctaggagaccccgagaggagacggagacagatcagttggaggaagaaaaagcagagctggagtcggagatcgccgagctccaaaaggagaaggaacgtctggagtttgtgctggtggcccacaaaccgggctgcaagatcccctacgaagaggggcccgggccgggcccgctggcggaggtgagagatttgccgggctcagcaccggctaaggaagatggcttcagctggctgctgccgcccccgccaccaccgcccctgcccttccagaccagccaagacgcaccccccaacctgacggcttctctctttacacacagtgaagttcaagtcctcggcgaccccttccccgttgttaacccttcgtacacttcttcgtttgtcctcacctgcccggaggtctccgcgttcgccggcgcccaacgcaccagcggcagtgaccagccttccgatcccctgaactcgccctccctcctcgctctgtgaactctttagacacacaaaacaaacaaacacatgggggagagagacttggaagaggaggaggaggaggagaaggaggagagagaggggaagagacaaagtgggtgtgtggcctccctggctcctccgtctgaccctctgcggccactgcgccactgccatcggacaggaggattccttgtgttttgtcctgcctcttgtttctgtgccccggcgaggccggagagctggtgactttggggacagggggtgggaaggggatggacacccccagctgactgttggctctctgacgtcaacccaagctctggggatgggtggggaggggggcgggtgacgcccaccttcgggcagtcctgtgtgaggattaagggacgggggtgggaggtaggctgtggggtgggctggagtcctctccagagaggctcaacaaggaaaaatgccactccctacccaatgtctcccacacccaccctttttttggggtgcctaggttggtttcccctgcactcccgaccttagcttattgatcccacatttccatggtgtgagatcctctttactctgggcagaagtgagccccccccttaaagggaattcgatgcccccctagaataatctcatccccccacccgacttcttttgaaatgtgaacgtccttccttgactgtctagccactccctcccagaaaaactggctctgattggaatttctggcctcctaaggctccccaccccgaaatcagcccccagccttgtttctgatgacagtgttatcccaagaccctgccccctgccagccgaccctcctggccttcctcgttgggccgctctgatttcaggcagcaggggctgctgtgatgccgtcctgctggagtgatttatactgtgaaatgagttggccagattgtggggtgcagctgggtggggcagcacacctctggggggataatgtccccactcccgaaagcctttcctcggtctcccttccgtccatcccccttcttcctcccctcaacagtgagttagactcaagggggtgacagaaccgagaagggggtgacagtcctccatccacgtggcctctctctctctcctcaggaccctcagccctggcctttttctttaaggtcccccgaccaatccccagcctaggacgccaacttctcccaccccttggcccctcacatcctctccaggaagggagtgaggggctgtgacatttttccggagaagatttcagagctgaggctttggtacccccaaacccccaatatttttggactggcagactcaaggggctggaatctcatgattccatgcccgagtccgcccatccctgaccatggttttggctctcccaccccgccgttccctgcgcttcatctcatgaggatttctttatgaggcaaatttatattttttaatatcggggggtggaccacgccgccctccatccgtgctgcatgaaaaacattccacgtgccccttgtcgcgcgtctcccatcctgatcccagacccattccttagctatttatccctttcctggtttccgaaaggcaattatatctattatgtataagtaaatatattatatatggatgtgtgtgtgtgcgtgcgcgtgagtgtgtgagcgcttctgcagcctcggcctaggtcacgttggccctcaaagcgagccgttgaattggaaactgcttctagaaactctggctcagcctgtctcgggctgacccttttctgatcgtctcggcccctctgattgttcccgatggtctctctccctctgtcttttctcctccgcctgtgtccatctgaccgttttcacttgtctcctttctgactgtccctgccaatgctccagctgtcgtctgactctgggttcgttggggacatgagattttattttttgtgagtgagactgagggatcgtagatttttacaatctgtatctttgacaattctgggtgcgagtgtgagagtgtgagcagggcttgctcctgccaaccacaattcaatgaatccccgacccccctaccccatgctgtacttgtggttctctttttgtattttgcatctgaccccggggggctgggacagattggcaatgggccgtcccctctccccttggttctgcactgttgccaataaaaagctcttaaaaacgc

SEQ ID NO: 7650 - DNA, 3667 bp, Homo sapiens
  source 1..3667: mol_type = unassigned DNA; mol_type = unassigned DNA
cattcataagactcagagctacggccacggcagggacacgcggaaccaagacttggaaacttgattgttgtggttcttcttgggggttatgaaatttcattaatctttttttttccggggagaaagtttttggaaagattcttccagatatttcttcattttcttttggaggaccgacttactttttttggtcttctttattactcccctccccccgtgggacccgccggacgcgtggaggagaccgtagctgaagctgattctgtacagcgggacagcgctttctgcccctgggggagcaacccctccctcgcccctgggtcctacggagcctgcactttcaagaggtacagcggcatcctgtgggggcctgggcaccgcaggaagactgcacagaaactttgccattgttggaacgggacgttgctccttccccgagcttccccggacagcgtactttgaggactcgctcagctcaccggggactcccacggctcaccccggacttgcaccttacttccccaacccggccatagccttggcttcccggcgacctcagcgtggtcacaggggcccccctgtgcccagggaaatgtttcaggctttccccggagactacgactccggctcccggtgcagctcctcaccctctgccgagtctcaatatctgtcttcggtggactccttcggcagtccacccaccgccgccgcctcccaggagtgcgccggtctcggggaaatgcccggttccttcgtgcccacggtcaccgcgatcacaaccagccaggacctccagtggcttgtgcaacccaccctcatctcttccatggcccagtcccaggggcagccactggcctcccagcccccggtcgtcgacccctacgacatgccgggaaccagctactccacaccaggcatgagtggctacagcagtggcggagcgagtggcagtggtgggccttccaccagcggaactaccagtgggcctgggcctgcccgcccagcccgagcccggcctaggagaccccgagaggagacggagacagatcagttggaggaagaaaaagcagagctggagtcggagatcgccgagctccaaaaggagaaggaacgtctggagtttgtgctggtggcccacaaaccgggctgcaagatcccctacgaagaggggcccgggccgggcccgctggcggaggtgagagatttgccgggctcagcaccggctaaggaagatggcttcagctggctgctgccgcccccgccaccaccgcccctgcccttccagaccagccaagacgcaccccccaacctgacggcttctctctttacacacagtgaagttcaagtcctcggcgaccccttccccgttgttaacccttcgtacacttcttcgtttgtcctcacctgcccggaggtctccgcgttcgccggcgcccaacgcaccagcggcagtgaccagccttccgatcccctgaactcgccctccctcctcgctctgtgaactctttagacacacaaaacaaacaaacacatgggggagagagacttggaagaggaggaggaggaggagaaggaggagagagaggggaagagacaaagtgggtgtgtggcctccctggctcctccgtctgaccctctgcggccactgcgccactgccatcggacaggaggattccttgtgttttgtcctgcctcttgtttctgtgccccggcgaggccggagagctggtgactttggggacagggggtgggaaggggatggacacccccagctgactgttggctctctgacgtcaacccaagctctggggatgggtggggaggggggcgggtgacgcccaccttcgggcagtcctgtgtgaggattaagggacgggggtgggaggtaggctgtggggtgggctggagtcctctccagagaggctcaacaaggaaaaatgccactccctacccaatgtctcccacacccaccctttttttggggtgcctaggttggtttcccctgcactcccgaccttagcttattgatcccacatttccatggtgtgagatcctctttactctgggcagaagtgagccccccccttaaagggaattcgatgcccccctagaataatctcatccccccacccgacttcttttgaaatgtgaacgtccttccttgactgtctagccactccctcccagaaaaactggctctgattggaatttctggcctcctaaggctccccaccccgaaatcagcccccagccttgtttctgatgacagtgttatcccaagaccctgccccctgccagccgaccctcctggccttcctcgttgggccgctctgatttcaggcagcaggggctgctgtgatgccgtcctgctggagtgatttatactgtgaaatgagttggccagattgtggggtgcagctgggtggggcagcacacctctggggggataatgtccccactcccgaaagcctttcctcggtctcccttccgtccatcccccttcttcctcccctcaacagtgagttagactcaagggggtgacagaaccgagaagggggtgacagtcctccatccacgtggcctctctctctctcctcaggaccctcagccctggcctttttctttaaggtcccccgaccaatccccagcctaggacgccaacttctcccaccccttggcccctcacatcctctccaggaagggagtgaggggctgtgacatttttccggagaagatttcagagctgaggctttggtacccccaaacccccaatatttttggactggcagactcaaggggctggaatctcatgattccatgcccgagtccgcccatccctgaccatggttttggctctcccaccccgccgttccctgcgcttcatctcatgaggatttctttatgaggcaaatttatattttttaatatcggggggtggaccacgccgccctccatccgtgctgcatgaaaaacattccacgtgccccttgtcgcgcgtctcccatcctgatcccagacccattccttagctatttatccctttcctggtttccgaaaggcaattatatctattatgtataagtaaatatattatatatggatgtgtgtgtgtgcgtgcgcgtgagtgtgtgagcgcttctgcagcctcggcctaggtcacgttggccctcaaagcgagccgttgaattggaaactgcttctagaaactctggctcagcctgtctcgggctgacccttttctgatcgtctcggcccctctgattgttcccgatggtctctctccctctgtcttttctcctccgcctgtgtccatctgaccgttttcacttgtctcctttctgactgtccctgccaatgctccagctgtcgtctgactctgggttcgttggggacatgagattttattttttgtgagtgagactgagggatcgtagatttttacaatctgtatctttgacaattctgggtgcgagtgtgagagtgtgagcagggcttgctcctgccaaccacaattcaatgaatccccgacccccctaccccatgctgtacttgtggttctctttttgtattttgcatctgaccccggggggctgggacagattggcaatgggccgtcccctctccccttggttctgcactgttgccaataaaaagctcttaaaaacgc

SEQ ID NO: 7651 - DNA, 3775 bp, Homo sapiens
  source 1..3775: mol_type = unassigned DNA; mol_type = unassigned DNA
cattcataagactcagagctacggccacggcagggacacgcggaaccaagacttggaaacttgattgttgtggttcttcttgggggttatgaaatttcattaatctttttttttccggggagaaagtttttggaaagattcttccagatatttcttcattttcttttggaggaccgacttactttttttggtcttctttattactcccctccccccgtgggacccgccggacgcgtggaggagaccgtagctgaagctgattctgtacagcgggacagcgctttctgcccctgggggagcaacccctccctcgcccctgggtcctacggagcctgcactttcaagaggtacagcggcatcctgtgggggcctgggcaccgcaggaagactgcacagaaactttgccattgttggaacgggacgttgctccttccccgagcttccccggacagcgtactttgaggactcgctcagctcaccggggactcccacggctcaccccggacttgcaccttacttccccaacccggccatagccttggcttcccggcgacctcagcgtggtcacaggggcccccctgtgcccagggaaatgtttcaggctttccccggagactacgactccggctcccggtgcagctcctcaccctctgccgagtctcaatatctgtcttcggtggactccttcggcagtccacccaccgccgccgcctcccaggagtgcgccggtctcggggaaatgcccggttccttcgtgcccacggtcaccgcgatcacaaccagccaggacctccagtggcttgtgcaacccaccctcatctcttccatggcccagtcccaggggcagccactggcctcccagcccccggtcgtcgacccctacgacatgccgggaaccagctactccacaccaggcatgagtggctacagcagtggcggagcgagtggcagtggtgggccttccaccagcggaactaccagtgggcctgggcctgcccgcccagcccgagcccggcctaggagaccccgagaggagacgctcaccccagaggaagaggagaagcgaagggtgcgccgggaacgaaataaactagcagcagctaaatgcaggaaccggcggagggagctgaccgaccgactccaggcggagacagatcagttggaggaagaaaaagcagagctggagtcggagatcgccgagctccaaaaggagaaggaacgtctggagtttgtgctggtggcccacaaaccgggctgcaagatcccctacgaagaggggcccgggccgggcccgctggcggaggtgagagatttgccgggctcagcaccggctaaggaagatggcttcagctggctgctgccgcccccgccaccaccgcccctgcccttccagaccagccaagacgcaccccccaacctgacggcttctctctttacacacagtgaagttcaagtcctcggcgaccccttccccgttgttaacccttcgtacacttcttcgtttgtcctcacctgcccggaggtctccgcgttcgccggcgcccaacgcaccagcggcagtgaccagccttccgatcccctgaactcgccctccctcctcgctctgtgaactctttagacacacaaaacaaacaaacacatgggggagagagacttggaagaggaggaggaggaggagaaggaggagagagaggggaagagacaaagtgggtgtgtggcctccctggctcctccgtctgaccctctgcggccactgcgccactgccatcggacaggaggattccttgtgttttgtcctgcctcttgtttctgtgccccggcgaggccggagagctggtgactttggggacagggggtgggaaggggatggacacccccagctgactgttggctctctgacgtcaacccaagctctggggatgggtggggaggggggcgggtgacgcccaccttcgggcagtcctgtgtgaggattaagggacgggggtgggaggtaggctgtggggtgggctggagtcctctccagagaggctcaacaaggaaaaatgccactccctacccaatgtctcccacacccaccctttttttggggtgcctaggttggtttcccctgcactcccgaccttagcttattgatcccacatttccatggtgtgagatcctctttactctgggcagaagtgagccccccccttaaagggaattcgatgcccccctagaataatctcatccccccacccgacttcttttgaaatgtgaacgtccttccttgactgtctagccactccctcccagaaaaactggctctgattggaatttctggcctcctaaggctccccaccccgaaatcagcccccagccttgtttctgatgacagtgttatcccaagaccctgccccctgccagccgaccctcctggccttcctcgttgggccgctctgatttcaggcagcaggggctgctgtgatgccgtcctgctggagtgatttatactgtgaaatgagttggccagattgtggggtgcagctgggtggggcagcacacctctggggggataatgtccccactcccgaaagcctttcctcggtctcccttccgtccatcccccttcttcctcccctcaacagtgagttagactcaagggggtgacagaaccgagaagggggtgacagtcctccatccacgtggcctctctctctctcctcaggaccctcagccctggcctttttctttaaggtcccccgaccaatccccagcctaggacgccaacttctcccaccccttggcccctcacatcctctccaggaagggagtgaggggctgtgacatttttccggagaagatttcagagctgaggctttggtacccccaaacccccaatatttttggactggcagactcaaggggctggaatctcatgattccatgcccgagtccgcccatccctgaccatggttttggctctcccaccccgccgttccctgcgcttcatctcatgaggatttctttatgaggcaaatttatattttttaatatcggggggtggaccacgccgccctccatccgtgctgcatgaaaaacattccacgtgccccttgtcgcgcgtctcccatcctgatcccagacccattccttagctatttatccctttcctggtttccgaaaggcaattatatctattatgtataagtaaatatattatatatggatgtgtgtgtgtgcgtgcgcgtgagtgtgtgagcgcttctgcagcctcggcctaggtcacgttggccctcaaagcgagccgttgaattggaaactgcttctagaaactctggctcagcctgtctcgggctgacccttttctgatcgtctcggcccctctgattgttcccgatggtctctctccctctgtcttttctcctccgcctgtgtccatctgaccgttttcacttgtctcctttctgactgtccctgccaatgctccagctgtcgtctgactctgggttcgttggggacatgagattttattttttgtgagtgagactgagggatcgtagatttttacaatctgtatctttgacaattctgggtgcgagtgtgagagtgtgagcagggcttgctcctgccaaccacaattcaatgaatccccgacccccctaccccatgctgtacttgtggttctctttttgtattttgcatctgaccccggggggctgggacagattggcaatgggccgtcccctctccccttggttctgcactgttgccaataaaaagctcttaaaaacgc

SEQ ID NO: 7652 - DNA, 3658 bp, Homo sapiens
  source 1..3658: mol_type = unassigned DNA; mol_type = unassigned DNA
cattcataagactcagagctacggccacggcagggacacgcggaaccaagacttggaaacttgattgttgtggttcttcttgggggttatgaaatttcattaatctttttttttccggggagaaagtttttggaaagattcttccagatatttcttcattttcttttggaggaccgacttactttttttggtcttctttattactcccctccccccgtgggacccgccggacgcgtggaggagaccgtagctgaagctgattctgtacagcgggacagcgctttctgcccctgggggagcaacccctccctcgcccctgggtcctacggagcctgcactttcaagaggtacagcggcatcctgtgggggcctgggcaccgcaggaagactgcacagaaactttgccattgttggaacgggacgttgctccttccccgagcttccccggacagcgtactttgaggactcgctcagctcaccggggactcccacggctcaccccggacttgcaccttacttccccaacccggccatagccttggcttcccggcgacctcagcgtggtcacaggggcccccctgtgcccagggaaatgtttcaggctttccccggagactacgactccggctcccggtgcagctcctcaccctctgccgagtctcaatatctgtcttcggtggactccttcggcagtccacccaccgccgccgcctcccagtcccaggggcagccactggcctcccagcccccggtcgtcgacccctacgacatgccgggaaccagctactccacaccaggcatgagtggctacagcagtggcggagcgagtggcagtggtgggccttccaccagcggaactaccagtgggcctgggcctgcccgcccagcccgagcccggcctaggagaccccgagaggagacgctcaccccagaggaagaggagaagcgaagggtgcgccgggaacgaaataaactagcagcagctaaatgcaggaaccggcggagggagctgaccgaccgactccaggcggagacagatcagttggaggaagaaaaagcagagctggagtcggagatcgccgagctccaaaaggagaaggaacgtctggagtttgtgctggtggcccacaaaccgggctgcaagatcccctacgaagaggggcccgggccgggcccgctggcggaggtgagagatttgccgggctcagcaccggctaaggaagatggcttcagctggctgctgccgcccccgccaccaccgcccctgcccttccagaccagccaagacgcaccccccaacctgacggcttctctctttacacacagtgaagttcaagtcctcggcgaccccttccccgttgttaacccttcgtacacttcttcgtttgtcctcacctgcccggaggtctccgcgttcgccggcgcccaacgcaccagcggcagtgaccagccttccgatcccctgaactcgccctccctcctcgctctgtgaactctttagacacacaaaacaaacaaacacatgggggagagagacttggaagaggaggaggaggaggagaaggaggagagagaggggaagagacaaagtgggtgtgtggcctccctggctcctccgtctgaccctctgcggccactgcgccactgccatcggacaggaggattccttgtgttttgtcctgcctcttgtttctgtgccccggcgaggccggagagctggtgactttggggacagggggtgggaaggggatggacacccccagctgactgttggctctctgacgtcaacccaagctctggggatgggtggggaggggggcgggtgacgcccaccttcgggcagtcctgtgtgaggattaagggacgggggtgggaggtaggctgtggggtgggctggagtcctctccagagaggctcaacaaggaaaaatgccactccctacccaatgtctcccacacccaccctttttttggggtgcctaggttggtttcccctgcactcccgaccttagcttattgatcccacatttccatggtgtgagatcctctttactctgggcagaagtgagccccccccttaaagggaattcgatgcccccctagaataatctcatccccccacccgacttcttttgaaatgtgaacgtccttccttgactgtctagccactccctcccagaaaaactggctctgattggaatttctggcctcctaaggctccccaccccgaaatcagcccccagccttgtttctgatgacagtgttatcccaagaccctgccccctgccagccgaccctcctggccttcctcgttgggccgctctgatttcaggcagcaggggctgctgtgatgccgtcctgctggagtgatttatactgtgaaatgagttggccagattgtggggtgcagctgggtggggcagcacacctctggggggataatgtccccactcccgaaagcctttcctcggtctcccttccgtccatcccccttcttcctcccctcaacagtgagttagactcaagggggtgacagaaccgagaagggggtgacagtcctccatccacgtggcctctctctctctcctcaggaccctcagccctggcctttttctttaaggtcccccgaccaatccccagcctaggacgccaacttctcccaccccttggcccctcacatcctctccaggaagggagtgaggggctgtgacatttttccggagaagatttcagagctgaggctttggtacccccaaacccccaatatttttggactggcagactcaaggggctggaatctcatgattccatgcccgagtccgcccatccctgaccatggttttggctctcccaccccgccgttccctgcgcttcatctcatgaggatttctttatgaggcaaatttatattttttaatatcggggggtggaccacgccgccctccatccgtgctgcatgaaaaacattccacgtgccccttgtcgcgcgtctcccatcctgatcccagacccattccttagctatttatccctttcctggtttccgaaaggcaattatatctattatgtataagtaaatatattatatatggatgtgtgtgtgtgcgtgcgcgtgagtgtgtgagcgcttctgcagcctcggcctaggtcacgttggccctcaaagcgagccgttgaattggaaactgcttctagaaactctggctcagcctgtctcgggctgacccttttctgatcgtctcggcccctctgattgttcccgatggtctctctccctctgtcttttctcctccgcctgtgtccatctgaccgttttcacttgtctcctttctgactgtccctgccaatgctccagctgtcgtctgactctgggttcgttggggacatgagattttattttttgtgagtgagactgagggatcgtagatttttacaatctgtatctttgacaattctgggtgcgagtgtgagagtgtgagcagggcttgctcctgccaaccacaattcaatgaatccccgacccccctaccccatgctgtacttgtggttctctttttgtattttgcatctgaccccggggggctgggacagattggcaatgggccgtcccctctccccttggttctgcactgttgccaataaaaagctcttaaaaacgc

SEQ ID NO: 7653 - DNA, 3346 bp, Homo sapiens
  source 1..3346: mol_type = unassigned DNA; mol_type = unassigned DNA
cattcataagactcagagctacggccacggcagggacacgcggaaccaagacttggaaacttgattgttgtggttcttcttgggggttatgaaatttcattaatctttttttttccggggagaaagtttttggaaagattcttccagatatttcttcattttcttttggaggaccgacttactttttttggtcttctttattactcccctccccccgtgggacccgccggacgcgtggaggagaccgtagctgaagctgattctgtacagcgggacagcgctttctgcccctgggggagcaacccctccctcgcccctgggtcctacggagcctgcactttcaagaggtacagcggcatcctgtgggggcctgggcaccgcaggaagactgcacagaaactttgccattgttggaacgggacgttgctccttccccgagcttccccggacagcgtactttgaggactcgctcagctcaccggggactcccacggctcaccccggacttgcaccttacttccccaacccggccatagccttggcttcccggcgacctcagcgtggtcacaggggcccccctgtgcccagggaaatgtttcaggctttccccggagactacgactccggctcccggtgcagctcctcaccctctgccgagtctcaatatctgtcttcggtggactccttcggcagtccacccaccgccgccgcctcccaggagacagatcagttggaggaagaaaaagcagagctggagtcggagatcgccgagctccaaaaggagaaggaacgtctggagtttgtgctggtggcccacaaaccgggctgcaagatcccctacgaagaggggcccgggccgggcccgctggcggaggtgagagatttgccgggctcagcaccggctaaggaagatggcttcagctggctgctgccgcccccgccaccaccgcccctgcccttccagaccagccaagacgcaccccccaacctgacggcttctctctttacacacagtgaagttcaagtcctcggcgaccccttccccgttgttaacccttcgtacacttcttcgtttgtcctcacctgcccggaggtctccgcgttcgccggcgcccaacgcaccagcggcagtgaccagccttccgatcccctgaactcgccctccctcctcgctctgtgaactctttagacacacaaaacaaacaaacacatgggggagagagacttggaagaggaggaggaggaggagaaggaggagagagaggggaagagacaaagtgggtgtgtggcctccctggctcctccgtctgaccctctgcggccactgcgccactgccatcggacaggaggattccttgtgttttgtcctgcctcttgtttctgtgccccggcgaggccggagagctggtgactttggggacagggggtgggaaggggatggacacccccagctgactgttggctctctgacgtcaacccaagctctggggatgggtggggaggggggcgggtgacgcccaccttcgggcagtcctgtgtgaggattaagggacgggggtgggaggtaggctgtggggtgggctggagtcctctccagagaggctcaacaaggaaaaatgccactccctacccaatgtctcccacacccaccctttttttggggtgcctaggttggtttcccctgcactcccgaccttagcttattgatcccacatttccatggtgtgagatcctctttactctgggcagaagtgagccccccccttaaagggaattcgatgcccccctagaataatctcatccccccacccgacttcttttgaaatgtgaacgtccttccttgactgtctagccactccctcccagaaaaactggctctgattggaatttctggcctcctaaggctccccaccccgaaatcagcccccagccttgtttctgatgacagtgttatcccaagaccctgccccctgccagccgaccctcctggccttcctcgttgggccgctctgatttcaggcagcaggggctgctgtgatgccgtcctgctggagtgatttatactgtgaaatgagttggccagattgtggggtgcagctgggtggggcagcacacctctggggggataatgtccccactcccgaaagcctttcctcggtctcccttccgtccatcccccttcttcctcccctcaacagtgagttagactcaagggggtgacagaaccgagaagggggtgacagtcctccatccacgtggcctctctctctctcctcaggaccctcagccctggcctttttctttaaggtcccccgaccaatccccagcctaggacgccaacttctcccaccccttggcccctcacatcctctccaggaagggagtgaggggctgtgacatttttccggagaagatttcagagctgaggctttggtacccccaaacccccaatatttttggactggcagactcaaggggctggaatctcatgattccatgcccgagtccgcccatccctgaccatggttttggctctcccaccccgccgttccctgcgcttcatctcatgaggatttctttatgaggcaaatttatattttttaatatcggggggtggaccacgccgccctccatccgtgctgcatgaaaaacattccacgtgccccttgtcgcgcgtctcccatcctgatcccagacccattccttagctatttatccctttcctggtttccgaaaggcaattatatctattatgtataagtaaatatattatatatggatgtgtgtgtgtgcgtgcgcgtgagtgtgtgagcgcttctgcagcctcggcctaggtcacgttggccctcaaagcgagccgttgaattggaaactgcttctagaaactctggctcagcctgtctcgggctgacccttttctgatcgtctcggcccctctgattgttcccgatggtctctctccctctgtcttttctcctccgcctgtgtccatctgaccgttttcacttgtctcctttctgactgtccctgccaatgctccagctgtcgtctgactctgggttcgttggggacatgagattttattttttgtgagtgagactgagggatcgtagatttttacaatctgtatctttgacaattctgggtgcgagtgtgagagtgtgagcagggcttgctcctgccaaccacaattcaatgaatccccgacccccctaccccatgctgtacttgtggttctctttttgtattttgcatctgaccccggggggctgggacagattggcaatgggccgtcccctctccccttggttctgcactgttgccaataaaaagctcttaaaaacgc

SEQ ID NO: 7654 - DNA, 2170 bp, Homo sapiens
  source 1..2170: mol_type = unassigned DNA; mol_type = unassigned DNA
attcataagactcagagctacggccacggcagggacacgcggaaccaagacttggaaacttgattgttgtggttcttcttgggggttatgaaatttcattaatctttttttttccggggagaaagtttttggaaagattcttccagatatttcttcattttcttttggaggaccgacttactttttttggtcttctttattactcccctccccccgtgggacccgccggacgcgtggaggagaccgtagctgaagctgattctgtacagcgggacagcgctttctgcccctgggggagcaacccctccctcgcccctgggtcctacggagcctgcactttcaagaggtacagcggcatcctgtgggggcctgggcaccgcaggaagactgcacagaaactttgccattgttggaacgggacgttgctccttccccgagcttccccggacagcgtactttgaggactcgctcagctcaccggggactcccacggctcaccccggacttgcaccttacttccccaacccggccatagccttggcttcccggcgacctcagcgtggtcacaggggcccccctgtgcccagggaaatgtttcaggctttccccggagactacgactccggctcccggtgcagctcctcaccctctgccgagtctcaatatctgtcttcggtggactccttcggcagtccacccaccgccgccgcctcccaggagtgcgccggtctcggggaaatgcccggttccttcgtgcccacggtcaccgcgatcacaaccagccaggacctccagtggcttgtgcaacccaccctcatctcttccatggcccagtcccaggggcagccactggcctcccagcccccggtcgtcgacccctacgacatgccgggaaccagctactccacaccaggcatgagtggctacagcagtggcggagcgagtggcagtggtgggccttccaccagcggaactaccagtgggcctgggcctgcccgcccagcccgagcccggcctaggagaccccgagaggagacggtgagtaagggacatcagaacttggcctgggtagggggaagcaagagaggcaggaagtttcttatgaatggaggggggctccactaaggcctcagtgttacagaaaccccaagatccttgctacacgagcgaggaccggaggcttgttttttggctcttgggggttctgaaagaagtagaggttcgggatgggtggaggagtgctgtatccccaaatctcatggcctctatctccctgactcagctcaccccagaggaagaggagaagcgaagggtgcgccgggaacgaaataaactagcagcagctaaatgcaggaaccggcggagggagctgaccgaccgactccaggcggtgaggacaggccctggggtgggagaggggatgttgaggggagctctctccccattctctgccccctctccacctgtacccttatcctgggttgagaactagacgttccacacatggaactaggtactgctgtggccagactgggtagcccagggcacaaacacagacccccatggacttaagtcaactcctggtcccccccccatttcctgaccccacggactactctcctagccttcatttcatcccaaggggccacatggggcccttgaggagaggggcgcccccatcatttctcccatctggtcttcagcaagtaacaacccattttgcctcagtttctccatctctgcaaaccctcatcaaatctcccgggctctttctacccttaacactctggaaagcctgtgaaatgaaattattccacctcctgccctagccacccacagctctcctggtgctggtggcatcccccaaaacccactcccttcctacgtcctcccttggtctgagagttccctgctgtatgcctgcagggtgagctgttactccttgagggaacaagggaattgtcaactttccttctctactttttctcttccccgggaggtagagagggaggggtaatagaagggaacacattaaaaacacataacagtggctcatgcctgtgatcccagcactttgagaggccaaggcaggaggattgcttgagcccaggagtttgagaccagcctgggaaacatagggaggacttgtctctaccaagaaaaaaaaaaa

SEQ ID NO: 7655 - DNA, 1057 bp, Homo sapiens
  source 1..1057: mol_type = unassigned DNA; mol_type = unassigned DNA
ttccccggacagcgtactttgaggactcgctcagctcaccggggactcccacggctcaccccggacttgcaccttacttccccaacccggccatagccttggcttcccggcgacctcagcgtggtcacaggggcccccctgtgcccagggaaatgtttcaggctttccccggagactacgactccggctcccggtgcagctcctcaccctctgccgagtctcaatatctgtcttcggtggactccttcggcagtccacccaccgccgccgcctcccaggagtgcgccggtctcggggaaatgcccggttccttcgtgcccacggtcaccgcgatcacaaccagccaggacctccagtggcttgtgcaacccaccctcatctcttccatggcccagtcccaggggcagccactggcctcccagcccccggtcgtcgacccctacgacatgccgggaaccagctactccacaccaggcatgagtggctacagcagtggcggagcgagtggcagtggtgggccttccaccagcggaactaccagtgggcctgggcctgcccgcccagcccgagcccggcctaggagaccccgagaggagacgctcaccccagaggaagaggagaagcgaagggtgcgccgggaacgaaataaactagcagcagctaaatgcaggaaccggcggagggagctgaccgaccgactccaggcggagacagatcagttggaggaagaaaaagcagagctggagtcggagatcgccgagctccaaaaggagaaggaacgtctggagtttgtgctggtggcccacaaaccgggctgcaagatcccctacgaagaggggcccgggccgggcccgctggcggagtgaagttcaagtcctcggcgaccccttccccgttgttaacccttcgtacacttcttcgtttgtcctcacctgcccggaggtctccgcgttcgccggcgcccaacgcaccagcggcagtgaccagccttccgatcccctgaactcgccctccctcctcgctctgtgaactctttagacacacaaaacaaacaaac

SEQ ID NO: 7656 - DNA, 3089 bp, Homo sapiens
  source 1..3089: mol_type = unassigned DNA; mol_type = unassigned DNA
agagagtagttaagccttcagagcagttccaggagtccatttacgggaggggggagatgagcgctgctgaggcttgggggctcaggtcccgcaccattccccctccgcgacaatctgagagagctccagtggttacttttatctacctgtccgttcaccctaaactgtcactcgtcagtctcactctgagaagagacagtaacttgaaacgttgttctaaactcctaggcccgtcccccaaacacccttttgactgggacccccgcccctgcatgggacctcgcgcagaggggggtgtgtatgtgtgtgagtgtagaggaaggcttggcctaaggcctctccttctccctccccttgcctctggggtgggggtggggtgttgtggctgtgtgtgtggctgtggctccgtcccgggggttctgtcacccggctgtgtccagcctcctctccaccccccatacctaagagtcaccaacccggggtgtgattcaccacccgctggaaccgtgcaacctttccccgaggaagaaggaggaggtagaagccagttgagcagaaatcctctcattaaccactgcgtcacggtgtagtggaagggtgggtgttgtggctttttccctgtgacacacacatccacactcgctcaccctgtgctcactcacggggtcggtgtgtgttatgtgtgttgggtgtgtgtgtgtcggtgtctttgtttgtgtgtctacgcctgtgtgtgtatgtgtcaccccgtaggagtgcgccggtctcggggaaatgcccggttccttcgtgcccacggtcaccgcgatcacaaccagccaggacctccagtggcttgtgcaacccaccctcatctcttccatggcccagtcccaggggcagccactggcctcccagcccccggtcgtcgacccctacgacatgccgggaaccagctactccacaccaggcatgagtggctacagcagtggcggagcgagtggcagtggtgggccttccaccagcggaactaccagtgggcctgggcctgcccgcccagcccgagcccggcctaggagaccccgagaggagacgctcaccccagaggaagaggagaagcgaagggtgcgccgggaacgaaataaactagcagcagctaaatgcaggaaccggcggagggagctgaccgaccgactccaggcggagacagatcagttggaggaagaaaaagcagagctggagtcggagatcgccgagctccaaaaggagaaggaacgtctggagtttgtgctggtggcccacaaaccgggctgcaagatcccctacgaagaggggcccgggccgggcccgctggcggagtgaagttcaagtcctcggcgaccccttccccgttgttaacccttcgtacacttcttcgtttgtcctcacctgcccggaggtctccgcgttcgccggcgcccaacgcaccagcggcagtgaccagccttccgatcccctgaactcgccctccctcctcgctctgtgaactctttagacacacaaaacaaacaaacacatgggggagagagacttggaagaggaggaggaggaggagaaggaggagagagaggggaagagacaaagtgggtgtgtggcctccctggctcctccgtctgaccctctgcggccactgcgccactgccatcggacaggaggattccttgtgttttgtcctgcctcttgtttctgtgccccggcgaggccggagagctggtgactttggggacagggggtgggaaggggatggacacccccagctgactgttggctctctgacgtcaacccaagctctggggatgggtggggaggggggcgggtgacgcccaccttcgggcagtcctgtgtgaggattaagggacgggggtgggaggtaggctgtggggtgggctggagtcctctccagagaggctcaacaaggaaaaatgccactccctacccaatgtctcccacacccaccctttttttggggtgcctaggttggtttcccctgcactcccgaccttagcttattgatcccacatttccatggtgtgagatcctctttactctgggcagaagtgagccccccccttaaagggaattcgatgcccccctagaataatctcatccccccacccgacttcttttgaaatgtgaacgtccttccttgactgtctagccactccctcccagaaaaactggctctgattggaatttctggcctcctaaggctccccaccccgaaatcagcccccagccttgtttctgatgacagtgttatcccaagaccctgccccctgccagccgaccctcctggccttcctcgttgggccgctctgatttcaggcagcaggggctgctgtgatgccgtcctgctggagtgatttatactgtgaaatgagttggccagattgtggggtgcagctgggtggggcagcacacctctggggggataatgtccccactcccgaaagcctttcctcggtctcccttccgtccatcccccttcttcctcccctcaacagtgagttagactcaagggggtgacagaaccgagaagggggtgacagtcctccatccacgtggcctctctctctctcctcaggaccctcagccctggcctttttctttaaggtcccccgaccaatccccagcctaggacgccaacttctcccaccccttggcccctcacatcctctccaggaagggagtgaggggctgtgacatttttccggagaagatttcagagctgaggctttggtacccccaaacccccaatatttttggactggcagactcaaggggctggaatctcatgattccatgcccgagtccgcccatccctgaccatggttttggctctcccaccccgccgttccctgcgcttcatctcatgaggatttctttatgaggcaaatttatattttttaatatcggggggtggaccacgccgccctccatccgtgctgcatgaaaaacattccacgtgccccttgtcgcgcgtctcccatcctgatcccagacccattccttagctatttatccctttcctggtttccgaaaggcaattatatctattatgtataagtaaa

SEQ ID NO: 7657 - DNA, 2182 bp, Homo sapiens
  source 1..2182: mol_type = unassigned DNA; mol_type = unassigned DNA
taagccttcagagcagttccaggagtccatttacgggaggggggagatgagcgctgctgaggcttgggggctcaggtcccgcaccattccccctccgcgacaatctgagagagctccagtggttacttttatctacctgtccgttcaccctaaactgtcactcgtcagtctcactctgagaagagacagtaacttgaaacgttgttctaaactcctaggcccgtcccccaaacacccttttgactgggacccccgcccctgcatgggacctcgcgcagaggggggtgtgtatgtgtgtgagtgtagaggaaggcttggcctaaggcctctccttctccctccccttgcctctggggtgggggtggggtgttgtggctgtgtgtgtggctgtggctccgtcccgggggttctgtcacccggctgtgtccagcctcctctccaccccccatacctaagagtcaccaacccggggtgtgattcaccacccgctggaaccgtgcaacctttccccgaggaagaaggaggaggtagaagccagttgagcagaaatcctctcattaaccactgcgtcacggtgtagtggaagggtgggtgttgtggctttttccctgtgacacacacatccacactcgctcaccctgtgctcactcacggggtcggtgtgtgttatgtgtgttgggtgtgtgtgtgtcggtgtctttgtttgtgtgtctacgcctgtgtgtgtatgtgtcaccccgtaggagtgcgccggtctcggggaaatgcccggttccttcgtgcccacggtcaccgcgatcacaaccagccaggacctccagtggcttgtgcaacccaccctcatctcttccatggcccagtcccaggggcagccactggcctcccagcccccggtcgtcgacccctacgacatgccgggaaccagctactccacaccaggcatgagtggctacagcagtggcggagcgagtggcagtggtgggccttccaccagcggaactaccagtgggcctgggcctgcccgcccagcccgagcccggcctaggagaccccgagaggagacggtgagtaagggacatcagaacttggcctgggtagggggaagcaagagaggcaggaagtttcttatgaatggaggggggctccactaaggcctcagtgttacagaaaccccaagatccttgctacacgagcgaggaccggaggcttgttttttggctcttgggggttctgaaagaagtagaggttcgggatgggtggaggagtgctgtatccccaaatctcatggcctctatctccctgactcagctcaccccagaggaagaggagaagcgaagggtgcgccgggaacgaaataaactagcagcagctaaatgcaggaaccggcggagggagctgaccgaccgactccaggcggtgaggacaggccctggggtgggagaggggatgttgaggggagctctctccccattctctgccccctctccacctgtacccttatcctgggttgagaactagacgttccacacatggaactaggtactgctgtggccagactgggtagcccagggcacaaacacagacccccatggacttaagtcaactcctggtcccccccccatttcctgaccccacggactactctcctagccttcatttcatcccaaggggccacatggggcccttgaggagaggggcgcccccatcatttctcccatctggtcttcagcaagtaacaacccattttgcctcagtttctccatctctgcaaaccctcatcaaatctcccgggctctttctacccttaacactctggaaagcctgtgaaatgaaattattccacctcctgccctagccacccacagctctcctggtgctggtggcatcccccaaaacccactcccttcctacgtcctcccttggtctgagagttccctgctgtatgcctgcagggtgagctgttactccttgagggaacaagggaattgtcaactttccttctctactttttctcttccccgggaggtagagagggaggggtaatagaagggaacacattaaaaacacataacagtggctcatgcctgtgatcccagcactttgagaggccaaggcaggaggattgcttgagcccaggagtttgagaccagcctgggaaacatagggaggacttgtctctacc

SEQ ID NO: 7658 - DNA, 3774 bp, Homo sapiens
  source 1..3774: mol_type = unassigned DNA; mol_type = unassigned DNA
catttacgggaggggggagatgagcgctgctgaggcttgggggctcaggtcccgcaccattccccctccgcgacaatctgagagagctccagtggttacttttatctacctgtccgttcaccctaaactgtcactcgtcagtctcactctgagaagagacagtaacttgaaacgttgttctaaactcctaggcccgtcccccaaacacccttttgactgggacccccgcccctgcatgggacctcgcgcagaggggggtgtgtatgtgtgtgagtgtagaggaaggcttggcctaaggcctctccttctccctccccttgcctctggggtgggggtggggtgttgtggctgtgtgtgtggctgtggctccgtcccgggggttctgtcacccggctgtgtccagcctcctctccaccccccatacctaagagtcaccaacccggggtgtgattcaccacccgctggaaccgtgcaacctttccccgaggaagaaggaggaggtagaagccagttgagcagaaatcctctcattaaccactgcgtcacggtgtagtggaagggtgggtgttgtggctttttccctgtgacacacacatccacactcgctcaccctgtgctcactcacggggtcggtgtgtgttatgtgtgttgggtgtgtgtgtgtcggtgtctttgtttgtgtgtctacgcctgtgtgtgtatgtgtcaccccgtaggagtgcgccggtctcggggaaatgcccggttccttcgtgcccacggtcaccgcgatcacaaccagccaggacctccagtggcttgtgcaacccaccctcatctcttccatggcccagtcccaggggcagccactggcctcccagcccccggtcgtcgacccctacgacatgccgggaaccagctactccacaccaggcatgagtggctacagcagtggcggagcgagtggcagtggtgggccttccaccagcggaactaccagtgggcctgggcctgcccgcccagcccgagcccggcctaggagaccccgagaggagacgctcaccccagaggaagaggagaagcgaagggtgcgccgggaacgaaataaactagcagcagctaaatgcaggaaccggcggagggagctgaccgaccgactccaggcggagacagatcagttggaggaagaaaaagcagagctggagtcggagatcgccgagctccaaaaggagaaggaacgtctggagtttgtgctggtggcccacaaaccgggctgcaagatcccctacgaagaggggcccgggccgggcccgctggcggaggtgagagatttgccgggctcagcaccggctaaggaagatggcttcagctggctgctgccgcccccgccaccaccgcccctgcccttccagaccagccaagacgcaccccccaacctgacggcttctctctttacacacagtgaagttcaagtcctcggcgaccccttccccgttgttaacccttcgtacacttcttcgtttgtcctcacctgcccggaggtctccgcgttcgccggcgcccaacgcaccagcggcagtgaccagccttccgatcccctgaactcgccctccctcctcgctctgtgaactctttagacacacaaaacaaacaaacacatgggggagagagacttggaagaggaggaggaggaggagaaggaggagagagaggggaagagacaaagtgggtgtgtggcctccctggctcctccgtctgaccctctgcggccactgcgccactgccatcggacaggaggattccttgtgttttgtcctgcctcttgtttctgtgccccggcgaggccggagagctggtgactttggggacagggggtgggaaggggatggacacccccagctgactgttggctctctgacgtcaacccaagctctggggatgggtggggaggggggcgggtgacgcccaccttcgggcagtcctgtgtgaggattaagggacgggggtgggaggtaggctgtggggtgggctggagtcctctccagagaggctcaacaaggaaaaatgccactccctacccaatgtctcccacacccaccctttttttggggtgcctaggttggtttcccctgcactcccgaccttagcttattgatcccacatttccatggtgtgagatcctctttactctgggcagaagtgagccccccccttaaagggaattcgatgcccccctagaataatctcatccccccacccgacttcttttgaaatgtgaacgtccttccttgactgtctagccactccctcccagaaaaactggctctgattggaatttctggcctcctaaggctccccaccccgaaatcagcccccagccttgtttctgatgacagtgttatcccaagaccctgccccctgccagccgaccctcctggccttcctcgttgggccgctctgatttcaggcagcaggggctgctgtgatgccgtcctgctggagtgatttatactgtgaaatgagttggccagattgtggggtgcagctgggtggggcagcacacctctggggggataatgtccccactcccgaaagcctttcctcggtctcccttccgtccatcccccttcttcctcccctcaacagtgagttagactcaagggggtgacagaaccgagaagggggtgacagtcctccatccacgtggcctctctctctctcctcaggaccctcagccctggcctttttctttaaggtcccccgaccaatccccagcctaggacgccaacttctcccaccccttggcccctcacatcctctccaggaagggagtgaggggctgtgacatttttccggagaagatttcagagctgaggctttggtacccccaaacccccaatatttttggactggcagactcaaggggctggaatctcatgattccatgcccgagtccgcccatccctgaccatggttttggctctcccaccccgccgttccctgcgcttcatctcatgaggatttctttatgaggcaaatttatattttttaatatcggggggtggaccacgccgccctccatccgtgctgcatgaaaaacattccacgtgccccttgtcgcgcgtctcccatcctgatcccagacccattccttagctatttatccctttcctggtttccgaaaggcaattatatctattatgtataagtaaatatattatatatggatgtgtgtgtgtgcgtgcgcgtgagtgtgtgagcgcttctgcagcctcggcctaggtcacgttggccctcaaagcgagccgttgaattggaaactgcttctagaaactctggctcagcctgtctcgggctgacccttttctgatcgtctcggcccctctgattgttcccgatggtctctctccctctgtcttttctcctccgcctgtgtccatctgaccgttttcacttgtctcctttctgactgtccctgccaatgctccagctgtcgtctgactctgggttcgttggggacatgagattttattttttgtgagtgagactgagggatcgtagatttttacaatctgtatctttgacaattctgggtgcgagtgtgagagtgtgagcagggcttgctcctgccaaccacaattcaatgaatccccgacccccctaccccatgctgtacttgtggttctctttttgtattttgcatctgaccccggggggctgggacagattggcaatgggccgtcccctctccccttggttctgcactgttgccaataaaaagctcttaaaaacgca

SEQ ID NO: 7659 - DNA, 580 bp, Homo sapiens
  source 1..580: mol_type = unassigned DNA; mol_type = unassigned DNA
gtgtgtggctgtggctccgtcccgggggttctgtcacccggctgtgtccagcctcctctccaccccccatacctaagagtcaccaacccggggtgtgattcaccacccgctggaaccgtgcaacctttccccgaggaagaaggaggaggagtgcgccggtctcggggaaatgcccggttccttcgtgcccacggtcaccgcgatcacaaccagccaggacctccagtggcttgtgcaacccaccctcatctcttccatggcccagtcccaggggcagccactggcctcccagcccccggtcgtcgacccctacgacatgccgggaaccagctactccacaccaggcatgagtggctacagcagtggcggagcgagtggcagtggtgggccttccaccagcggaactaccagtgggcctgggcctgcccgcccagcccgagcccggcctaggagaccccgagaggagacgctcaccccagaggaagaggagaagcgaagggtgcgccgggaacgaaataaactagcagcagctaaatgcaggaaccggcggagggagctgaccgaccgactccaggcggag

SEQ ID NO: 7660 - DNA, 740 bp, Homo sapiens
  source 1..740: mol_type = unassigned DNA; mol_type = unassigned DNA
cgaggaccggaggcttgttttttggctcttgggggttctgaaagaagtagaggttcgggatgggtggaggagtgctgtatccccaaatctcatggcctctatctccctgactcagctcaccccagaggaagaggagaagcgaagggtgcgccgggaacgaaataaactagcagcagctaaatgcaggaaccggcggagggagctgaccgaccgactccaggcggagacagatcagttggaggaagaaaaagcagagctggagtcggagatcgccgagctccaaaaggagaaggaacgtctggagtttgtgctggtggcccacaaaccgggctgcaagatcccctacgaagaggggcccgggccgggcccgctggcggaggtgagagatttgccgggctcagcaccggctaaggaagatggcttcagctggctgctgccgcccccgccaccaccgcccctgcccttccagaccagccaagacgcaccccccaacctgacggcttctctctttacacacagtgaagttcaagtcctcggcgaccccttccccgttgttaacccttcgtacacttcttcgtttgtcctcacctgcccggaggtctccgcgttcgccggcgcccaacgcaccagcggcagtgaccagccttccgatcccctgaactcgccctccctcctcgctctgtgaactctttagacacacaaaacaaacaaacacatgggggagagagacttggaagagg

SEQ ID NO: 7661 - DNA, 1468 bp, Homo sapiens
  source 1..1468: mol_type = unassigned DNA; mol_type = unassigned DNA
cattcataagactcagagctacggccacggcagggacacgcggaaccaagacttggaaacttgattgttgtggttcttcttgggggttatgaaatttcattaatctttttttttccggggagaaagtttttggaaagattcttccagatatttcttcattttcttttggaggaccgacttactttttttggtcttctttattactcccctccccccgtgggacccgccggacgcgtggaggagaccgtagctgaagctgattctgtacagcgggacagcgctttctgcccctgggggagcaacccctccctcgcccctgggtcctacggagcctgcactttcaagaggtacagcggcatcctgtgggggcctgggcaccgcaggaagactgcacagaaactttgccattgttggaacgggacgttgctccttccccgagcttccccggacagcgtactttgaggactcgctcagctcaccggggactcccacggctcaccccggacttgcaccttacttccccaacccggccatagccttggcttcccggcgacctcagcgtggtcacaggggcccccctgtgcccagggaaatgtttcaggctttccccggagactacgactccggctcccggtgcagctcctcaccctctgccgagtctcaatatctgtcttcggtggactccttcggcagtccacccaccgccgccgcctcccaggagtgcgccggtctcggggaaatgcccggttccttcgtgcccacggtcaccgcgatcacaaccagccaggacctccagtggcttgtgcaacccaccctcatctcttccatggcccagtcccaggggcagccactggcctcccagcccccggtcgtcgacccctacgacatgccgggaaccagctactccacaccaggcatgagtggctacagcagtggcggagcgagtggcagtggtgggccttccaccagcggaactaccagtgggcctgggcctgcccgcccagcccgagcccggcctaggagaccccgagaggagacgctcaccccagaggaagaggagaagcgaagggtgcgccgggaacgaaataaactagcagcagctaaatgcaggaaccggcggagggagctgaccgaccgactccaggcggagacagatcagttggaggaagaaaaagcagagctggagtcggagatcgccgagctccaaaaggagaaggaacgtctggagtttgtgctggtggcccacaaaccgggctgcaagatcccctacgaagaggggcccgggccgggcccgctggcggaggaagttcaagtcctcggcgaccccttccccgttgttaacccttcgtacacttcttcgtttgtcctcacctgcccggaggtctccgcgttcgccggcgcccaacgcaccagcggcagtgaccagccttccgatcccctgaactcgccctccctcctcgctctgtga

SEQ ID NO: 7662 - DNA, 393 bp, Homo sapiens
  source 1..393: mol_type = unassigned DNA; mol_type = unassigned DNA
cgaaagcgaggaaacccgcactcgcgtcctctaacgcaaatgaccatctttggcaacgtgcgccaatggaacagaccaagggcgctgggcccgggggaaattccgggtagatatgcctggctcaggcagtgcattcatccccaccatcaacgccatcacgaccagccaggacctgcagtggatggtgcagcccacagtgatcacctccatgtccaacccataccctcgctcgcacccctacagccccctgccgggcctggcctctgtccctggacacatggccctcccaagacctggcgtgatcaagaccattggcaccaccgtgggccgcaggaggagagatgagcagctgtctcctgaagaggaggagaagcgtcgcatccggcgggagag

SEQ ID NO: 7663 - DNA, 5829 bp, Homo sapiens
  source 1..5829: mol_type = unassigned DNA; mol_type = unassigned DNA
gaatccacatggtacagggctggagaataaagagtaaattccgggtagatatgcctggctcaggcagtgcattcatccccaccatcaacgccatcacgaccagccaggacctgcagtggatggtgcagcccacagtgatcacctccatgtccaacccataccctcgctcgcacccctacagccccctgccgggcctggcctctgtccctggacacatggccctcccaagacctggcgtgatcaagaccattggcaccaccgtgggccgcaggaggagagatgagcagctgtctcctgaagaggaggagaagcgtcgcatccggcgggagaggaacaagctggctgcagccaagtgccggaaccgacgccgggagctgacagagaagctgcaggcgattggtccctggcaggttgctgtccctcacatccctctctttccgtggcaggagacagaggagctggaggaggagaagtcaggcctgcagaaggagattgctgagctgcagaaggagaaggagaagctggagttcatgttggtggctcacggcccagtgtgcaagattagccccgaggagcgccgatcgcccccagcccctgggctgcagcccatgcgcagtgggggtggctcggtgggcgctgtagtggtgaaacaggagcccctggaagaggacagcccctcgtcctcgtcggcggggctggacaaggcccagcgctctgtcatcaagcccatcagcattgctgggggcttctacggtgaggagcccctgcacacccccatcgtggtgacctccacacctgctgtcactccgggcacctcgaacctcgtcttcacctatcctagcgtcctggagcaggagtcacccgcatctccctccgaatcctgctccaaggctcaccgcagaagcagtagcagcggggaccaatcatcagactccttgaactcccccactctgctggctctgtaacccagtgcacctccctccccagctccggagggggtcctcctcgctcctccttcccagggaccagcaccttcaagcgctccagggccgtgagggcaagagggggacctgccaccagggagcttcctggctctgggggacccaggtgggacttagcagtgagtattggaagacttgggttgatctcttagaagccatgggacctcctccctcattcatcttgcaagcaaatcccatttcttgaaaagccttggagaactcggtttggtagacttggacatctctctggcttctgaagagcctgaagctggcctggaccattcctgtccctttgttaccatactgtctctggagtgatggtgtccttccctgccccaccacgcatgctcagtgccttttggtttcaccttccctcgacttgaccctttcctcccccagcgtcagtttcactccctcttggtttttatcaaatttgccatgacatttcatctgggtggtctgaatattaaagctcttcatttctggagatggggcagcaggtggctcttctgctggggctgacttgtccagaaggggacaaagtgcaatacagagccttccctaccctgacgcctcccagtcatcatctccagaactcccagcggggctccctgagctctcaaggagatgctgccatcactgggaggctcagaggacccttcctgcccaccttcggagacggcttctggaggaacggcttggccagaagacagggtgtgagtgagacagtggggcacaggttgggtttgccaaacgcctaattaccaggccaggaagcatgccaacaaagccacacgggtgtcctagccagcttcccttcacctggtgtcttgagtagggcgtctcctgtaattactgccttgccattctgcccctggacccttctctccggaccagggaggcgtccctccctaggagccacacattatactccaagtccctgccgggctccgcctttcccccaccctggctctcagggtgacgccacccacagagatttaatgagcgtgggcctggaccttccccagatgctgccaggcagcccctccccaagcctcaaagaagcatttgctgaggatggagaggcaggggagggaggcgggaggccgtcactggagtggcgtctgcagcagctgctgccccagcacccgctcagcctgtcctggctgctcacctccccgcagggcaccgggcctttcctgccctctgtggtcatctgccacctgctggatcaagtgctttctcttttacactcccctgtccccaccccagtgcactcttctggcccaggcagcaagcaagctgtgaacagctggcctgagctgtcgctgtggcttgtggctcatgcgccattcctggttgtctgttgaatctttctggctgctggaattggagataggatgttttgcttcccactgcaggagagctgccccctttcacggggttggggaagggtccccctggcctccagcaggagcacagctcagcagggtccctgctgcccacccctctgagccttttctccccagggtatggctcctgctgagtttcttgtccagcagggccttgacaggaatccagggagtagctcctggccagaaccagcctctgcggggcttgtgctctgcaaagactctgctgctggggattcagctctagaggtcacagtatcctcgtttgaaagataattaagatcccccgtggagaaagcagtgacacattcacacagctgttccctcgcatgttatttcatgaacatgacctgttttcgtgcactagacacacagagtggaacagccgtatgcttaaagtacatgggccagtgggactggaagtgacctgtacaagtgatgcagaaaggagggtttcaaagaaaaaggattttgtttaaaatactttaaaaatgttatttcctgcatcccttggctgtgatgcccctctcccgatttcccaggggctctgggagggacccttctaagaagattgggcagttgggtttctggcttgagatgaatccaagcagcagaatgagccaggagtagcaggagatgggcaaagaaaactggggtgcactcagctctcacaggggtaatcatctcaagtggtatttgtagccaagtgggagctattttcttttttgtgcatatagatatttcttaaatgaagctgctttcttgtcttttatttctaaaagcccccttataccccactttgtgcagcaaagatccccgtgcaggtcacagcctgatttgtggccaggctggacaaattcctgaggcacaacttggcttcagttcagatttcaagctgtgttggtgttgggaccagcagaaggcaaacgtccagccaacacacaggactgtaagaggactctgagctacgtgccctgtgaagacccccaggctttgtcataggaggtcgttcagcttccccaaagtcagaggtgatttgatttggggaagactgaatattcacacctaagtcgtgagcatatcctgagttttacttccttatggcttgccctccaagttctctctctcatacacacacacacccttgctccagaatcaccagacacctccatggctccagctatgggaacagctgcattggggctgcctttctgtttggcttaggaacttctgtgcttcttgtggctccactcgcgaggcagctcggaggtgtggactccgattgggctgcaggcagctctgggacggcacagggcgggcgctctgatcagctcgtgtaaaacacaccgtcttcttggcctcctggccagtctttctgcgaatagtcctctccctggccagttgaatgggggaagctgctggcacaggaaggagaggcgatcccggctgaggcttaggaaattgctggagccggctccaagcagataattcactggggaggttttcagagtcaaacatcattctgcctgtgttgggggccaggtgtgtcacacaagcatctcaaagtcaaaagccatctggggctgctgcttctgtttctcaggctctggggaaaggaatctccctctcctctcacttgattccaagtgtggttgaattgtctggagcactgggactttttttctcttttccttgatggaccaacagtgcaaatgcaatctcgccatttaactttcaggtcgatttcctttcctgatcagacatctttgtgccccctttaggaaggaaaagaatacacctacgatgtgccaggcactgtgttaggcgcttttatatagatcctcgttaggatgagactaagggatgaggacatctctttataaaaggcccctaagtaatggataaacagaaacacttagaggtgagaaggtctgtcttcaagatccaaggtaagattgccttcagtctgatgtttgttctcaaggacttatcccctacaatattctcccactccatacttctccttctaccccaccatgtgctcccgtgcactcctcagatggtcagaggggtaacccaagtccttagagaatttggggaccaatagaatatgtgatgtgtgaattttctttaaaaaacttaaggagtctttgctaccttctgcttgttgagttgttttggcattcatattaaaagccagcatctcactatttattgacaggttgggctgtgtgtgtgcgcatgtgtgtatacatttccaggcgtgcctgtgtcctgtagctttttaaaaggaaacccagtcatcccactatgaatctggcatcttcttatgcttctagtgttttggccatacatcaaccaaggggtttaatttatccaatgcttgacgacatgttcaggaggggctggatcaaattttgagagggttatgggaaagggagggggagaagaaattgacatttattttattatttattttaaatgtttacatcttctttatgttgtatcaagcctgaatagaaactgatagcattaaaatactccgttcctctctctcttctcgcttcctttttttttttttttttaaatttaggataacacatttttgtttctaaagtgatttgtgatttgtgctgtataaactgtataaaaggttctgtttttaaaggtggattttcattcctctggggacagtggtcgccaagacatctacattgtaagagaacacagtggaagatcctgtcctgattctcaaaaattattttctctgtatgattaaaagtttattccatttattttagtttgtgtttacttgattttgaggaagaaaatatttgactttgtgtaaagagtagggtatcagggtgtcttttctgccgtgggagatgtgtatatatatagtattttggtgtatagtagaaaataagctttgtgcatctgtatttgagatatgttaatgacgtggagtaaagtcagctgtaagactctggaggcaaacaagttgtatatggttcatatggctctatggggaatttaattacctttctgggcactttttttttttttttttttttaagtaatggtgaaatggtcccattggagagtctcctaaatagaccttccaggcagaaccgcaagctcaaaatctttgtatagttttgaaaattgaggagtagctttgtttggaagcctttctggtggtggtttttgttgttgttgttgttttgttgttttactatatgtaatacaagcctacagtatttgcactaaagaaagcttgttagaaaaagcttgctgctatggaagaaagaacatattaaaacttctttcccttgcgatttttttgggggaggggggttagcatttccactttcagttgagtagcattttgtagaataaaatgaattaagattgaa

SEQ ID NO: 7664 - DNA, 6708 bp, Homo sapiens
  source 1..6708: mol_type = unassigned DNA; mol_type = unassigned DNA
gtagtgactcatctcgggcagagcgctagggctccgagcgaaccagcgagcgagcgaacgagcggcgctcggcggggacagaaagagggagagagagagagagagagagggagaggcgcggccgggcgaggcgggcccgtccgggagcgggctccggggaaggggtgcgggtctgggcgccggagcggggagcggggccgcgtccctctcagcgccagctctacttgagccccacgagccgctgtccccctggcgcgctcggggccgcgggacgggcgcacgccgccttctcctagtcaagtatccgagccgccccgaaactcgggcggcgagtcggccacgggaagtttattctccggctccttttctaaaaggaagaaacagaagtttctcccagcggacagcttttctttccgcctttttggccctgtctgaaatcgggggtccccagggctggcaggccaggctcgctgggctcctaatcttttttttaatttccaatttttgattgggccgtgggtccccgctgagctccggctgcgcgcgggggcgggagggcgcgcgcaggggagggaccgagagacgcgccgactttttagagggagggatcgggtggacaactggtcccgcggcgctcgcagagccggaaagaagtgctgtaagggacgctcgggggacgctgttcctgaggtgtcgccgcctccctgtcctcgccctccgcggtgggggagaaacccaggagcgaagcccagagcccgcggcgcggccggcggacgaacgagcgcgcagcagccggtgcgcggccgcggcgagggcgggggaagaaaaacaccctgtttcctctccggcccccaccgcggatcatgtaccaggattatcccgggaactttgacacctcgtcccggggcagcagcggctctcctgcgcacgccgagtcctactccagcggcggcggcggccagcagaaattccgggtagatatgcctggctcaggcagtgcattcatccccaccatcaacgccatcacgaccagccaggacctgcagtggatggtgcagcccacagtgatcacctccatgtccaacccataccctcgctcgcacccctacagccccctgccgggcctggcctctgtccctggacacatggccctcccaagacctggcgtgatcaagaccattggcaccaccgtgggccgcaggaggagagatgagcagctgtctcctgaagaggaggagaagcgtcgcatccggcgggagaggaacaagctggctgcagccaagtgccggaaccgacgccgggagctgacagagaagctgcaggcggagacagaggagctggaggaggagaagtcaggcctgcagaaggagattgctgagctgcagaaggagaaggagaagctggagttcatgttggtggctcacggcccagtgtgcaagattagccccgaggagcgccgatcgcccccagcccctgggctgcagcccatgcgcagtgggggtggctcggtgggcgctgtagtggtgaaacaggagcccctggaagaggacagcccctcgtcctcgtcggcggggctggacaaggcccagcgctctgtcatcaagcccatcagcattgctgggggcttctacggtgaggagcccctgcacacccccatcgtggtgacctccacacctgctgtcactccgggcacctcgaacctcgtcttcacctatcctagcgtcctggagcaggagtcacccgcatctccctccgaatcctgctccaaggctcaccgcagaagcagtagcagcggggaccaatcatcagactccttgaactcccccactctgctggctctgtaacccagtgcacctccctccccagctccggagggggtcctcctcgctcctccttcccagggaccagcaccttcaagcgctccagggccgtgagggcaagagggggacctgccaccagggagcttcctggctctgggggacccaggtgggacttagcagtgagtattggaagacttgggttgatctcttagaagccatgggacctcctccctcattcatcttgcaagcaaatcccatttcttgaaaagccttggagaactcggtttggtagacttggacatctctctggcttctgaagagcctgaagctggcctggaccattcctgtccctttgttaccatactgtctctggagtgatggtgtccttccctgccccaccacgcatgctcagtgccttttggtttcaccttccctcgacttgaccctttcctcccccagcgtcagtttcactccctcttggtttttatcaaatttgccatgacatttcatctgggtggtctgaatattaaagctcttcatttctggagatggggcagcaggtggctcttctgctggggctgacttgtccagaaggggacaaagtgcaatacagagccttccctaccctgacgcctcccagtcatcatctccagaactcccagcggggctccctgagctctcaaggagatgctgccatcactgggaggctcagaggacccttcctgcccaccttcggagacggcttctggaggaacggcttggccagaagacagggtgtgagtgagacagtggggcacaggttgggtttgccaaacgcctaattaccaggccaggaagcatgccaacaaagccacacgggtgtcctagccagcttcccttcacctggtgtcttgagtagggcgtctcctgtaattactgccttgccattctgcccctggacccttctctccggaccagggaggcgtccctccctaggagccacacattatactccaagtccctgccgggctccgcctttcccccaccctggctctcagggtgacgccacccacagagatttaatgagcgtgggcctggaccttccccagatgctgccaggcagcccctccccaagcctcaaagaagcatttgctgaggatggagaggcaggggagggaggcgggaggccgtcactggagtggcgtctgcagcagctgctgccccagcacccgctcagcctgtcctggctgctcacctccccgcagggcaccgggcctttcctgccctctgtggtcatctgccacctgctggatcaagtgctttctcttttacactcccctgtccccaccccagtgcactcttctggcccaggcagcaagcaagctgtgaacagctggcctgagctgtcgctgtggcttgtggctcatgcgccattcctggttgtctgttgaatctttctggctgctggaattggagataggatgttttgcttcccactgcaggagagctgccccctttcacggggttggggaagggtccccctggcctccagcaggagcacagctcagcagggtccctgctgcccacccctctgagccttttctccccagggtatggctcctgctgagtttcttgtccagcagggccttgacaggaatccagggagtagctcctggccagaaccagcctctgcggggcttgtgctctgcaaagactctgctgctggggattcagctctagaggtcacagtatcctcgtttgaaagataattaagatcccccgtggagaaagcagtgacacattcacacagctgttccctcgcatgttatttcatgaacatgacctgttttcgtgcactagacacacagagtggaacagccgtatgcttaaagtacatgggccagtgggactggaagtgacctgtacaagtgatgcagaaaggagggtttcaaagaaaaaggattttgtttaaaatactttaaaaatgttatttcctgcatcccttggctgtgatgcccctctcccgatttcccaggggctctgggagggacccttctaagaagattgggcagttgggtttctggcttgagatgaatccaagcagcagaatgagccaggagtagcaggagatgggcaaagaaaactggggtgcactcagctctcacaggggtaatcatctcaagtggtatttgtagccaagtgggagctattttcttttttgtgcatatagatatttcttaaatgaagctgctttcttgtcttttatttctaaaagcccccttataccccactttgtgcagcaaagatccccgtgcaggtcacagcctgatttgtggccaggctggacaaattcctgaggcacaacttggcttcagttcagatttcaagctgtgttggtgttgggaccagcagaaggcaaacgtccagccaacacacaggactgtaagaggactctgagctacgtgccctgtgaagacccccaggctttgtcataggaggtcgttcagcttccccaaagtcagaggtgatttgatttggggaagactgaatattcacacctaagtcgtgagcatatcctgagttttacttccttatggcttgccctccaagttctctctctcatacacacacacacccttgctccagaatcaccagacacctccatggctccagctatgggaacagctgcattggggctgcctttctgtttggcttaggaacttctgtgcttcttgtggctccactcgcgaggcagctcggaggtgtggactccgattgggctgcaggcagctctgggacggcacagggcgggcgctctgatcagctcgtgtaaaacacaccgtcttcttggcctcctggccagtctttctgcgaatagtcctctccctggccagttgaatgggggaagctgctggcacaggaaggagaggcgatcccggctgaggcttaggaaattgctggagccggctccaagcagataattcactggggaggttttcagagtcaaacatcattctgcctgtgttgggggccaggtgtgtcacacaagcatctcaaagtcaaaagccatctggggctgctgcttctgtttctcaggctctggggaaaggaatctccctctcctctcacttgattccaagtgtggttgaattgtctggagcactgggactttttttctcttttccttgatggaccaacagtgcaaatgcaatctcgccatttaactttcaggtcgatttcctttcctgatcagacatctttgtgccccctttaggaaggaaaagaatacacctacgatgtgccaggcactgtgttaggcgcttttatatagatcctcgttaggatgagactaagggatgaggacatctctttataaaaggcccctaagtaatggataaacagaaacacttagaggtgagaaggtctgtcttcaagatccaaggtaagattgccttcagtctgatgtttgttctcaaggacttatcccctacaatattctcccactccatacttctccttctaccccaccatgtgctcccgtgcactcctcagatggtcagaggggtaacccaagtccttagagaatttggggaccaatagaatatgtgatgtgtgaattttctttaaaaaacttaaggagtctttgctaccttctgcttgttgagttgttttggcattcatattaaaagccagcatctcactatttattgacaggttgggctgtgtgtgtgcgcatgtgtgtatacatttccaggcgtgcctgtgtcctgtagctttttaaaaggaaacccagtcatcccactatgaatctggcatcttcttatgcttctagtgttttggccatacatcaaccaaggggtttaatttatccaatgcttgacgacatgttcaggaggggctggatcaaattttgagagggttatgggaaagggagggggagaagaaattgacatttattttattatttattttaaatgtttacatcttctttatgttgtatcaagcctgaatagaaactgatagcattaaaatactccgttcctctctctcttctcgcttcctttttttttttttttttaaatttaggataacacatttttgtttctaaagtgatttgtgatttgtgctgtataaactgtataaaaggttctgtttttaaaggtggattttcattcctctggggacagtggtcgccaagacatctacattgtaagagaacacagtggaagatcctgtcctgattctcaaaaattattttctctgtatgattaaaagtttattccatttattttagtttgtgtttacttgattttgaggaagaaaatatttgactttgtgtaaagagtagggtatcagggtgtcttttctgccgtgggagatgtgtatatatatagtattttggtgtatagtagaaaataagctttgtgcatctgtatttgagatatgttaatgacgtggagtaaagtcagctgtaagactctggaggcaaacaagttgtatatggttcatatggctctatggggaatttaattacctttctgggcactttttttttttttttttttttaagtaatggtgaaatggtcccattggagagtctcctaaatagaccttccaggcagaaccgcaagctcaaaatctttgtatagttttgaaaattgaggagtagctttgtttggaagcctttctggtggtggtttttgttgttgttgttgttttgttgttttactatatgtaatacaagcctacagtatttgcactaaagaaagcttgttagaaaaagcttgctgctatggaagaaagaacatattaaaacttctttcccttgcgatttttttgggggaggggggttagcatttccactttcagttgagtagcattttgtagaataaaatgaattaagattgaa

SEQ ID NO: 7665 - DNA, 889 bp, Homo sapiens
  source 1..889: mol_type = unassigned DNA; mol_type = unassigned DNA
caggatgtgagcggaggcaattcccggttttggaagaaaatcagacaggaaaccagtgctaggaagaaggaagagaactcagtccagcagagtgtaatagggcctcattaccgaagcaaaaagcagctgttggctaattcctagcatgctgtaacacatgagtattttgcaattagcaataaccagtgcacggggtttcgcatagacgcctgcccattcggcccggcagtgtgtgaggcgcctttcaaaccggagggattggcaagaaattccgggtagatatgcctggctcaggcagtgcattcatccccaccatcaacgccatcacgaccagccaggacctgcagtggatggtgcagcccacagtgatcacctccatgtccaacccataccctcgctcgcacccctacagccccctgccgggcctggcctctgtccctggacacatggccctcccaagacctggcgtgatcaagaccattggcaccaccgtgggccgcaggaggagagatgagcagctgtctcctgaagaggaggagaagcgtcgcatccggcgggagaggaacaagctggctgcagccaagtgccggaaccgacgccgggagctgacagagaagctgcaggcggagacagaggagctggaggaggagaagtcaggcctgcagaaggagattgctgagctgcagaaggagaaggagaagctggagttcatgttggtggctcacggcccagtgtgcaagattagccccgaggagcgccgatcgcccccagcccctgggctgcagcccatgcgcagtgggggtggctcggtgggcgctgtagtggtgaaacaggagcccctggaagaggacagcccctcgtcctcgtcggcggggctggacaaggccca

SEQ ID NO: 7666 - DNA, 2862 bp, Homo sapiens
  source 1..2862: mol_type = unassigned DNA; mol_type = unassigned DNA
cgcgcggccgcccgtcgcttcgcacagggctggatggttgtattgggcagggtggctccaggatgttaggaactgtgaagatggaagggcatgaaaccagcgactggaacagctactacgcagacacgcaggaggcctactcctccgtcccggtcagcaacatgaactcaggcctgggctccatgaactccatgaacacctacatgaccatgaacaccatgactacgagcggcaacatgaccccggcgtccttcaacatgtcctatgccaacccgggcctaggggccggcctgagtcccggcgcagtagccggcatgccggggggctcggcgggcgccatgaacagcatgactgcggccggcgtgacggccatgggtacggcgctgagcccgagcggcatgggcgccatgggtgcgcagcaggcggcctccatgaatggcctgggcccctacgcggccgccatgaacccgtgcatgagccccatggcgtacgcgccgtccaacctgggccgcagccgcgcgggcggcggcggcgacgccaagacgttcaagcgcagctacccgcacgccaagccgccctactcgtacatctcgctcatcaccatggccatccagcaggcgcccagcaagatgctcacgctgagcgagatctaccagtggatcatggacctcttcccctattaccggcagaaccagcagcgctggcagaactccatccgccactcgctgtccttcaatgactgcttcgtcaaggtggcacgctccccggacaagccgggcaagggctcctactggacgctgcacccggactccggcaacatgttcgagaacggctgctacttgcgccgccagaagcgcttcaagtgcgagaagcagccgggggccggcggcgggggcgggagcggaagcgggggcagcggcgccaagggcggccctgagagccgcaaggacccctctggcgcctctaaccccagcgccgactcgcccctccatcggggtgtgcacgggaagaccggccagctagagggcgcgccggcccccgggcccgccgccagcccccagactctggaccacagtggggcgacggcgacagggggcgcctcggagttgaagactccagcctcctcaactgcgccccccataagctccgggcccggggcgctggcctctgtgcccgcctctcacccggcacacggcttggcaccccacgagtcccagctgcacctgaaaggggacccccactactccttcaaccacccgttctccatcaacaacctcatgtcctcctcggagcagcagcataagctggacttcaaggcatacgaacaggcactgcaatactcgccttacggctctacgttgcccgccagcctgcctctaggcagcgcctcggtgaccaccaggagccccatcgagccctcagccctggagccggcgtactaccaaggtgtgtattccagacccgtcctaaacacttcctagctcccgggactggggggtttgtctggcatagccatgctggtagcaagagagaaaaaatcaacagcaaacaaaaccacacaaaccaaaccgtcaacagcataataaaatcccaacaactatttttatttcatttttcatgcacaacctttcccccagtgcaaaagactgttactttattattgtattcaaaattcattgtgtatattactacaaagacaaccccaaaccaatttttttcctgcgaagtttaatgatccacaagtgtatatatgaaattctcctccttccttgcccccctctctttcttccctctttcccctccagacattctagtttgtggagggttatttaaaaaaacaaaaaaggaagatggtcaagtttgtaaaatatttgtttgtgctttttccccctccttacctgaccccctacgagtttacaggtctgtggcaatactcttaaccataagaattgaaatggtgaagaaacaagtatacactagaggctcttaaaagtattgaaagacaatactgctgttatatagcaagacataaacagattataaacatcagagccatttgcttctcagtttacatttctgatacatgcagatagcagatgtctttaaatgaaatacatgtatattgtgtatggacttaattatgcacatgctcagatgtgtagacatcctccgtatatttacataacatatagaggtaatagataggtgatatacatgatacattctcaagagttgcttgaccgaaagttacaaggaccccaacccctttgtcctctctacccacagatggccctgggaatcaattcctcaggaattgccctcaagaactctgcttcttgctttgcagagtgccatggtcatgtcattctgaggtcacataacacataaaattagtttctatgagtgtataccatttaaagaatttttttttcagtaaaagggaatattacaatgttggaggagagataagttatagggagctggatttcaaaacgtggtccaagattcaaaaatcctattgatagtggccattttaatcattgccatcgtgtgcttgtttcatccagtgttatgcactttccacagttggacatggtgttagtatagccagacgggtttcattattatttctctttgctttctcaatgttaatttattgcatggtttattctttttctttacagctgaaattgctttaaatgatggttaaaattacaaattaaattgttaatttttatcaatgtgattgtaattaaaaatattttgatttaaataacaaaaataataccagattttaagccgtggaaaatgttcttgatcatttgcagttaaggactttaaataaatcaaatgttaacaaaa

SEQ ID NO: 7667 - DNA, 1806 bp, Homo sapiens
  source 1..1806: mol_type = unassigned DNA; mol_type = unassigned DNA
atttttacaatgtgcacaaaaggattacagggaaaaccagttacagggaggactaccacctattaaaagtatttttctggaaacagctggcgattaccctccaaaagtttaattaccattattgaaaacgcgtattggaactgccttggataatcttgggaagagggaaagaaaataaagccccaaggcctactcctccgtcccggtcagcaacatgaactcaggcctgggctccatgaactccatgaacacctacatgaccatgaacaccatgactacgagcggcaacatgaccccggcgtccttcaacatgtcctatgccaacccgggcctaggggccggcctgagtcccggcgcagtagccggcatgccggggggctcggcgggcgccatgaacagcatgactgcggccggcgtgacggccatgggtacggcgctgagcccgagcggcatgggcgccatgggtgcgcagcaggcggcctccatgaatggcctgggcccctacgcggccgccatgaacccgtgcatgagccccatggcgtacgcgccgtccaacctgggccgcagccgcgcgggcggcggcggcgacgccaagacgttcaagcgcagctacccgcacgccaagccgccctactcgtacatctcgctcatcaccatggccatccagcaggcgcccagcaagatgctcacgctgagcgagatctaccagtggatcatggacctcttcccctattaccggcagaaccagcagcgctggcagaactccatccgccactcgctgtccttcaatgactgcttcgtcaaggtggcacgctccccggacaagccgggcaagggctcctactggacgctgcacccggactccggcaacatgttcgagaacggctgctacttgcgccgccagaagcgcttcaagtgcgagaagcagccgggggccggcggcgggggcgggagcggaagcgggggcagcggcgccaagggcggccctgagagccgcaaggacccctctggcgcctctaaccccagcgccgactcgcccctccatcggggtgtgcacgggaagaccggccagctagagggcgcgccggcccccgggcccgccgccagcccccagactctggaccacagtggggcgacggcgacagggggcgcctcggagttgaagactccagcctcctcaactgcgccccccataagctccgggcccggggcgctggcctctgtgcccgcctctcacccggcacacggcttggcaccccacgagtcccagctgcacctgaaaggggacccccactactccttcaaccacccgttctccatcaacaacctcatgtcctcctcggagcagcagcataagctggacttcaaggcatacgaacaggcactgcaatactcgccttacggctctacgttgcccgccagcctgcctctaggcagcgcctcggtgaccaccaggagccccatcgagccctcagccctggagccggcgtactaccaaggtgtgtattccagacccgtcctaaacacttcctagctcccgggactggggggtttgtctggcatagccatgctggtagcaagagagaaaaaatcaacagcaaacaaaaccacacaaaccaaaccgtcaacagcataataaaatcccaacaactatttttatttcatttttcatgcacaacctttcccccagtgcaaaagactgttactttattattgtattcaaaattcattgtgtatattactacaaagacaaccccaaaccaatttttttcctgcgaagtttaatgatccacaagtgtatatatg

SEQ ID NO: 7668 - DNA, 507 bp, Homo sapiens
  source 1..507: mol_type = unassigned DNA; mol_type = unassigned DNA
ttcgcccgggtggcgttgggcccgcgcgggcgctcgggtgactgcagctgctcagctcccctcccccgccccgcgccgcgcggccgcccgtcgcttcgcacagggctggatggttgtattgggcagggtggctccaggatgttaggaactgtgaagatggaagggcatgaaaccagcgactggaacagctactacgcagacacgcaggagctggcgattaccctccaaaagtttaattaccattattgaaaacgcgtattggaactgccttggataatcttgggaagagggaaagaaaataaagccccaaggcctactcctccgtcccggtcagcaacatgaactcaggcctgggctccatgaactccatgaacacctacatgaccatgaacaccatgactacgagcggcaacatgaccccggcgtccttcaacatgtcctatgccaacccgggcctaggggccggcctgagtcccggcgcagtagccggcatgccggggggctcgg

SEQ ID NO: 7669 - DNA, 789 bp, Homo sapiens
  source 1..789: mol_type = unassigned DNA; mol_type = unassigned DNA
aagggcatgaaaccagcgactggaacagctactacgcagacacgcaggagcgagcgggagcaggagccgggcccggggtgcagcgggcgggcgagcgccggtgcgagttggaagcaactctgagaaagccggagcatacccacaaggcgacctcttcgtcccaccgtttaattcgcagacgtcttctgattaaagcgctctgccgccaagttgggtgtctcaataatgaaacgatttctaaattttgtaaaacttgttcttcaaaagccctatttggggagaagtgtgctccttctctaaaaccgctgggtggcgctagtgcgaccaaaatcttcttcacaactctgggccgagaacctgtttctcttcattgtccccttggtggcacgttcatgggggttatttttacaatgtgcacaaaaggattacagggaaaaccagttacagggaggactaccacctattaaaagtatttttctggaaacagctggcgattaccctccaaaagtttaattaccattattgaaaacgcgtattggaactgccttggataatcttgggaagagggaaagaaaataaagccccaaggtaaaaaatacttttaagacgtggacagaaaaatataggatcacgtaatattttgatggtaactgacttatttagatttatgtattcacaagtttacctctgagtttatttgcataccatagtttactgggtgttcctatttaaatctatttgttctcatattttcaaattgagtcatacttgctgattaaaataaactta

SEQ ID NO: 7670 - DNA, 392 bp, Homo sapiens
  source 1..392: mol_type = unassigned DNA; mol_type = unassigned DNA
acaaaaaaaaaaagttatgtcataaagatataaaccggtgctgtgactcacctgctcttagccgcaggtgcgagcgtctttgtgcggcggacaaatggggagaggacgaggaggtgggcactcaagcgacgtaagatccacatcagctcaactgcacttgcctcgcagaggcagcccgctcacttcccgcggaggcgctccccggcgccgcgctccgcggcagccgcctgcccccggcgctgcccccgcccgccgcgccgccgccgccgccgcgcacgccgcgccccgcagctctgggcttcctcttcgcccgggtggcgttgggcccgcgcgggcgctcgggtgactgcagctgctcagctcccctcccccgccccgcgccgcgcggccgc

SEQ ID NO: 7671 - DNA, 2422 bp, Homo sapiens
  source 1..2422: mol_type = unassigned DNA; mol_type = unassigned DNA
cccgcccacttccaactaccgcctccggcctgcccagggagagagagggagtggagcccagggagagggagcgcgagagagggagggaggaggggacggtgctttggctgacttttttttaaaagagggtgggggtggggggtgattgctggtcgtttgttgtggctgttaaattttaaactgccatgcactcggcttccagtatgctgggagcggtgaagatggaagggcacgagccgtccgactggagcagctactatgcagagcccgagggctactcctccgtgagcaacatgaacgccggcctggggatgaacggcatgaacacgtacatgagcatgtcggcggccgccatgggcagcggctcgggcaacatgagcgcgggctccatgaacatgtcgtcgtacgtgggcgctggcatgagcccgtccctggcggggatgtcccccggcgcgggcgccatggcgggcatgggcggctcggccggggcggccggcgtggcgggcatggggccgcacttgagtcccagcctgagcccgctcggggggcaggcggccggggccatgggcggcctggccccctacgccaacatgaactccatgagccccatgtacgggcaggcgggcctgagccgcgcccgcgaccccaagacctacaggcgcagctacacgcacgcaaagccgccctactcgtacatctcgctcatcaccatggccatccagcagagccccaacaagatgctgacgctgagcgagatctaccagtggatcatggacctcttccccttctaccggcagaaccagcagcgctggcagaactccatccgccactcgctctccttcaacgactgtttcctgaaggtgccccgctcgcccgacaagcccggcaagggctccttctggaccctgcaccctgactcgggcaacatgttcgagaacggctgctacctgcgccgccagaagcgcttcaagtgcgagaagcagctggcgctgaaggaggccgcaggcgccgccggcagcggcaagaaggcggccgccggagcccaggcctcacaggctcaactcggggaggccgccgggccggcctccgagactccggcgggcaccgagtcgcctcactcgagcgcctccccgtgccaggagcacaagcgagggggcctgggagagctgaaggggacgccggctgcggcgctgagccccccagagccggcgccctctcccgggcagcagcagcaggccgcggcccacctgctgggcccgccccaccacccgggcctgccgcctgaggcccacctgaagccggaacaccactacgccttcaaccacccgttctccatcaacaacctcatgtcctcggagcagcagcaccaccacagccaccaccaccaccaaccccacaaaatggacctcaaggcctacgaacaggtgatgcactaccccggctacggttcccccatgcctggcagcttggccatgggcccggtcacgaacaaaacgggcctggacgcctcgcccctggccgcagatacctcctactaccagggggtgtactcccggcccattatgaactcctcttaagaagacgacggcttcaggcccggctaactctggcaccccggatcgaggacaagtgagagagcaagtgggggtcgagactttggggagacggtgttgcagagacgcaagggagaagaaatccataacacccccaccccaacacccccaagacagcagtcttcttcacccgctgcagccgttccgtcccaaacagagggccacacagataccccacgttctatataaggaggaaaacgggaaagaatataaagttaaaaaaaagcctccggtttccactactgtgtagactcctgcttcttcaagcacctgcagattctgatttttttgttgttgttgttctcctccattgctgttgttgcagggaagtcttacttaaaaaaaaaaaaaaattttgtgagtgactcggtgtaaaaccatgtagttttaacagaaccagagggttgtactattgtttaaaaacaggaaaaaaaataatgtaagggtctgttgtaaatgaccaagaaaaagaaaaaaaaagcattcccaatcttgacacggtgaaatccaggtctcgggtccgattaatttatggtttctgcgtgctttatttatggcttataaatgtgtattctggctgcaagggccagagttccacaaatctatattaaagtgttatacccggttttatcccttgaatcttttcttccagatttttcttttctttacttggcttacaaaatatacaggcttggaaattatttcaagaaggagggagggataccctgtctggttgcaggttgtattttattttggcccagggagtgttgctgttttcccaacattttattaataaaattttcagacat

SEQ ID NO: 7672 - DNA, 2401 bp, Homo sapiens
  source 1..2401: mol_type = unassigned DNA; mol_type = unassigned DNA
gctagaggggctgcttgcgccaggcgccggccgccccactgcgggtccctggcggccggtgtctgaggagtcggagagccgaggcggccagaccgtgcgccccgcgcttctcccgaggccgttccgggtctgaactgtaacagggaggggcctcgcaggagcagcagcgggcgagttaaagtatgctgggagcggtgaagatggaagggcacgagccgtccgactggagcagctactatgcagagcccgagggctactcctccgtgagcaacatgaacgccggcctggggatgaacggcatgaacacgtacatgagcatgtcggcggccgccatgggcagcggctcgggcaacatgagcgcgggctccatgaacatgtcgtcgtacgtgggcgctggcatgagcccgtccctggcggggatgtcccccggcgcgggcgccatggcgggcatgggcggctcggccggggcggccggcgtggcgggcatggggccgcacttgagtcccagcctgagcccgctcggggggcaggcggccggggccatgggcggcctggccccctacgccaacatgaactccatgagccccatgtacgggcaggcgggcctgagccgcgcccgcgaccccaagacctacaggcgcagctacacgcacgcaaagccgccctactcgtacatctcgctcatcaccatggccatccagcagagccccaacaagatgctgacgctgagcgagatctaccagtggatcatggacctcttccccttctaccggcagaaccagcagcgctggcagaactccatccgccactcgctctccttcaacgactgtttcctgaaggtgccccgctcgcccgacaagcccggcaagggctccttctggaccctgcaccctgactcgggcaacatgttcgagaacggctgctacctgcgccgccagaagcgcttcaagtgcgagaagcagctggcgctgaaggaggccgcaggcgccgccggcagcggcaagaaggcggccgccggagcccaggcctcacaggctcaactcggggaggccgccgggccggcctccgagactccggcgggcaccgagtcgcctcactcgagcgcctccccgtgccaggagcacaagcgagggggcctgggagagctgaaggggacgccggctgcggcgctgagccccccagagccggcgccctctcccgggcagcagcagcaggccgcggcccacctgctgggcccgccccaccacccgggcctgccgcctgaggcccacctgaagccggaacaccactacgccttcaaccacccgttctccatcaacaacctcatgtcctcggagcagcagcaccaccacagccaccaccaccaccaaccccacaaaatggacctcaaggcctacgaacaggtgatgcactaccccggctacggttcccccatgcctggcagcttggccatgggcccggtcacgaacaaaacgggcctggacgcctcgcccctggccgcagatacctcctactaccagggggtgtactcccggcccattatgaactcctcttaagaagacgacggcttcaggcccggctaactctggcaccccggatcgaggacaagtgagagagcaagtgggggtcgagactttggggagacggtgttgcagagacgcaagggagaagaaatccataacacccccaccccaacacccccaagacagcagtcttcttcacccgctgcagccgttccgtcccaaacagagggccacacagataccccacgttctatataaggaggaaaacgggaaagaatataaagttaaaaaaaagcctccggtttccactactgtgtagactcctgcttcttcaagcacctgcagattctgatttttttgttgttgttgttctcctccattgctgttgttgcagggaagtcttacttaaaaaaaaaaaaaaattttgtgagtgactcggtgtaaaaccatgtagttttaacagaaccagagggttgtactattgtttaaaaacaggaaaaaaaataatgtaagggtctgttgtaaatgaccaagaaaaagaaaaaaaaagcattcccaatcttgacacggtgaaatccaggtctcgggtccgattaatttatggtttctgcgtgctttatttatggcttataaatgtgtattctggctgcaagggccagagttccacaaatctatattaaagtgttatacccggttttatcccttgaatcttttcttccagatttttcttttctttacttggcttacaaaatatacaggcttggaaattatttcaagaaggagggagggataccctgtctggttgcaggttgtattttattttggcccagggagtgttgctgttttcccaacattttattaataaaattttcagacat

SEQ ID NO: 7673 - DNA, 100 bp, Homo sapiens
  source 1..100: mol_type = unassigned DNA; mol_type = unassigned DNA
ctggaaccgactccggagagtgagggccagggtgatcgctcgcagctacccgcttccaattcggattagaagctgaggctggagcggcgaggagaaaacg

SEQ ID NO: 7674 - DNA, 147 bp, Homo sapiens
  source 1..147: mol_type = unassigned DNA; mol_type = unassigned DNA
aatcatttcacgctagaccgactacgaaaacgtaccgggccgtccacctcagagggagccctgtgtgccattataagtggtgggtgatcgctcgcagctacccgcttccaattcggattagaagctgaggctggagcggcgaggaga

SEQ ID NO: 7675 - DNA, 166 bp, Homo sapiens
  source 1..166: mol_type = unassigned DNA; mol_type = unassigned DNA
aaagtgagtaggaaggggaaggcccacaaatctctccagccgggtgatcgctcgcagctacccgcttccaattcggattagaagctgaggctggagcggcgaggagaaaacgacatcgagtcaccccgcgcgtgagcgacgctctggagcaggagagaaggaaaag

SEQ ID NO: 7676 - DNA, 100 bp, Homo sapiens
  source 1..100: mol_type = unassigned DNA; mol_type = unassigned DNA
gagaaatccagagcttggaaataaatgtttgggaccatgtcactatcaacactgattgttggaacccttgaatttttccacatggtgatcgctcgcagct

SEQ ID NO: 7677 - DNA, 172 bp, Homo sapiens
  source 1..172: mol_type = unassigned DNA; mol_type = unassigned DNA
tgaatttttccacatgtaaatacagtttgttttaaagtgagaagatatgtagacataggtaaagatacatacatacagtggaaggacatttgagggtgatcgctcgcagctacccgcttccaattcggattagaagctgaggctggagcggcgaggagaaaacgacatcgag

SEQ ID NO: 7678 - DNA, 111 bp, Homo sapiens
  source 1..111: mol_type = unassigned DNA; mol_type = unassigned DNA
ccaaatctgccagatatcttaatgaaagtttatccaagtgaagaaatgcttacattttataattatttaccttctagaggaaggaaaagggtgatcgctcgcagctacccg

SEQ ID NO: 7679 - DNA, 158 bp, Homo sapiens
  source 1..158: mol_type = unassigned DNA; mol_type = unassigned DNA
aattatttaccttctagaggaaggaaaaggtgcctttcatttatgcttctccacctccctcttctctggggctacatcctccgtaaaatgtgggtgatcgctcgcagctacccgcttccaattcggattagaagctgaggctggagcggcgaggagaa

SEQ ID NO: 7680 - DNA, 4890 bp, Homo sapiens
  source 1..4890: mol_type = unassigned DNA; mol_type = unassigned DNA
ttcaacctccaaccgaaccttcccagttccaaagcccaagaagctgggactgtgagatccacgttcccaaggctccccggtgctttccagcagcactcagggttggcaagagctggcttcagtatactgttatttcaggaatgaggcccgcacaaaataaaagcatttgagaaacggaaaggaaaaaaaaggagtgaaaataggaaggcttaaaaaaaaaaccggaaagaaatagacgcccacccttattttccctccaatgtcaacaagcaaaacgaaaatatttccagggtgatcgctcgcagctacccgcttccaattcggattagaagctgaggctggagcggcgaggagaaaacgacatcgagtcaccccgcgcgtgagcgacgctctggagcaggagagaaggaaaaggaagagacacacgtatatagcatgtgttacctgatttatttcgagattgtttggtactgttttctctctgggcacctctcatttcggaaggccatcagaggcgcccactactgagcggccccggccgccgcagcagcacccggagccccagtcccggtttccccgcggtgccggagcccggagctcgccgccgcccaggcctcaggaatcgagtaagtaacccctgtttggccccgcgctcctctgcccacttcctcctcctcatctcatcgctcccaaagctctcccacaccctcctcccccgaagtaaaggacacccccgcacacacgccagcggtgggccttatctccccccttatccaaagctgcgctagactattacctacaaagggcacaattttcctgctggctcagaaatgccagacactggcctgcaaggccgactcggaaaagtagtgcctcgcctctacctcctccatttcctgccctctcgcatcctctccctgcactcccactcttcccactaccaccaccacccccgctttcaaaaataaaattggatacaaactttaatcactaaggacaaatattgacgcttaaacgaaaatgacccagtacaatgaggaggaagccggaaatgtgagctattggccctaggaggggaatttcggtggagcggagccggcggggtggagggggtggcgggggcgcagggaagggctgcggcaccgcgtgctcccgccggcgtatccctacgcggctccgcgcggcctcggggtccgaggcccgcggagagggggaggcgagcgcccgagggggcggcagccggcgggcggggcgggggtgggtgggcccggcccctccgattggtcgacggcgagagagacgctcccgcacgccgccagctctgattggcccagcggtaggaaaggttaaaccaaaaatttttttacagccctagtgtgcgcctgtagctcggaaaattaattgtggctatagccgcctcgatcgctgtctccccagcctcgccgcggccgctccgggacgcgcccgcccgccgcccggctctccccccctttgggctgctgctgctgctgctgtgactgctgctgcgagaggaggaggaggaggaggaagcagcgggggggggagcggggggtggggggggagaccaagaagtacagttgggagcgagggagcttcacccccggggcggtggttgtttcttttttctttctttcttttttcttttcctttttttttttttttctaattcctgaggggtggttgctgcttttgctacatgacttgccagcgcccgagcctgcggtccaactgcgctgctgccggagcgctcagtgccgccgctgccgcccgcgccccccgcgccccgttcggcacccaccggtcgccgccgcccgccgcgccgctgtcccgctcccgcgccgccgccgccgtttccccccgacgactgggtgatgctggacatgggagataggaaagaggtgaaaatgatccccaagtcctcgttcagcatcaacagcctggtgcccgaggcggtccagaacgacaaccaccacgcgagccacggccaccacaacagccaccacccccagcaccaccaccaccaccaccaccatcaccaccacccgccgccgcccgccccgcaaccgccgccgccgccgcagcagcagcagccgccgccgccgccgcccccggcaccgcagcccccccagacgcggggcgccccggccgccgacgacgacaagggcccccagcagctgctgctcccgccgccgccaccgccaccaccggccgccgccctggacggggctaaagcggacgggctgggcggcaagggcgagccgggcggcgggccgggggagctggcgcccgtcgggccggacgagaaggagaagggcgccggcgccgggggggaggagaagaagggggcgggcgagggcggcaaggacggggaggggggcaaggagggcgagaagaagaacggcaagtacgagaagccgccgttcagctacaacgcgctcatcatgatggccatccggcagagccccgagaagcggctcacgctcaacggcatctacgagttcatcatgaagaacttcccttactaccgcgagaacaagcagggctggcagaactccatccgccacaatctgtccctcaacaagtgcttcgtgaaggtgccgcgccactacgacgacccgggcaagggcaactactggatgctggacccgtcgagcgacgacgtgttcatcggcggcaccacgggcaagctgcggcgccgctccaccacctcgcgggccaagctggccttcaagcgcggtgcgcgcctcacctccaccggcctcaccttcatggaccgcgccggctccctctactggcccatgtcgcccttcctgtccctgcaccacccccgcgccagcagcactttgagttacaacggcaccacgtcggcctaccccagccaccccatgccctacagctccgtgttgactcagaactcgctgggcaacaaccactccttctccaccgccaacggcctgagcgtggaccggctggtcaacggggagatcccgtacgccacgcaccacctcacggccgccgcgctagccgcctcggtgccctgcggcctgtcggtgccctgctctgggacctactccctcaacccctgctccgtcaacctgctcgcgggccagaccagttactttttcccccacgtcccgcacccgtcaatgacttcgcagagcagcacgtccatgagcgccagggccgcgtcctcctccacgtcgccgcaggccccctcgaccctgccctgtgagtctttaagaccctctttgccaagttttacgacgggactgtctgggggactgtctgattatttcacacatcaaaatcaggggtcttcttccaaccctttaatacattaacatccctgggaccagactgtaagtgaacgttttacacacatttgcattgtaaatgataattaaaaaaataagtccaggtattttttattaagcccccccctcccatttctgtacgtttgttcagtctctagggttgtttattattctaacaaggtgtggagtgtcagcgaggtgcaatgtggggagaatacattgtagaatataaggtttggaagtcaaattatagtagaatgtgtatctaaatagtgactgctttgccatttcattcaaacctgacaagtctatctctaagagccgccagatttccatgtgtgcagtattataagttatcatggaactatatggtggacgcagaccttgagaacaacctaaattatggggagaattttaaaatgttaaactgtaatttgtatttaaaaagcattcgtagtaaaggtgcccaagaaattattttggccatttattgttttgtccttttctttaaagaactgtttttttttcttttgtttacttttagaccaaagattgggttctagaaaatgcacttggtatactaagtattaaaacaaacaaaaaggaaagttgtttcagttggcaacactgcccattcaattgaatcagaaggggacaaaattaacgattgccttcagtttgtgttgtgtatattttgatgtatgtggtcactaacaggtcacttttattttttctaaatgtagtgaaatgttaatacctattgtacttataggtaaaccttgcaaatatgtaacctgtgttgcgcaaatgccgcataaatttgagtgattgttaatgttgtcttaaaatttcttgattgtgatactgtggtcatatgcccgtgtttgtcacttacaaaaatgtttactatgaacacacagaaataaaaaataggctaaattcatatatatcttgatacttttgtctcttttattaagtagagctaattttttaaagaccaatcaacttatagggaattcaaaggctttttcagccaaactaaaatttaaactgctcctttaatttgaactgactctaaaaatgaaaatagtatttttccctttgtgaacaaattttacaaggagcagcctatttaataaacactagctttaaacaaagtataggcttttcagctgatacctgtaagtttctgtggatatacagcaaaaagagatataatttaattttctgtgcatagctctttaccctgtgtttatttccaaatccattaatagaatgccatttatatattttgtttcaggtatattgttaatagagcttggcaaattataaataaatatatgtatatggttagatagaagtgactataatgcacacatatgtaatatatatagacacacagagcccttcagttcaggtacaatttgcgctatgaatgctgcaaacatttttgtttaaatatttgtatttatactttctaagtcagcatttatttttgtggctgtttacccacaatgaaagagttctaataaagatgtgctgaagttgcaatata

SEQ ID NO: 7681 - DNA, 2503 bp, Homo sapiens
  source 1..2503: mol_type = unassigned DNA; mol_type = unassigned DNA
gttgagtcaatgtgtccccctcttgttcctagggtgcgggcttcatggccttctcctccaggaagctccacctgatcatgtcctgggtggatatccagcccccatagttcagggcctactagcagctgctagatcttgaactccaggagcgccccacgccttgggagcttggcatgggctaaatactcccccatttgttaaatggggtcctgaaacctgaccagggaagacgggataaagtagccatgggtcatcgcagcccctttgaagccgggcctggccacccaaaggcaactcaggggtggagactgaggcctcaggagaagcccccactagaatgctctctgcccctcccttccagattaaccaaaacctgctaattgtggaagccctcggcatgctcccctcccccacagcctcttcctcccttccctcccctcccccttccatccgaatgataaaggccccagcccgcctgccccagcccggcctcaggtcccggccctgccttctacactgccccaccgccctgcaccctccacccggccaggcccctgcccacgctgtctaccgtcccgcatggggccctgcagcggctcccgcctggggcccccagaggcagagtcgccctcccagccccctaagaggaggaagaagaggtacctgcgacatgacaagcccccctacacctacttggccatgatcgccttggtgattcaggccgctccctcccgcagactgaagctggcccagatcatccgtcaggtccaggccgtgttccccttcttcagggaagactacgagggctggaaagactccattcgccacaacctttcctccaaccgatgcttccgcaaggtgcccaaggaccctgcaaagccccaggccaagggcaacttctgggcggtcgacgtgagcctgatcccagctgaggcgctccggctgcagaacaccgccctgtgccggcgctggcagaacggaggtgcgcgtggagccttcgccaaggacctgggcccctacgtgctgcacggccggccataccggccgcccagtcccccgccaccacccagtgagggcttcagcatcaagtccctgctaggagggtccggggagggggcaccctggccggggctagctccacagagcagcccagttcctgcaggcacagggaacagtggggaggaggcggtgcccaccccaccccttccctcttctgagaggcctctgtggcccctctgcccccttcctggccccacgagagtggagggggagactgtgcaggggggagccatcgggccctcaaccctctccccagagcctagggcctggcctctccacttactgcagggcaccgcagttcctgggggacggtccagcgggggacacagggcctccctctgggggcagctgcccacctcctacttgcctatctacactcccaatgtggtaatgcccttggcaccaccacccacctcctgtccccagtgtccgtcaaccagccctgcctactggggggtggcccctgaaacccgagggcccccagggctgctctgcgatctagacgccctcttccaaggggtgccacccaacaaaagcatctacgacgtttgggtcagccaccctcgggacctggcggcccctggcccaggctggctgctctcctggtgcagcctgtgaggctcttaagacaggggccactcctccctcccgctcccacccccaccttgttgacagggagccaaggcgaggcggctgtctgcgaccacagcagcctcgaaacaccaggcagcagccttgctgggagtccacggtgtttattgggccaccccacgcatggccgtggcccagctgggcacaaccctcaccctggtctgtcatgcctgtttttcctacactcagcggcaaagctgcaggagcagggctgagcctggaatagcccttcctagtcccctcttctcagcccactacccatccatcagtcaccagccgtcacctcccctcccgtgctccaggctgggggagggagagcccagtggtggatccagcctgaagtcctgccctctctcatctgtctggaaaggaggtagcacctttttcgggaaacgggttagggagtaaagactgcaccctacatggtcctggtggtgggggggataacagtaaaggaatttgcaacgttttaatgccatgcctgatttttgggtcaggagtggtgacttgggtaaccacttggcgggggggcctgggattccctgctgtgtgccgtgataacagcaaatggtgataaggagaaagccaagacctgtggcctgatgcagggctgggggcggggggtgatcacttcagcaggcacaacacacttcactggctgcggaggtggaggggtgactctgggagctcaggggcaatggatccaaagaggctagggagcttgtgccctgggagacggggtacagggactttactaccgcctctgccagcagagacctggcctgagacccca

SEQ ID NO: 7682 - DNA, 492 bp, Homo sapiens
  source 1..492: mol_type = unassigned DNA; mol_type = unassigned DNA
tacactgccccaccgccctgcaccctccacccggccaggcccctgcccacgctgtctaccgtcccgcatggggccctgcagcggctcccgcctggggcccccagaggcagagtcgccctcccagccccctaagaggaggaagaagaggtacctgcgacatgacaagcccccctacacctacttggccatgatcgccttggtgattcaggccgctccctcccgcagactgaagctggcccagggaagactacgagggctggaaagactccattcgccacaacctttcctccaaccgatgcttccgcaaggtgcccaaggaccctgcaaagccccaggccaagggcaacttctgggcggtcgacgtgagcctgatcccagctgaggcgctccggctgcagaacaccgccctgtgccggcgctggcagaacggaggtgcgcgtggagccttcgccaaggacctgggcccctacgtgctgcacggccggccatacc

SEQ ID NO: 7683 - DNA, 5910 bp, Homo sapiens
  source 1..5910: mol_type = unassigned DNA
gccgtccctgcggaccggacagtgcggccggcggccggcggccgggacggagcccccagcccgcgaggagggcgcggcgcaggcggcggcggcgcggcggggaggagcccgggccggaaccagggctgggccgggggcggggacgccggggtccgggagcccgggagccggagcgagctgacgagcgtcgcggaaggaccgggaaggaagagcggagccggagcgagccaagcagcccacaaagtgccatgccccggcggggttgaggcgcgcggcggtcggcccggcgcgctgggaggacgcccgggagctgcgcgacgcggggcggcgcggaagggcagccccggcgggcggcggcgggcccgggctgcgaccggagcgagccccatgccccgcgcgggctgacgggccggagcccgcacggagcggccgggcgggacaggtaccgctagagcgacatgatggtggaatctgcctcggagacaatcaggtcggctccatctggtcagaatggcgtgggcagcctctctgggcaagccgatggcagcagcggcggggccacagggacaactgcaagtggcacgggcagggaagtgaccacgggtgcagacagcaatggtgagatgagtcccgcagagctgctgcacttccagcagcaacaggctctccaagtggcccggcagttcctgctgcagcaggcctcaggcctgagctccccagggaacaatgacagcaaacagtctgcctctgctgtgcaggtgcctgtgtcggtggccatgatgtcgccgcagatgcttaccccgcaacagatgcagcagatcctgtcgcccccgcagctgcaggccttgctccagcagcagcaagccctcatgctccagcagctacaggagtactacaagaagcagcaggagcagctccacctgcagctcctcacccagcagcaggctgggaaaccgcagcccaaagaggcactggggaacaagcagctggccttccagcagcagctcctgcaaatgcaacagttgcagcagcagcacctgctcaacctgcagaggcaggggctggtcagcctgcagcccaaccaagcctcggggcccctccagacccttccgcaagctgtttgcccaacagacctgccccagctgtggaagggcgagggtgcccccgggcagcctgccgaggacagcgtcaagcaggaggggctggacctcactggcacggccgccaccgctacctcgtttgccgctccccccaaggtctcaccccccctctcccaccataccctgcccaacggacagcctactgtgctcacatctcggagagacagctcttcccacgaggagacccccggctcccaccccctgtacggacacggagagtgcaagtggccaggctgtgagaccctgtgtgaagacctgggccagtttatcaaacacctcaacacagagcacgccctggatgaccggagtacagcccagtgccgggtacagatgcaggtggtgcagcagctggagatccagctcgccaaggagagcgagcggctgcaggccatgatggcccacctgcacatgcggccctcggagcccaagcccttcagccagccagtgaccgtctctgcagcagactcattcccagatggtctcgtgcaccccccgacctcggccgcagcccctgtcacccctctacggccccctggcctgggctctgcctccctgcatggtgggggcccagcccgtcggagaagcagtgacaagttctgctcccccatctcctcagagctggcccagaatcatgagttctacaagaacgccgacgtccggccccccttcacctacgcctccctcatccgccaggccatcctggaaacccctgacaggcagctgaccctgaatgagatctataactggttcaccaggatgttcgcctatttccgcagaaacactgccacctggaagaacgccgtgcgccacaacctcagcctgcacaagtgcttcgtccgcgtggagaacgtcaagggtgccgtgtggactgtggacgagcgggagtatcagaagcggagaccgccaaagatgacagggagccccaccctggtgaagaacatgatctctggcctcagctatggagcacttaatgccagctaccaggccgccctggccgagagcagcttccccctcctcaacagccctggcatgctgaaccctggctccgccagcagcctgctgcccctcagccacgatgacgtgggtgcccccgtggagccgctgcccagcaacggcagcagcagccctcctcgcctctccccgccccagtacagccaccaggtgcaggtgaaggaggagccagcagaggcagaggaagacaggcagcccgggcctcccctgggcgcccctaaccccagcgcctcggggcctccggaagacagggacctggaggaggagctgccgggagaagaactgtcctaagggcctgtagtgaccggcagggctggggtgagacccctcccttccagaatccaggccccatctcccccaactccacagcccctcccgagcctcaaggcaagtccaggactcagaccggggaggcccgggccagcagctcccagtgtgacctgacaaaaacacgtaggggcagggacggtccccacccccagggacacaacccctggtcttggaccagtagaggacacggagggttcagacccctcctcagaccctccccacatctgaaactgcctccccccaaccaccagcagcagcagggccctcctcccccaccagctctccccacagggcccctcagcatcatggagacccgcaggcggggcttagccacccctcaaacccagggccccctggcacctggctctggccgtgttttctggccagaggcccccactttcctaactcgtgctcccttccgccttcttttccgtactgtgaagaaagaactctccaccccagctcccaccctgccctggcctgggtggaggaactgtgcctccatccccagaagaaacagccccctctgctgctggggtgggactgtctgtgtgccctgtgggggtccgtgtgagcaggcccacctggctccagacccgcccccaacctgagacagaaccaggctgagccaggcctccacccccacccccgtttgctgggggctcctccagccgcccccatgggaagaggcctggtaccgcctcacccacagaggtctgtgccaggtgcgcttctgcaggtggagccaagctctccctgaggccagaggcggggcctgggccgggagcccaggggaaggccaggctggaccccggctccacacccacatccagcctgcaggcctctctgcagtcctctcaccctccctcagctccccttcctctgcagtcaccctcagctccccttccttgcccgcctctccccccgccgccccaccagttaaacggatgaccaaagacctttcttatgccggaagcaaaaaccaaaactttttgttggctttttcctttgtcgcctccccagcacctgccctcccagtctcccaccccggccccaggctggaagccctccctccacttaagttattgttttaaaccaaagtttacagtgtctgttggtggccaagaccttctctctccacccctcctccatccaccctgaggaccctggggctcagtggaggcagggccctgcccccctcccttccgctcctgcccagcctgggggaaggagaaaggaggggagaaagcgggctctcaccccctcaggagtgggcacgggagcccttctccctgaccctgggctgcttcctgggggctctccagacccctctctaggaccaagtcacccgtcgtgctgggagtgtggattctagcaaaagagctggaaaaaagtcagactctccacagaccccctatgggggacccccaactcaaggccaaggactgggcgtatcggatgctcataacacccctggcctggcccctttactgagaagactccttggatatttcccaagaaccccccacatacacccctcacaagccacccctcctgagaggcagggggccctccgccccctccccatgtattccccacctgtgttccgtttgaccagcacagaaatattaaacgtcctctattcaccgggccctgtgtgtgtcaccgaggtgcgggaggggaggagcattaaagctgaaagatcgctctgctcggggagcctgggcagagcagcagcaacgtgagggtcgctgtggtggtggtttctgtgagtggatggaatgagcagccctgcaggggcgctgggcatgtgccctcactgtggacagggcccacccacctccggttcccctgtgcctcctgtcccttccacgcttaaacagggttctctgtcattttcctgttttcttccagagtcccaatcctttgccctagttctttcactagtttgaaatccaagttcttgccagagtgttggagcaaggcagctgatttgctgcagggatggagaggaccaccgccgcagggttcttttacctgtgccaccagctctggagacatccacacccattcccaggtgtccttccaggcccattgtccacgtcttcaagggggctgcctggataggcgtgtgtgtgtgtagtgcccaggtgtggtggtggcatcctgaagcagtaggaccattagtgtgcgtgcacacccacgtggcacactgtgtggtgaccatggtcatcatagtgggctcacggcggaaacgggatcattcaacctatacaaaggggaccctggataggctgcaaggaaagaggccaagggccaagctgctaagccaaagatggcccctgacacctcccccagccccagcacaccagcctgcacctcttatcccgtgttaagtcctggttccccacctgctgcccctcctcaacacagagcccctcccgccgcctcagacccctgtgcacatccccagggcctcagccgtctcattggtctttattttttattttttttaagatggagtttcgctcttattgcccagactggagtgcagtgatgctatctcggctcactgcaacctttgcctcccaggttcaagtgattctcctgcctcagcctcccaagtagctgggattacaggcgtgcaccaccacgccgggctaaatttttttgtatttttagtagagacggggtttctctatgttggtcaggctgatctcgaactcccgacctcaggtgatccgccagcctcagcctcccaaagtgctgggattacaggcgtgagccactgcacccggctctcactggtcttacgccaccttctggacactccctccttgagggcagaaaggagtcccaggcctgtccctagggacaaggcccagggaagagtgtatttggggagcaggggaggggagggtgttgagaaagctgaactggagtcaatcacccttcccacaaatcaccaaactgctggaactctccagccaaatgctgggagaaggacctggagggtgagtctttgctgacctctctctactctcaggcatgtcttttgtccttttcgtccatctatttctgtctgtcgctcactcgccccgctttctctgtctcaccttcatccactctgcaggcctgctccaccacagccctaatcctctggacgcttgtgtagggcctggggtgaattccctgtcccccatggtacctcgagaggggctggggagctcagcttggtctcagagtctccccaccagatactgtttaaaaaagtagcactgatgtgttttgtaatctgcccctcccagccctccgtggaggctgccagggccttgtacggtaaacctagctgcatgtaatctgtggacaatggcattctctacaatgcaataaaaacaattacccatga

SEQ ID NO: 7684 - DNA, 3341 bp, Homo sapiens
  source 1..3341: mol_type = unassigned DNA
ggggtccgggagcccgggagccggagcgagctgacgagcgtcgcggaaggaccgggaaggaagagcggagccggagcgagccaagcagcccacaaagtgccatgccccggcggggttgaggcgcgcggcggtcggcccggcgcgctgggaggacgcccgggagctgcgcgacgcggggcggcgcggaagggcagccccggcgggcggcggcgggcccgggctgcgaccggagcgagccccatgccccgcgcgggctgacgggccggagcccgcacggagcggccgggcgggacaggtaccgctagagcgacatgatggtggaatctgcctcggagacaatcaggtcggctccatctggtcagaatggcgtgggcagcctctctgggcaagccgatggcagcagcggcggggccacagggacaactgcaagtggcacgggcagggaagtgaccacgggtgcagacagcaatggtgagatgagtcccgcagagctgctgcacttccagcagcaacaggctctccaagtggcccggcagttcctgctgcagcaggcctcaggcctgagctccccagggaacaatgacagcaaacagtctgcctctgctgtgcaggtgcctgtgtcggtggccatgatgtcgccgcagatgcttaccccgcaacagatgcagcagatcctgtcgcccccgcagctgcaggccttgctccagcagcagcaagccctcatgctccagcagctacaggagtactacaagaagcagcaggagcagctccacctgcagctcctcacccagcagcaggctgggaaaccgcagcccaaagaggcactggggaacaagcagctggccttccagcagcagctcctgcaaatgcaacagttgcagcagcagcacctgctcaacctgcagaggcaggggctggtcagcctgcagcccaaccaagcctcggggcccctccagacccttccgcaagcagctgtttgcccaacagacctgccccagctgtggaagggcgagggtgcccccgggcagcctgccgaggacagcgtcaagcaggaggggctggacctcactggcacggccgccaccgctacctcgtttgccgctccccccaaggtctcaccccccctctcccaccataccctgcccaacggacagcctactgtgctcacatctcggagagacagctcttcccacgaggagacccccggctcccaccccctgtacggacacggagagtgcaagtggccaggctgtgagaccctgtgtgaagacctgggccagtttatcaaacacctcaacacagagcacgccctggatgaccggagtacagcccagtgccgggtacagatgcaggtggtgcagcagctggagatccagctcgccaaggagagcgagcggctgcaggccatgatggcccacctgcacatgcggccctcggagcccaagcccttcagccagccagtgaccgtctctgcagcagactcattcccagatggtctcgtgcaccccccgacctcggccgcagcccctgtcacccctctacggccccctggcctgggctctgcctccctgcatggtgggggcccagcccgtcggagaagcagtgacaagttctgctcccccatctcctcagagctggcccagaatcatgagttctacaagaacgccgacgtccggccccccttcacctacgcctccctcatccgccaggccatcctggaaacccctgacaggcagctgaccctgaatgagatctataactggttcaccaggatgttcgcctatttccgcagaaacactgccacctggaagaacgccgtgcgccacaacctcagcctgcacaagtgcttcgtccgcgtggagaacgtcaagggtgccgtgtggactgtggacgagcgggagtatcagaagcggagaccgccaaagatgacagggagccccaccctggtgaagaacatgatctctggcctcagctatggagcacttaatgccagctaccaggccgccctggccgagagcagcttccccctcctcaacagccctggcatgctgaaccctggctccgccagcagcctgctgcccctcagccacgatgacgtgggtgcccccgtggagccgctgcccagcaacggcagcagcagccctcctcgcctctccccgccccagtacagccaccaggtgcaggtgaaggaggagccagcagaggcagaggaagacaggcagcccgggcctcccctgggcgcccctaaccccagcgcctcggggcctccggaagacagggacctggaggaggagctgccgggagaagaactgtcctaagggcctgtagtgaccggcagggctggggtgagacccctcccttccagaatccaggccccatctcccccaactccacagcccctcccgagcctcaaggcaagtccaggactcagaccggggaggcccgggccagcagctcccagtgtgacctgacaaaaacacgtaggggcagggacggtccccacccccagggacacaacccctggtcttggaccagtagaggacacggagggttcagacccctcctcagaccctccccacatctgaaactgcctccccccaaccaccagcagcagcagggccctcctcccccaccagctctccccacagggcccctcagcatcatggagacccgcaggcggggcttagccacccctcaaacccagggccccctggcacctggctctggccgtgttttctggccagaggcccccactttcctaactcgtgctcccttccgccttcttttccgtactgtgaagaaagaactctccaccccagctcccaccctgccctggcctgggtggaggaactgtgcctccatccccagaagaaacagccccctctgctgctggggtgggactgtctgtgtgccctgtgggggtccgtgtgagcaggcccacctggctccagacccgcccccaacctgagacagaaccaggctgagccaggcctccacccccacccccgtttgctgggggctcctccagccgcccccatgggaagaggcctggtaccgcctcacccacagaggtctgtgccaggtgcgcttctgcaggtggagccaagctctccctgaggccagaggcggggcctgggccgggagcccaggggaaggccaggctggaccccggctccacacccacatccagcctgcaggcctctctgcagtcctctcaccctccctcagctccccttcctctgcagtcaccctcagctccccttccttgcccgcctctccccccgccgccccaccagttaaacggatgaccaaagacctttcttatgccggaagcaaaaacc

SEQ ID NO: 7685 - DNA, 3300 bp, Homo sapiens
  source 1..3300: mol_type = unassigned DNA; mol_type = unassigned DNA
gcgagccaagcagcccacaaagtgccatgccccggcggggttgaggcgcgcggcggtcggcccggcgcgctgggaggacgcccgggagctgcgcgacgcggggcggcgcggaagggcagccccggcgggcggcggcgggcccgggctgcgaccggagcgagccccatgccccgcgcgggctgacgggccggagcccgcacggagcggccgggcgggacaggtaccgctagagcgacatgatggtggaatctgcctcggagacaatcaggtcggctccatctggtcagaatggcgtgggcagcctctctgggcaagccgatggcagcagcggcggggccacagggacaactgcaagtggcacgggcagggaagtgaccacgggtgcagacagcaatggtgagatgagtcccgcagagctgctgcacttccagcagcaacaggctctccaagtggcccggcagttcctgctgcagcaggcctcaggcctgagctccccagggaacaatgacagcaaacagtctgcctctgctgtgcaggtgcctgtgtcggtggccatgatgtcgccgcagatgcttaccccgcaacagatgcagcagatcctgtcgcccccgcagctgcaggccttgctccagcagcagcaagccctcatgctccagcaggagtactacaagaagcagcaggagcagctccacctgcagctcctcacccagcagcaggctgggaaaccgcagcccaaagaggcactggggaacaagcagctggccttccagcagcagctcctgcaaatgcaacagttgcagcagcagcacctgctcaacctgcagaggcaggggctggtcagcctgcagcccaaccaagcctcggggcccctccagacccttccgcaagcagctgtttgcccaacagacctgccccagctgtggaagggcgagggtgcccccgggcagcctgccgaggacagcgtcaagcaggaggggctggacctcactggcacggccgccaccgctacctcgtttgccgctccccccaaggtctcaccccccctctcccaccataccctgcccaacggacagcctactgtgctcacatctcggagagacagctcttcccacgaggagacccccggctcccaccccctgtacggacacggagagtgcaagtggccaggctgtgagaccctgtgtgaagacctgggccagtttatcaaacacctcaacacagagcacgccctggatgaccggagtacagcccagtgccgggtacagatgcaggtggtgcagcagctggagatccagctcgccaaggagagcgagcggctgcaggccatgatggcccacctgcacatgcggccctcggagcccaagcccttcagccagccactgaacccggtccccggctcctcctcattctccaaggtgaccgtctctgcagcagactcattcccagatggtctcgtgcaccccccgacctcggccgcagcccctgtcacccctctacggccccctggcctgggctctgcctccctgcatggtgggggcccagcccgtcggagaagcagtgacaagttctgctcccccatctcctcagagctggcccagaatcatgagttctacaagaacgccgacgtccggccccccttcacctacgcctccctcatccgccaggccatcctggaaacccctgacaggcagctgaccctgaatgagatctataactggttcaccaggatgttcgcctatttccgcagaaacactgccacctggaagaacgccgtgcgccacaacctcagcctgcacaagtgcttcgtccgcgtggagaacgtcaagggtgccgtgtggactgtggacgagcgggagtatcagaagcggagaccgccaaagatgacagggagccccaccctggtgaagaacatgatctctggcctcagctatggagcacttaatgccagctaccaggccgccctggccgagagcagcttccccctcctcaacagccctggcatgctgaaccctggctccgccagcagcctgctgcccctcagccacgatgacgtgggtgcccccgtggagccgctgcccagcaacggcagcagcagccctcctcgcctctccccgccccagtacagccaccaggtgcaggtgaaggaggagccagcagaggcagaggaagacaggcagcccgggcctcccctgggcgcccctaaccccagcgcctcggggcctccggaagacagggacctggaggaggagctgccgggagaagaactgtcctaagggcctgtagtgaccggcagggctggggtgagacccctcccttccagaatccaggccccatctcccccaactccacagcccctcccgagcctcaaggcaagtccaggactcagaccggggaggcccgggccagcagctcccagtgtgacctgacaaaaacacgtaggggcagggacggtccccacccccagggacacaacccctggtcttggaccagtagaggacacggagggttcagacccctcctcagaccctccccacatctgaaactgcctccccccaaccaccagcagcagcagggccctcctcccccaccagctctccccacagggcccctcagcatcatggagacccgcaggcggggcttagccacccctcaaacccagggccccctggcacctggctctggccgtgttttctggccagaggcccccactttcctaactcgtgctcccttccgccttcttttccgtactgtgaagaaagaactctccaccccagctcccaccctgccctggcctgggtggaggaactgtgcctccatccccagaagaaacagccccctctgctgctggggtgggactgtctgtgtgccctgtgggggtccgtgtgagcaggcccacctggctccagacccgcccccaacctgagacagaaccaggctgagccaggcctccacccccacccccgtttgctgggggctcctccagccgcccccatgggaagaggcctggtaccgcctcacccacagaggtctgtgccaggtgcgcttctgcaggtggagccaagctctccctgaggccagaggcggggcctgggccgggagcccaggggaaggccaggctggaccccggctccacacccacatccagcctgcaggcctctctgcagtcctctcaccctccctcagctccccttcctctgcagtcaccctcagctccccttccttgcccgcctctccccccgccgccccaccagttaaacggatgaccaaagacctttcttatgccggaagcaaaaaccaaaa

SEQ ID NO: 7686 - DNA, 3745 bp, Homo sapiens
  source 1..3745: mol_type = unassigned DNA
cgctagagcgacatgatggtggaatctgcctcggagacaatcaggtcggctccatctggtcagaatggcgtgggcagcctctctgggcaagccgatggcagcagcggcggggccacagggacaactgcaagtggcacgggcagggaagtgaccacgggtgcagacagcaatggtgagatgagtcccgcagagctgctgcacttccagcagcaacaggctctccaagtggcccggcagttcctgctgcagcaggcctcaggcctgagctccccagggaacaatgacagcaaacagtctgcctctgctgtgcaggtgcctgtgtcggtggccatgatgtcgccgcagatgcttaccccgcaacagatgcagcagatcctgtcgcccccgcagctgcaggccttgctccagcagcagcaagccctcatgctccagcagctacaggagtactacaagaagcagcaggagcagctccacctgcagctcctcacccagcagcaggctgggaaaccgcagcccaaagaggcactggggaacaagcagctggccttccagcagcagctcctgcaaatgcaacagttgcagcagcagcacctgctcaacctgcagaggcaggggctggtcagcctgcagcccaaccaagcctcggggcccctccagacccttccgcaagcagctgtttgcccaacagacctgccccagctgtggaagggcgagggtgcccccgggcagcctgccgaggacagcgtcaagcaggaggggctggacctcactggcacggccgccaccgctacctcgtttgccgctccccccaaggtctcaccccccctctcccaccataccctgcccaacggacagcctactgtgctcacatctcggagagacagctcttcccacgaggagacccccggctcccaccccctgtacggacacggagagtgcaagtggccaggctgtgagaccctgtgtgaagacctgggccagtttatcaaacacctcaacacagagcacgccctggatgaccggagtacagcccagtgccgggtacagatgcaggtggtgcagcagctggagatccagctcgccaaggagagcgagcggctgcaggccatgatggcccacctgcacatgcggccctcggagcccaagcccttcagccagccactgaacccggtccccggctcctcctcattctccaaggtgaccgtctctgcagcagactcattcccagatggtctcgtgcaccccccgacctcggccgcagcccctgtcacccctctacggccccctggcctgggctctgcctccctgcatggtgggggcccagcccgtcggagaagcagtgacaagttctgctcccccatctcctcagagctggcccagaatcatgagttctacaagaacgccgacgtccggccccccttcacctacgcctccctcatccgccaggccatcctggaaacccctgacaggcagctgaccctgaatgagatctataactggttcaccaggatgttcgcctatttccgcagaaacactgccacctggaagaacgccgtgcgccacaacctcagcctgcacaagtgcttcgtccgcgtggagaacgtcaagggtgccgtgtggactgtggacgagcgggagtatcagaagcggagaccgccaaagatgacagggagccccaccctggtgaagaacatgatctctggcctcagctatggagcacttaatgccagctaccaggccgccctggccgagagcagcttccccctcctcaacagccctggcatgctgaaccctggctccgccagcagcctgctgcccctcagccacgatgacgtgggtgcccccgtggagccgctgcccagcaacggcagcagcagccctcctcgcctctccccgccccagtacagccaccaggtgcaggtgaaggaggagccagcagaggcagaggaagacaggcagcccgggcctcccctgggcgcccctaaccccagcgcctcggggcctccggaagacagggacctggaggaggagctgccgggagaagaactgtcctaagggcctgtagtgaccggcagggctggggtgagacccctcccttccagaatccaggccccatctcccccaactccacagcccctcccgagcctcaaggcaagtccaggactcagaccggggaggcccgggccagcagctcccagtgtgacctgacaaaaacacgtaggggcagggacggtccccacccccagggacacaacccctggtcttggaccagtagaggacacggagggttcagacccctcctcagaccctccccacatctgaaactgcctccccccaaccaccagcagcagcagggccctcctcccccaccagctctccccacagggcccctcagcatcatggagacccgcaggcggggcttagccacccctcaaacccagggccccctggcacctggctctggccgtgttttctggccagaggcccccactttcctaactcgtgctcccttccgccttcttttccgtactgtgaagaaagaactctccaccccagctcccaccctgccctggcctgggtggaggaactgtgcctccatccccagaagaaacagccccctctgctgctggggtgggactgtctgtgtgccctgtgggggtccgtgtgagcaggcccacctggctccagacccgcccccaacctgagacagaaccaggctgagccaggcctccacccccacccccgtttgctgggggctcctccagccgcccccatgggaagaggcctggtaccgcctcacccacagaggtctgtgccaggtgcgcttctgcaggtggagccaagctctccctgaggccagaggcggggcctgggccgggagcccaggggaaggccaggctggaccccggctccacacccacatccagcctgcaggcctctctgcagtcctctcaccctccctcagctccccttcctctgcagtcaccctcagctccccttccttgcccgcctctccccccgccgccccaccagttaaacggatgaccaaagacctttcttatgccggaagcaaaaaccaaaactttttgttggctttttcctttgtcgcctccccagcacctgccctcccagtctcccaccccggccccaggctggaagccctccctccacttaagttattgttttaaaccaaagtttacagtgtctgttggtggccaagaccttctctctccacccctcctccatccaccctgaggaccctggggctcagtggaggcagggccctgcccccctcccttccgctcctgcccagcctgggggaaggagaaaggaggggagaaagcgggctctcaccccctcaggagtgggcacgggagcccttctccctgaccctgggctgcttcctgggggctctccagacccctctctaggaccaagtcacccgtcgtgctgggagtgtggattctagcaaaagagctggaaaaaagtcagactctccacagaccccctatgggggacccccaactcaaggccaaggactgggcgtatcggatgctcataacacccctggcctggcccctttactgagaagactccttggatatttcccaagaaccccccacatacacccctcacaagccacccctcctgagaggcagggggccctccgccccctccccatgtattccccacctgtgttccgtttgaccagcacagaaatattaaacgtcctctattcaccggg

SEQ ID NO: 7687 - DNA, 367 bp, Homo sapiens
  source 1..367: mol_type = unassigned DNA; mol_type = unassigned DNA
ctggctgtgtgccccagattctactgtttcctgtctgatcccacaccttctgcattctcctttttcttctggagaatgagcccctcccgtggaggagccatggcatggagggagagttggggcccgcactctccagaggggaggcttacggacatcacaccagttcataccagctgctggggaatgctcagaaactgccctttcctccttggcctgacacagctctccaagtggcccggcagttcctgctgcagcaggcctcaggcctgagctccccagggaacaatgacagcaaacagtctgcctctgctgtgcaggtgcctgtgtcggtggccatgatgtcgccgcagatgcttaccccgcaaca

SEQ ID NO: 7688 - DNA, 5948 bp, Homo sapiens
  source 1..5948: mol_type = unassigned DNA; mol_type = unassigned DNA
gccgtccctgcggaccggacagtgcggccggcggccggcggccgggacggagcccccagcccgcgaggagggcgcggcgcaggcggcggcggcgcggcggggaggagcccgggccggaaccagggctgggccgggggcggggacgccggggtccgggagcccgggagccggagcgagctgacgagcgtcgcggaaggaccgggaaggaagagcggagccggagcgagccaagcagcccacaaagtgccatgccccggcggggttgaggcgcgcggcggtcggcccggcgcgctgggaggacgcccgggagctgcgcgacgcggggcggcgcggaagggcagccccggcgggcggcggcgggcccgggctgcgaccggagcgagccccatgccccgcgcgggctgacgggccggagcccgcacggagcggccgggcgggacaggtaccgctagagcgacatgatggtggaatctgcctcggagacaatcaggtcggctccatctggtcagaatggcgtgggcagcctctctgggcaagccgatggcagcagcggcggggccacagggacaactgcaagtggcacgggcagggaagtgaccacgggtgcagacagcaatggtgagatgagtcccgcagagctgctgcacttccagcagcaacaggctctccaagtggcccggcagttcctgctgcagcaggcctcaggcctgagctccccagggaacaatgacagcaaacagtctgcctctgctgtgcaggtgcctgtgtcggtggccatgatgtcgccgcagatgcttaccccgcaacagatgcagcagatcctgtcgcccccgcagctgcaggccttgctccagcagcagcaagccctcatgctccagcagctacaggagtactacaagaagcagcaggagcagctccacctgcagctcctcacccagcagcaggctgggaaaccgcagcccaaagaggcactggggaacaagcagctggccttccagcagcagctcctgcaaatgcaacagttgcagcagcagcacctgctcaacctgcagaggcaggggctggtcagcctgcagcccaaccaagcctcggggcccctccagacccttccgcaagcagctgtttgcccaacagacctgccccagctgtggaagggcgagggtgcccccgggcagcctgccgaggacagcgtcaagcaggaggggctggacctcactggcacggccgccaccgctacctcgtttgccgctccccccaaggtctcaccccccctctcccaccataccctgcccaacggacagcctactgtgctcacatctcggagagacagctcttcccacgaggagacccccggctcccaccccctgtacggacacggagagtgcaagtggccaggctgtgagaccctgtgtgaagacctgggccagtttatcaaacacctcaacacagagcacgccctggatgaccggagtacagcccagtgccgggtacagatgcaggtggtgcagcagctggagatccagctcgccaaggagagcgagcggctgcaggccatgatggcccacctgcacatgcggccctcggagcccaagcccttcagccagccactgaacccggtccccggctcctcctcattctccaaggtgaccgtctctgcagcagactcattcccagatggtctcgtgcaccccccgacctcggccgcagcccctgtcacccctctacggccccctggcctgggctctgcctccctgcatggtgggggcccagcccgtcggagaagcagtgacaagttctgctcccccatctcctcagagctggcccagaatcatgagttctacaagaacgccgacgtccggccccccttcacctacgcctccctcatccgccaggccatcctggaaacccctgacaggcagctgaccctgaatgagatctataactggttcaccaggatgttcgcctatttccgcagaaacactgccacctggaagaacgccgtgcgccacaacctcagcctgcacaagtgcttcgtccgcgtggagaacgtcaagggtgccgtgtggactgtggacgagcgggagtatcagaagcggagaccgccaaagatgacagggagccccaccctggtgaagaacatgatctctggcctcagctatggagcacttaatgccagctaccaggccgccctggccgagagcagcttccccctcctcaacagccctggcatgctgaaccctggctccgccagcagcctgctgcccctcagccacgatgacgtgggtgcccccgtggagccgctgcccagcaacggcagcagcagccctcctcgcctctccccgccccagtacagccaccaggtgcaggtgaaggaggagccagcagaggcagaggaagacaggcagcccgggcctcccctgggcgcccctaaccccagcgcctcggggcctccggaagacagggacctggaggaggagctgccgggagaagaactgtcctaagggcctgtagtgaccggcagggctggggtgagacccctcccttccagaatccaggccccatctcccccaactccacagcccctcccgagcctcaaggcaagtccaggactcagaccggggaggcccgggccagcagctcccagtgtgacctgacaaaaacacgtaggggcagggacggtccccacccccagggacacaacccctggtcttggaccagtagaggacacggagggttcagacccctcctcagaccctccccacatctgaaactgcctccccccaaccaccagcagcagcagggccctcctcccccaccagctctccccacagggcccctcagcatcatggagacccgcaggcggggcttagccacccctcaaacccagggccccctggcacctggctctggccgtgttttctggccagaggcccccactttcctaactcgtgctcccttccgccttcttttccgtactgtgaagaaagaactctccaccccagctcccaccctgccctggcctgggtggaggaactgtgcctccatccccagaagaaacagccccctctgctgctggggtgggactgtctgtgtgccctgtgggggtccgtgtgagcaggcccacctggctccagacccgcccccaacctgagacagaaccaggctgagccaggcctccacccccacccccgtttgctgggggctcctccagccgcccccatgggaagaggcctggtaccgcctcacccacagaggtctgtgccaggtgcgcttctgcaggtggagccaagctctccctgaggccagaggcggggcctgggccgggagcccaggggaaggccaggctggaccccggctccacacccacatccagcctgcaggcctctctgcagtcctctcaccctccctcagctccccttcctctgcagtcaccctcagctccccttccttgcccgcctctccccccgccgccccaccagttaaacggatgaccaaagacctttcttatgccggaagcaaaaaccaaaactttttgttggctttttcctttgtcgcctccccagcacctgccctcccagtctcccaccccggccccaggctggaagccctccctccacttaagttattgttttaaaccaaagtttacagtgtctgttggtggccaagaccttctctctccacccctcctccatccaccctgaggaccctggggctcagtggaggcagggccctgcccccctcccttccgctcctgcccagcctgggggaaggagaaaggaggggagaaagcgggctctcaccccctcaggagtgggcacgggagcccttctccctgaccctgggctgcttcctgggggctctccagacccctctctaggaccaagtcacccgtcgtgctgggagtgtggattctagcaaaagagctggaaaaaagtcagactctccacagaccccctatgggggacccccaactcaaggccaaggactgggcgtatcggatgctcataacacccctggcctggcccctttactgagaagactccttggatatttcccaagaaccccccacatacacccctcacaagccacccctcctgagaggcagggggccctccgccccctccccatgtattccccacctgtgttccgtttgaccagcacagaaatattaaacgtcctctattcaccgggccctgtgtgtgtcaccgaggtgcgggaggggaggagcattaaagctgaaagatcgctctgctcggggagcctgggcagagcagcagcaacgtgagggtcgctgtggtggtggtttctgtgagtggatggaatgagcagccctgcaggggcgctgggcatgtgccctcactgtggacagggcccacccacctccggttcccctgtgcctcctgtcccttccacgcttaaacagggttctctgtcattttcctgttttcttccagagtcccaatcctttgccctagttctttcactagtttgaaatccaagttcttgccagagtgttggagcaaggcagctgatttgctgcagggatggagaggaccaccgccgcagggttcttttacctgtgccaccagctctggagacatccacacccattcccaggtgtccttccaggcccattgtccacgtcttcaagggggctgcctggataggcgtgtgtgtgtgtagtgcccaggtgtggtggtggcatcctgaagcagtaggaccattagtgtgcgtgcacacccacgtggcacactgtgtggtgaccatggtcatcatagtgggctcacggcggaaacgggatcattcaacctatacaaaggggaccctggataggctgcaaggaaagaggccaagggccaagctgctaagccaaagatggcccctgacacctcccccagccccagcacaccagcctgcacctcttatcccgtgttaagtcctggttccccacctgctgcccctcctcaacacagagcccctcccgccgcctcagacccctgtgcacatccccagggcctcagccgtctcattggtctttattttttattttttttaagatggagtttcgctcttattgcccagactggagtgcagtgatgctatctcggctcactgcaacctttgcctcccaggttcaagtgattctcctgcctcagcctcccaagtagctgggattacaggcgtgcaccaccacgccgggctaaatttttttgtatttttagtagagacggggtttctctatgttggtcaggctgatctcgaactcccgacctcaggtgatccgccagcctcagcctcccaaagtgctgggattacaggcgtgagccactgcacccggctctcactggtcttacgccaccttctggacactccctccttgagggcagaaaggagtcccaggcctgtccctagggacaaggcccagggaagagtgtatttggggagcaggggaggggagggtgttgagaaagctgaactggagtcaatcacccttcccacaaatcaccaaactgctggaactctccagccaaatgctgggagaaggacctggagggtgagtctttgctgacctctctctactctcaggcatgtcttttgtccttttcgtccatctatttctgtctgtcgctcactcgccccgctttctctgtctcaccttcatccactctgcaggcctgctccaccacagccctaatcctctggacgcttgtgtagggcctggggtgaattccctgtcccccatggtacctcgagaggggctggggagctcagcttggtctcagagtctccccaccagatactgtttaaaaaagtagcactgatgtgttttgtaatctgcccctcccagccctccgtggaggctgccagggccttgtacggtaaacctagctgcatgtaatctgtggacaatggcattctctacaatgcaataaaaacaattacccatg

SEQ ID NO: 7689 - DNA, 7142 bp, Homo sapiens
  source 1..7142: mol_type = unassigned DNA; mol_type = unassigned DNA
aactttaaaaagctgcttcggacaaaccagagccaggatttccactgtcggggacccgggatcggaagggtctagcccgagggaaatgctggaagatcccatcggccagtgaccagcaactttccggcgagattttgacgcggagaactgtgctctgcctcctcttattctcccaaagctcacgttggcgtcctgccttgcgggggaactcggcgcgctctctgcctgagcagcgagtgaattgaaccccagcccgctccggcgcctccgggctgatgagtgtcgctctccgcccgtccatctctttttcccggaggtaaaggcccgcggtcccccaccttcagtgcgcccgggttccaagcgccggagccagcgttttggcggagccgcttcttggatgctgaaggctgggctcctccatcgtgggtgccgaggcggcgatgggtgtcctcaaagtgtggctcgggctggccctagcgttggcggaatttgcagtattgcctcatcattccgaaggtgcttgtgtctatcaggattccttgttggcggatgccacaatttggaagcccgattcatgccagagctgccgttgccatggtgatattgttatctgcaaacctgctgtttgcagaaaccctcaatgtgcctttgagaagggagaagtgcttcaaatagctgccaaccaatgctgtcctgagtgtgttttgaggactccaggatcttgccatcatgaaaagaaaatccatgagcatgggacagaatgggcctcttctccatgtagtgtgtgctcttgcaatcatggggaagtccgatgtaccccccaaccatgcccaccgctgtcatgtggacaccaggagctggcattcatccctgaaggaagctgctgcccagtttgtgtgggccttgggaaaccctgttcctatgaaggccatgtgtttcaggatggggaggactggcggctgagccggtgtgccaaatgtctgtgtagaaatggggttgcccagtgcttcacagctcagtgtcagcctctattttgtaaccaggatgagactgtagtccgagtccctggaaaatgttgcccgcagtgctctgcaagatcctgctctgcagctggccaagtatacgagcatggtgagcagtggagcgaaaatgcctgcaccacgtgtatatgtgaccggggtgaggtcaggtgtcacaagcaggcctgcctgcccctgagatgcggaaagggtcagagcagggctcggcgtcatgggcaatgctgtgaggaatgtgtgtctcctgccgggagctgctcctatgatggagttgtgcggtaccaggacgaaatgtggaagggctcggcctgtgagttctgcatgtgtgatcatggccaagtgacctgccagactggagagtgtgccaaagtggagtgtgcccgggatgaagaattaattcacttagatggaaagtgttgtcctgaatgcatttcaaggaatggttattgtgtttatgaagaaactggagaatttatgtcatcaaatgctagtgaagttaaacgtattccagagggagagaagtgggaagatggcccttgcaaggtgtgtgagtgccgaggggctcaggtaacttgctacgagccctcttgcccaccatgtccagtgggcacactggccttagaggtgaagggacagtgctgtccagactgcacatcagttcattgccatccagattgtttgacatgctctcagtctccagaccactgtgacctctgccaagatcctaccaagttactgcagaatggatggtgtgtgcacagctgtggactgggtttttaccaagctggcagtctctgtttagcctgccagccccagtgctccacgtgtaccagtgggctggagtgctcatcctgccagcctcccctgctgatgcggcacgggcagtgtgtgcctacctgtggggacggcttctaccaagatcgccattcctgtgcagtctgccatgagtcctgtgcaggttgctggggcccaacggagaagcactgcttggcctgcagagatcccctccacgtgctgagagatggcggctgtgagagcagctgtggaaaaggcttctacaacaggcagggcacctgtagcgcttgtgaccaatcctgtgacagttgtggccccagtagccccaggtgtcttacctgtactgagaagacagtgctgcatgatgggaaatgcatgtctgaatgccctggcgggtactatgctgatgccactggcaggtgcaaagtttgtcataactcatgtgccagctgctctgggcccacaccctctcactgtacagcctgcagcccccccaaggctctgcgtcaaggccactgtctgccccgctgtggagagggtttctactctgaccatggagtctgcaaagcctgtcactcctcctgcctggcttgtatgggtcccgcaccctctcactgtactgggtgtaagaagccagaggaaggactgcaagtggagcagctgtctgacgtgggcatcccctctggcgagtgtctagcccagtgtagagcccatttttacttggagagcactggcatatgtgaagcttgccaccagtcctgtttcagatgtgcagggaaaagcccacataactgcacagactgtgggccttcccatgtgctgttggatgggcagtgcctctcccagtgcccagatggctactttcaccaggaaggtagttgcacagagtgtcacccaacctgcaggcagtgtcatgggccgttggagtctgactgcatctcctgttaccctcacatctctcttaccaatggtaactgcaggaccagctgcagggaagagcagttcctcaacctcgtgggatactgtgctgactgccatcacctgtgccagcactgtgcagctgatctccacaacactgggagcatctgcctcaggtgccagaatgcccactacctgctgctcggggaccactgtgttcctgactgcccttcaggatactatgcagagagaggagcttgtaaaaaatgccactcctcctgcagaacctgccagggcagaggacctttctcctgctcctcatgtgacaccaacctcgtgctgtcccacactggcacctgcagcaccacctgcttccctgggcactatcttgatgacaatcatgtttgccagccatgcaacacacactgtggaagctgtgattcacaggccagctgtacctcctgccgagatccaaacaaggttctgctctttggggaatgtcaatacgagagctgcgccccacagtactatcttgacttctccaccaacacgtgcaaagagtgtgattggagctgcagtgcatgcagtgggcccctgaaaacagactgcctgcagtgcatggatggctatgttctccaggatggggcctgcgtggagcagtgcttgtcatcattttaccaggactcgggcctctgcaagaactgtgacagctactgtctccagtgccaaggtccccatgagtgtacccgctgcaaagggccatttctcctcttggaagcccagtgtgtccaggaatgtgggaaggggtactttgcagatcatgcaaagcacaaatgcacagcctgccctcaggggtgcttgcagtgcagccacagggaccgttgtcacctctgtgaccatgggttctttctgaagagtggcctctgtgtttacaactgtgttcctggcttttctgtccacacctctaatgaaacatgttctggcaaaatacacacccctagtcttcatgtgaatggttccctgatcctcccaattggttcaataaagccactggatttttccctcctgaatgtccaagaccaggagggtagggtcgaagatctcctatttcatgttgtgagcactcccaccaatggtcagctagtgctctcaagaaatggaaaagaggttcagctggacaaggctggccgttttagctggaaagatgtgaacgagaagaaagtgcgttttgtgcacagcaaagaaaaactcaggaaaggttaccttttcctgaaaattagtgaccagcagttcttctctgagccacagctgatcaacatacaagcattttcaacacaggccccctatgtgctgagaaatgaagttctccacattagcagaggagagagggcaaccatcaccacccagatgcttgacatccgagatgatgacaacccacaggatgtggtcattgaaataatcgatcctccacttcatggccaattgcttcagacacttcagtccccggcaacccctatctatcaattccagctggatgaactctctagaggccttctccactatgctcatgatggttcagacagcacatccgatgttgcagtcttgcaggccaatgatggacactccttccataatatactgttccaagtgaagaccgtgcctcagaatgacaggggtcttcagcttgtggctaattcgatggtgtgggttccagaaggggggatgctgcagatcaccaacagaatcttacaggccgaggctcctggtgccagtgctgaagaaatcatctacaagattacacaagactacccccagtttggggaggtggtccttctagtgaatatgcctgcagacagccctgcagatgaagggcagcacctgcctgatgggaggacagctacccccaccagcaccttcacccagcaggacatcaatgaaggcatcgtatggtacaggcactcaggagccccagcccagagcgactccttccgcttcgaggtgtccagtgcctccaatgcccagacccgcctggagagccacatgttcaacatcgcgatcttaccacagacacctgaagcacctaaagtgtctctggaagcatctctccatatgactgctagagaagatggcctgactgttattcagcctcattccctctccttcataaactctgagaagccaagtggaaagattgtctacaacatcactctacctctgcatccaaatcaaggtatcatcgagcaccgggaccaccctcactctcctatccggtatttcacgcaagaggatattaaccagggcaaagtcatgtaccgccctcccccggcagcaccccacctccaggagctcatggccttctcgttcgctggtctcccagaatcagtgaaattccacttcacagtttcagatggagaacacacaagtccggagatggtcctcaccattcacttacttcccagtgatcagcaactgccagtgttccaggtcacagctccacggctggcggtcagcccaggaggcagcacttctgtaggacttcaggtggtagtaagagatgctgagacagcgcccaaagaactcttctttgagcttcggagacctccacagcatggtgtgcttcttaagcatacagctgagttccgaaggccgatggccacaggtgacactttcacctatgaggatgttgagaaaaatgctctacagtatatacatgatggttcctctacccgggaagacagcatggagatctcagtcacagatggcctcacagtgacaatgctggaggtgagagtagaggtgtccctgtcagaagaccgagggcctcgactggctgctggctcctctctgagcattactgttgccagtaaaagcacagccataatcactaggtcacaccttgcttacgtggatgattcttcccccgacccagagatctggattcagttaaattatctgccctcatatggtactctcttaagaatctcaggatctgaggtggaagagctctcagaagtttccaatttcacaatggaagacatcaataacaagaaaatcagatactcagctgtgtttgaaactgatggtcatctggttactgatagcttctatttctctgtctctgacatggaccacaaccatctggataatcagatatttaccatcatgatcactcctgctgaaaatccacctccagtcattgcttttgctgaccttatcacggttgatgagggagggagagcaccactctcatttcaccatttttttgctactgatgatgatgacaacctccagagagatgccatcattaaactaagtgctctgcccaaatatggctgcattgagaacacaggaacaggtgatcgttttggccctgaaactgccagtgacctagaggcatcatttcctattcaagacgtcctggaaaactacatttactactttcagagtgttcatgaaagcattgagccaacccatgatatttttagtttttatgtgagtgatggaaccagtcgttcagaaattcacagcatcaatatcaccattgaggtaaagactttggaagttggaaaggttgagcccttgaccacaatatttcacaccattagagagctttctttatagggactcaaaagcaaagaagattggatttgaccttcaaaattgaaggtcgttcttaaaatatagccttcaggaatcttgtagaattaaggttggcatttggggaaggcttgagttagaaatctaaatttccatttcaggattgaatttatttgttcggtgtgaaaaacagtttgtgaaggtcagagatgctttgccagtctcatatataaatgaaaacttacatatgtctatgtttctctgaaattgtgtttggttctatatgcatatttgccttttcttattttactgcatttatttatttaattgtaacatcaaagaaatgtgttccttgatgctgtatttattctcatttgagcaactacacaggcttgctctaccgagagagagacacaggggaggggaaagataaatctcagaatgaaataccctctgccttgggaaaataaaatgtaaagaaccctctgcactcttaagggtcagtggtggaaaggggctggcaccagggcagggagacagctttagagacccacactttcaaatatagtgtccttctacaggtactgtggtatgcttagcattttctaagagagttctgagttatattagtatggtcttttatcttcaaagtatgttaatacttgtacttgtcaaagcacatatccatatttttggtctagaaaatatggtcattgtacttacggaagatatctgagaaaacttttatgaaatgtccatcagcttcttttgaagggggcattttgttgcctggac

SEQ ID NO: 7690 - DNA, 15624 bp, Homo sapiens
  source 1..15624: mol_type = unassigned DNA; mol_type = unassigned DNA
aactttaaaaagctgcttcggacaaaccagagccaggatttccactgtcggggacccgggatcggaagggtctagcccgagggaaatgctggaagatcccatcggccagtgaccagcaactttccggcgagattttgacgcggagaactgtgctctgcctcctcttattctcccaaagctcacgttggcgtcctgccttgcgggggaactcggcgcgctctctgcctgagcagcgagtgaattgaaccccagcccgctccggcgcctccgggctgatgagtgtcgctctccgcccgtccatctctttttcccggaggtaaaggcccgcggtcccccaccttcagtgcgcccgggttccaagcgccggagccagcgttttggcggagccgcttcttggatgctgaaggctgggctcctccatcgtgggtgccgaggcggcgatgggtgtcctcaaagtgtggctcgggctggccctagcgttggcggaatttgcagtattgcctcatcattccgaaggtgcttgtgtctatcaggattccttgttggcggatgccacaatttggaagcccgattcatgccagagctgccgttgccatggtgatattgttatctgcaaacctgctgtttgcagaaaccctcaatgtgcctttgagaagggagaagtgcttcaaatagctgccaaccaatgctgtcctgagtgtgttttgaggactccaggatcttgccatcatgaaaagaaaatccatgagcatgggacagaatgggcctcttctccatgtagtgtgtgctcttgcaatcatggggaagtccgatgtaccccccaaccatgcccaccgctgtcatgtggacaccaggagctggcattcatccctgaaggaagctgctgcccagtttgtgtgggccttgggaaaccctgttcctatgaaggccatgtgtttcaggatggggaggactggcggctgagccggtgtgccaaatgtctgtgtagaaatggggttgcccagtgcttcacagctcagtgtcagcctctattttgtaaccaggatgagactgtagtccgagtccctggaaaatgttgcccgcagtgctctgcaagatcctgctctgcagctggccaagtatacgagcatggtgagcagtggagcgaaaatgcctgcaccacgtgtatatgtgaccggggtgaggtcaggtgtcacaagcaggcctgcctgcccctgagatgcggaaagggtcagagcagggctcggcgtcatgggcaatgctgtgaggaatgtgtgtctcctgccgggagctgctcctatgatggagttgtgcggtaccaggacgaaatgtggaagggctcggcctgtgagttctgcatgtgtgatcatggccaagtgacctgccagactggagagtgtgccaaagtggagtgtgcccgggatgaagaattaattcacttagatggaaagtgttgtcctgaatgcatttcaaggaatggttattgtgtttatgaagaaactggagaatttatgtcatcaaatgctagtgaagttaaacgtattccagagggagagaagtgggaagatggcccttgcaaggtgtgtgagtgccgaggggctcaggtaacttgctacgagccctcttgcccaccatgtccagtgggcacactggccttagaggtgaagggacagtgctgtccagactgcacatcagttcattgccatccagattgtttgacatgctctcagtctccagaccactgtgacctctgccaagatcctaccaagttactgcagaatggatggtgtgtgcacagctgtggactgggtttttaccaagctggcagtctctgtttagcctgccagccccagtgctccacgtgtaccagtgggctggagtgctcatcctgccagcctcccctgctgatgcggcacgggcagtgtgtgcctacctgtggggacggcttctaccaagatcgccattcctgtgcagtctgccatgagtcctgtgcaggttgctggggcccaacggagaagcactgcttggcctgcagagatcccctccacgtgctgagagatggcggctgtgagagcagctgtggaaaaggcttctacaacaggcagggcacctgtagcgcttgtgaccaatcctgtgacagttgtggccccagtagccccaggtgtcttacctgtactgagaagacagtgctgcatgatgggaaatgcatgtctgaatgccctggcgggtactatgctgatgccactggcaggtgcaaagtttgtcataactcatgtgccagctgctctgggcccacaccctctcactgtacagcctgcagcccccccaaggctctgcgtcaaggccactgtctgccccgctgtggagagggtttctactctgaccatggagtctgcaaagcctgtcactcctcctgcctggcttgtatgggtcccgcaccctctcactgtactgggtgtaagaagccagaggaaggactgcaagtggagcagctgtctgacgtgggcatcccctctggcgagtgtctagcccagtgtagagcccatttttacttggagagcactggcatatgtgaagcttgccaccagtcctgtttcagatgtgcagggaaaagcccacataactgcacagactgtgggccttcccatgtgctgttggatgggcagtgcctctcccagtgcccagatggctactttcaccaggaaggtagttgcacagagtgtcacccaacctgcaggcagtgtcatgggccgttggagtctgactgcatctcctgttaccctcacatctctcttaccaatggtaactgcaggaccagctgcagggaagagcagttcctcaacctcgtgggatactgtgctgactgccatcacctgtgccagcactgtgcagctgatctccacaacactgggagcatctgcctcaggtgccagaatgcccactacctgctgctcggggaccactgtgttcctgactgcccttcaggatactatgcagagagaggagcttgtaaaaaatgccactcctcctgcagaacctgccagggcagaggacctttctcctgctcctcatgtgacaccaacctcgtgctgtcccacactggcacctgcagcaccacctgcttccctgggcactatcttgatgacaatcatgtttgccagccatgcaacacacactgtggaagctgtgattcacaggccagctgtacctcctgccgagatccaaacaaggttctgctctttggggaatgtcaatacgagagctgcgccccacagtactatcttgacttctccaccaacacgtgcaaagagtgtgattggagctgcagtgcatgcagtgggcccctgaaaacagactgcctgcagtgcatggatggctatgttctccaggatggggcctgcgtggagcagtgcttgtcatcattttaccaggactcgggcctctgcaagaactgtgacagctactgtctccagtgccaaggtccccatgagtgtacccgctgcaaagggccatttctcctcttggaagcccagtgtgtccaggaatgtgggaaggggtactttgcagatcatgcaaagcacaaatgcacagcctgccctcaggggtgcttgcagtgcagccacagggaccgttgtcacctctgtgaccatgggttctttctgaagagtggcctctgtgtttacaactgtgttcctggcttttctgtccacacctctaatgaaacatgttctggcaaaatacacacccctagtcttcatgtgaatggttccctgatcctcccaattggttcaataaagccactggatttttccctcctgaatgtccaagaccaggagggtagggtcgaagatctcctatttcatgttgtgagcactcccaccaatggtcagctagtgctctcaagaaatggaaaagaggttcagctggacaaggctggccgttttagctggaaagatgtgaacgagaagaaagtgcgttttgtgcacagcaaagaaaaactcaggaaaggttaccttttcctgaaaattagtgaccagcagttcttctctgagccacagctgatcaacatacaagcattttcaacacaggccccctatgtgctgagaaatgaagttctccacattagcagaggagagagggcaaccatcaccacccagatgcttgacatccgagatgatgacaacccacaggatgtggtcattgaaataatcgatcctccacttcatggccaattgcttcagacacttcagtccccggcaacccctatctatcaattccagctggatgaactctctagaggccttctccactatgctcatgatggttcagacagcacatccgatgttgcagtcttgcaggccaatgatggacactccttccataatatactgttccaagtgaagaccgtgcctcagaatgacaggggtcttcagcttgtggctaattcgatggtgtgggttccagaaggggggatgctgcagatcaccaacagaatcttacaggccgaggctcctggtgccagtgctgaagaaatcatctacaagattacacaagactacccccagtttggggaggtggtccttctagtgaatatgcctgcagacagccctgcagatgaagggcagcacctgcctgatgggaggacagctacccccaccagcaccttcacccagcaggacatcaatgaaggcatcgtatggtacaggcactcaggagccccagcccagagcgactccttccgcttcgaggtgtccagtgcctccaatgcccagacccgcctggagagccacatgttcaacatcgcgatcttaccacagacacctgaagcacctaaagtgtctctggaagcatctctccatatgactgctagagaagatggcctgactgttattcagcctcattccctctccttcataaactctgagaagccaagtggaaagattgtctacaacatcactctacctctgcatccaaatcaaggtatcatcgagcaccgggaccaccctcactctcctatccggtatttcacgcaagaggatattaaccagggcaaagtcatgtaccgccctcccccggcagcaccccacctccaggagctcatggccttctcgttcgctggtctcccagaatcagtgaaattccacttcacagtttcagatggagaacacacaagtccggagatggtcctcaccattcacttacttcccagtgatcagcaactgccagtgttccaggtcacagctccacggctggcggtcagcccaggaggcagcacttctgtaggacttcaggtggtagtaagagatgctgagacagcgcccaaagaactcttctttgagcttcggagacctccacagcatggtgtgcttcttaagcatacagctgagttccgaaggccgatggccacaggtgacactttcacctatgaggatgttgagaaaaatgctctacagtatatacatgatggttcctctacccgggaagacagcatggagatctcagtcacagatggcctcacagtgacaatgctggaggtgagagtagaggtgtccctgtcagaagaccgagggcctcgactggctgctggctcctctctgagcattactgttgccagtaaaagcacagccataatcactaggtcacaccttgcttacgtggatgattcttcccccgacccagagatctggattcagttaaattatctgccctcatatggtactctcttaagaatctcaggatctgaggtggaagagctctcagaagtttccaatttcacaatggaagacatcaataacaagaaaatcagatactcagctgtgtttgaaactgatggtcatctggttactgatagcttctatttctctgtctctgacatggaccacaaccatctggataatcagatatttaccatcatgatcactcctgctgaaaatccacctccagtcattgcttttgctgaccttatcacggttgatgagggagggagagcaccactctcatttcaccatttttttgctactgatgatgatgacaacctccagagagatgccatcattaaactaagtgctctgcccaaatatggctgcattgagaacacaggaacaggtgatcgttttggccctgaaactgccagtgacctagaggcatcatttcctattcaagacgtcctggaaaactacatttactactttcagagtgttcatgaaagcattgagccaacccatgatatttttagtttttatgtgagtgatggaaccagtcgttcagaaattcacagcatcaatatcaccattgagaggaagaacgatgagcctcccaggatgaccttgcagcccctcagagtgcagctgagctcgggagtggtgataagcaattcttctttgagcctgcaagacctggacaccccagataatgagctcatttttgtattgacaaaaaagcctgaccacggtcatgtactctggaggcaaactgcttctgagcctctggagaatgggagagttttagtccagggctcaaccttcacctaccaggatatcctagctgggctggttgggtatgtgcctagtgtccctggcatggtcgtggatgagttccagttctccctcactgatggcctccacgtggacacagggaggatgaagatctacacagaactgcctgcaagtgacacacctcacttggctataaaccaaggcctacagctctcagcagggtctgtagcacgcatcacagaacagcacttgaaagtgacagatattgactcagatgaccatcaggttatgtacatcatgaaggaagatcctggtgcagggcgcctgcagatgatgaagcatggcaacctggagcaaatttctattaaaggccccatccgaagtttcacccaggcagacattagccaaggccacgtagaatatagtcatggaacaggagaacctggagggagctttgcttttaaatttgatgtggttgatggagaaggcaacagattgattgacaagtcattttccatcagcattctagaagacaaatccccaccagtcatcaccaccaataaaggactggtcttggatgaaaactcagtgaagaaaatcaccaccctgcagctgtctgccactgaccaggacagtgggcctacagaattgatctacagaatcaccagacagccccagctgggccacttggaacatgcagcatcaccaggtatccagattagttcctttactcaagctgatctgacttcacgaaatgttcagtatgtccattctagtgaggctgagaaacattcagatgccttcagctttacactgtctgatggagtcagtgaggtgactcagactttccatatcactcttcaccctgtcgatgattcgctgcccgtcgtacagaacttaggaatgcgggtgcaggagggcatgaggaagaccatcacagagtttgagcttaaggcggtggatgctgacacagaggccgagtctgtcacattcaccatcgtgcagcctccacgccatggcaccatcgagcgaaccagcaatgggcagcatttccacctcacctccaccttcaccatgaaagatatctaccagaaccgggtcagctacagccatgacggcagtaactccctcaaggaccggttcaccttcactgtttctgatgggacaaaccccttctttatcattgaggaagggggaaaagagattatgacagcagcacctcagccgttccgagtagacatcctcccggtagatgatggcacgcctagaattgtcaccaacctgggactccagtggctggaatacatggatggcaaggcaaccaacctgatcaccaagaaggaactgctgaccatggacccagacaccgaggacgcgcagcttgtctatgagataacgacgggccctaagcatggctttgtggagaacaagctgcagcctggcagagctgctgccactttcacccaggaggatgtgaacttggggttgattcgttatgtgttgcacaaggagaagatccgtgagatgatggatagttttcagtttctggtgaaagacagtaaacccaatgtggtcagcgacaatgtcttccatatccagtggtcactcatcagctttaaatataccagctacaatgtcagtgagaaggcagggtctgtcagtgtcacggtgcagaggactgggaacctgaaccaatatgccatcgtcctgtgtcgcaccgagcaaggcaccgccagctccagctccagggtcagctcccaacctgggcaacaggactatgtagagtatgctggccaggtccagtttgatgagcgagaggacaccaagtcctgcaccattgtcatcaacgatgatgacgtgtttgaaaatgttgagagtttcactgtggagctcagcatgccagcttatgccctgttaggggaattcacccaggcgaaggtcattatcaacgataccgaggatgaacccacattagagtttgacaagaagatctactgggttaacgagagcgctggttttctgtttgcacctattgaaagaaaaggagatgcaagcagcattgtatctgcaatttgctacacagtccctaagtcagctatgggaagtagcctctatgctctagaatcaggctctgattttaaatctagagggatgtctgccgcgagtcgtgtgatattcgggcctggtgtgaccatgtccacctgtgatgtcatgcttattgatgacagcgagtatgaagaggaagaagagtttgagattgccttggcagatgcctctgacaatgcccgcattggaagggtggcgacagccaaggtgctcattagtggtcccaacgatgcctcgactgtgtccctgggcaacacggctttcactgtcagtgaggacgcaggcacagtaaagattccagttatccgccatggtactgacctctctactttcgcatctgtctggtgtgcaacgcggccctcagacccagcttctgccacaccaggagttgactacgttcccagctctcggaaggtggaatttgggcctggtgtcattgaacagtattgcaccttgactatcttggatgacactcagtatccggtaattgaaggactggagacatttgtggttttcctcagctcagcacaaggagccgaactgaccaaacccttccaggcagtcattgcaattaatgacacattccaagatgtgcccagcatgcagtttgccaaggatttgctcctagtgaaggagaaggagggtgtcctgcatgtccctatcactcggagcggagacctgagctatgagtcatcagtgaggtgctatactcagagccattccgctcaggtcatggaggactttgaggagagacaaaatgcagactcttcacggattacatttctcaaaggggacaaagtgaagaactgtacggtctatatccacgatgactccatgtttgagccagaggaacagttcagggtctacctcggccttcctcttggaaaccactggagtggagctagaattggaaagaataacatggccaccatcaccatatccaatgatgaagatgcccccaccattgagtttgaagaagctgcataccaagtccgggaacccgcaggcccagatgccattgcgattctgaacatcaaggtgatccgcagaggggatcagaacaggacctccaaggttcgctgcagcacgcgggatggctctgcccagtctggtgtggattattacccaaagagccgagtcttgaagttcagtcccggtgtggatcatatcttttttaaagttgagatcctgtccaatgaagaccgggaatggcatgaatctttctcactagtccttggcccagatgacccagtggaagcagttcttggggatgtgactactgccacggtgacaattctagaccaggaggcagcagggagcctcatattgccagcaccacccattgtggtcacacttgctgactatgaccatgtggaagaagttaccaaggaaggagtcaagaaatccccctccccaggctacccactggtctgtgtcaccccctgcgaccctcatttccccagatacgctgtcatgaaggagcgctgcagtgaggccggcatcaaccagacatctgtgcagttcagctgggaagtggctgcccccactgatggcaatggggcccggtctccctttgaaaccatcactgacaacacaccattcaccagtgtcaaccacatggtcctggacagcatttacttcagccggaggttccatgtgcgttgtgtggccaaggctgtggacaaggtgggccatgtggggacccccttaaggagcaacattgttaccattggaacagacagtgctatctgccacacaccagtggtggctgggacatccagaggcttccaggctcagtccttcatcgcaaccttgaaatacctggatgtcaaacataaggagcatccgaacagaatccacatttcggtgcagatcccacaccaggatggaatgctgccccttatctccaccatgccgttgcacaacttacattttctactgtctgagtccatctacagacaccagcacgtctgctccaatttagttaccacctatgacctgagaggcatctcagaggcagggttcctggatgatgtggtctatgatagcactgccctggggcctggctacgatcgccccttccagtttgaccccagcgtgcgagagccgaagaccatccagctctacaaacacctgaacctgaagagctgcgtgtggacctttgatgcttattatgacatgactgagctgattgacgtctgtgggggctctgtaaccgctgacttccaggtgagggactctgcccagtccttcttgacagtgcacgtgcctctatatgtgtcctacatctatgtgacagcccccaggggctgggcctccttggagcaccacaccgagatggagttttctttcttctatgacactgttctctggagaacaggaatccagacagacagcgtgctctctgcaaggcttcagataataagaatctacattcgagaggatggccgtcttgtcattgaattcaagacccatgccaaattcagaggacagtttgtgatggagcatcacactctcccagaagtgaaatctttcgtattgactccagaccacctaggaggaattgaatttgacttgcagctattatggagcgctcagacttttgattctccacatcaactctggagagccacaagctcttataacaggaaggactactcaggagagtacaccatctacctgatcccttgcacagtgcagcccacacagccatgggttgacccaggagagaagcctttggcctgcactgcacatgccccagaaagattcctgatacccattgcattccagcagaccaaccgccctgtgccagttgtgtattcacttaacactgaatttcagctctgcaataatgagaaggtgttcctaatggatcccaatacatctgatatgtcactagcagaaatggattacaaaggagccttttcaaaaggtcaaatcctttatggccgagtactttggaatccagaacaaaatcttaattctgcttacaaactccagctggagaaagtctatctttgtacgggcaaggatggttatgtgcctttctttgatcccacggggacaatctacaatgaagggccccagtatggatgcattcagccaaacaaacacctaaaacacagattcctgctgttggaccgcaatcagccagaggtaactgataagtacttccatgatgtgccttttgaggctcactttgcctctgagttgcctgatttccatgtggtcagtaacatgccaggtgtggatggatttactctaaaagtagatgcactctataaggtggaagcaggacaccagtggtatctccaggtcatctacatcattggccctgacaccatctcagggccccgggtccagcgctctctcacagctccactcagacgcaaccgaagggacctggtagagcccgatggccagctgatccttgatgattccctcatctatgacaatgaaggagaccaagtcaagaatggcaccaatatgaagtccctgaatctggagatgcaagagttggcggtagctgcgtccctgtcacagactggggcgtccattggcagtgccctggctgcaatcatgcttctacttctggtgtttttggtggcttgttttatcaacaggaaatgccagaaacagaggaagaagaagcccgcagaggacattttggaagaatatcctctgaataccaaggtagaagtgcccaagaggcacccggaccgggtggagaagaacgtgaatagacactactgcactgtgcggaacgtcaacatcctgagtgagcctgaggcggcttacacgttcaaaggtgctaaagtcaaaagactgaatctagaagtcagagttcacaacaatttacaagatggaacagaagtttaatggaggagacctatgtgtatttttttctaaaatcatttttataaaatggggggaaatactggtatttttataatctcgcagataaaaaagggaaaactatagctttgagtggcagacagcacacatcacatgcatcaactcacaactgagctacctcattcagcaaagaaccactgagaaccccagagtattacagttatttccgtagatccctttaatagtgtcaacaactgtacacagctccttctgtaaggctggtcttagaaaacaagtactttagtatcaggacaggagttgaacaattaggttagcagatggagatgagaggactgggtagagtaccatggcagatctcagagagaagaagtaggtacgggcctttggttccctcccccagccccagctttctcctacagggcttttcctgagtccccagacagcagagtatgaactgctgacacccagattccattaaaaattctgctaatcgacacaacacatatatttgctcatgatttcacttgacagcgtatgctccttggcctctaattgtactttgcttttccagagccctttttacctggggatttcagtgtgcttaagtaaaatcctctgaaaaccacgggagcctctgcctcctcagccacagagaactccctcctacaaagggggagactgaaacccgagttaaggaggggcctggcaggcgtatcagagcacattagtgatgcccttcaccccagggaggtgtctgttcccaactagtttatgtggcactgagacatccatccctgaccaaggatgctgcgaaacaggatcaatgtactacggccttttaattcaacattgccataaatgctttaaagaaaacccaccacactttcctcctactccggtctttgcccgttcctgtaacagacaatcccatgtcctaggtatggttttttattctgttagtgcttcgggaaagtaagtgattcatttgaataaggcaaattaggagaaagcccaggttggggtgaaatcagacttaacagatacatgctggttctccttgctgtgtgtgacacagcagacagaggcactattcctggtgcagtatttcagggatttctctttgaggggttcttttctggtagctcaggcaattatttttaccatatcagcacatgacaaggccatgaacacatggctctaaaataatttagtgttcaagtatcagcttaactattttgtgtaggctacacacagcttgcttttgtttctcttctgtttctgccttattggcggaaacataagcgtgcatgccatgttgttttgaattggaggcacaatttcattattcgagagtaaaagacatgtcctcttctgatgcatggcacaccatagtcaccaagcaaataacagagccttcacattgtgtaatatttgtatgagaatgactcaagctctttgagaacattccaaactagtaacatttcgctactaaaagctagaaaggatgaactgtgaaaggttctaggcagctctgtgagactccaagctccttgaaagtaggacctttgtgagccacgcctttcattcttcaacagtgccttgcatgtaacaagcactccagaaatgtttgttgaatgaatgaatggtgtcatgggtgaatgatggggagtaaatttaggaaggggaagtgagagagtatggtggcaatatcacaagggaggagagaggaaaacaattatcttctctacttggattatgagataaccttttcttggaggaaagaaacaccgctttacaaaggcatgactctggcggtggtcctaaggaagcatgagcagaaaattcataaaaatgtatcatcagcaggagatgagactatgaattggcatccagaacaggagatttagagcaaaatctaatttagcattctgagatgagtgtcaggttttcaggagagaatgagttggggtgagcccagagtctgaaactcctgactggtcaggtgctacttaagaccagcttgggcaattcagggcagaactcctgtatcagcctcatggacacccagaattggtatctcatggctggagagctgatcagccaggcacagaatctccagaacaacctagagagtgaatgctaatttgtagagcgaacttccatttggcccattatttgtaactgtgtaactgctccaagtgccagaatgcttacacgttaaagcagcacctttccatttgcccacatattcttcttgcacaccccttccattactgctgaataggacattgcatgggaagagtacagaggtggcagaatgaagctagagtgggaaggactaaagactgagccccagagtgctcccagcaaccgccacgtacaaggtctgaaatgacaagggcaagagtgagataggaaactgtgtgtgaaaggaaagcccttgcagtatttctgcctccctttctttctgcctttcaccccactaaatgtatgttattgaatgccagtacttctctagtggatgcacacttgttaaatagtgttaagagatgtggagatgagatatacccctttgatgtagaattattcatttggtttgtttcatacttcattataggaatcaagtaatttgatgactaatgtggattatatttcagtcaaagctctgctttcaatttctctgatttgctcactaatgccttgtgtgtgttttactaaccttttatatcttgccttcaagtgagaaggaacaaacaactctcagtggttactacttgcttttatatgctggctgtgaaggttaaaagaaagaatggtctgtaccattctgctttgctgcccttttattgtaccccaggcctcctagaggactcctgcagattctattgttgggtgggaaatagtgttggaatgtgtttgcacagtcttatgatattcagtctcagtctgctataggtatttgttattcttggatactacacacctgctcagactgagtaaacatttgtggtgctgtcaacctgatttcttgactctcaaatgatttttgtatttccaatatgaatttgtgtgttatgaatttctgatttctccaatagtatatgccactatataaatttgtattaataaatgacagtcttgttggttt

SEQ ID NO: 7691 - DNA, 2297 bp, Homo sapiens
  source 1..2297: mol_type = unassigned DNA; mol_type = unassigned DNA
aggatttccactgtcggggacccgggatcggaagggtctagcccgagggaaatgctggaagatcccatcggccagtgaccagcaactttccggcgagattttgacgcggagaactgtgctctgcctcctcttattctcccaaagctcacgttggcgtcctgccttgcgggggaactcggcgcgctctctgcctgagcagcgagtgaattgaaccccagcccgctccggcgcctccgggctgatgagtgtcgctctccgcccgtccatctctttttcccggaggtaaaggcccgcggtcccccaccttcagtgcgcccgggttccaagcgccggagccagcgttttggcggagccgcttcttggatgctgaaggctgggctcctccatcgtgggtgccgaggcggcgatgggtgtcctcaaagtgtggctcgggctggccctagcgttggcggaatttgcagtattgcctcatcattccgaaggtgcttgtgtctatcaggattccttgttggcggaaggtggatgagccattggaggtgccagagaggaggaatggcaacactggacttatcatctaattaaactgctgaaatgagagtgtgcttgtttccagggaaactatattaaatactttaaaaagactccatagggagtaagaaatgaccagaagggactaaaaataacttgaaaaacactgaataatctattttggggtgtgtttcttactccataatacccatgcacccctgggctcacaagactttctctaaagtcagcccttgtggaacacagcgtgactgttaaatcaggaatccatcagagggaaactacctaggtaataggtttaactgtgatgtccagtgtgaggaggaaaattaatttttcatttcaaagttttcacacaccttctgttcttttccaactatatcaagtattgaaaaaactctccttttgcatcaccacaagcaaacacatatccttttgaaagttcttcctgggatcaatgacttgactcttcacttcaatttttctgtctgtgaaatggagatgaactatttacttctcaggactgttgtgaagcttaaaggagatgaacatgaagcaactcgtccagtgctgtgacttacagtgctcaataaaggttggctgctattattgttgttctatagcagtgacgactggcaaggttggataaatgactcttcttccctggatcaaaagtgttaagtgttgggattttcctacttgggatacttttgctgagaaatgctgacaaagtgaatcacaaggcactaactcttagcaaatttgaaagaatatttttcaaggataatttaaaaatgtggaatgttgactatatataacactgcaggaaaatccaggctttggagtttgaatcttggcaccactacatacatgctgtgtggtctcagatataatactttatacagccaggtgtcactttcattatctacttaattgggattatatttctcctaggtttgatgtgacagttaactgagaacatacttgtgaaagaacccagaactgtccctgcaaggaacacgtactcacatcattcaggtggtaacaagatgtcggagtagaaatgagtgagttatagagtccagggtcttggttcaggttctggccctgtaattactagctgtatagcttggagtaagtcacttgaatgaaatgaggtctcagtttctaaattagtaaattaagagagttaggttagcttttctccaagattccttagcccagtatcgtgtagtagagctttctgtgatgatgggaatgttccatagctgtgctgtccagtgtggtagctacgagccacatgtggttattgagtacttgaagtgtggctgacgatactgaggaactgaattttaaatttcacttaatgtcaatgaattaaagtttaaatttgagtagccacatatagatagtggctactatattggacagtgcaacattagagttttaaaattcttaacgtactctagtacttaaaatacagcctcatgaatggttctcaccctgggtggaagcttactggagtacttttagcagttgtgagaaaagtaatacaaagtttgttatagtacctaagtttgctgtttttgtttgtttatataatttgaacagttttgaagtcaacacagttacaacactactctctccatattgctaaatatgttttcttttttgttgtcgtggttttttttttaaaccaagcaattgttatggatcaatgctttcttgaataaaagaaaaggagtaaaatt

SEQ ID NO: 7692 - DNA, 2217 bp, Homo sapiens
  source 1..2217: mol_type = unassigned DNA; mol_type = unassigned DNA
agggagaagtgcttcaaatagctgccaaccaatgctgtcctgagtgtgttttgaggactccaggatcttgccatcatgaaaagaaaatccatgagcatgggacagaatgggcctcttctccatgtagtgtgtgctcttgcaatcatggggaagtccgatgtaccccccaaccatgcccaccgctgtcatgtggacaccaggagctggcattcatccctgaaggaagctgctgcccagtttgtgtgggccttgggaaaccctgttcctatgaaggccatgtgtttcaggatggggaggactggcggctgagccggtgtgccaaatgtctgtgtagaaatggggttgcccagtgcttcacagctcagtgtcagcctctattttgtaaccaggatgagactgtagtccgagtccctggaaaatgttgcccgcagtgctctgcaagatcctgctctgcagctggccaagtatacgagcatggtgagcagtggagcgaaaatgcctgcaccacgtgtatatgtgaccggggtgaggtcaggtgtcacaagcaggcctgcctgcccctgagatgcggaaagggtcagagcagggctcggcgtcatgggcaatgctgtgaggaatgtgtgtctcctgccgggagctgctcctatgatggagttgtgcggtaccaggacgaaatgtggaagggctcggcctgtgagttctgcatgtgtgatcatggccaagtgacctgccagactggagagtgtgccaaagtggagtgtgcccgggatgaagaattaattcacttagatggaaagtgttgtcctgaatgcatttcaaggaatggttattgtgtttatgaagaaactggagaatttatgtcatcaaatgctagtgaagttaaacgtattccagagggagagaagtgggaagatggcccttgcaaggtgtgtgagtgccgaggggctcaggtaacttgctacgagccctcttgcccaccatgtccagtgggcacactggccttagaggtgaagggacagtgctgtccagactgcacatcagttcattgccatccagattgtttgacatgctctcagtctccagaccactgtgacctctgccaagatcctaccaagttactgcagaatggatggtgtgtgcacagctgtggactgggtttttaccaagctggcagtctctgtttagcctgccagccccagtgctccacgtgtaccagtgggctggagtgctcatcctgccagcctcccctgctgatgcggcacgggcagtgtgtgcctacctgtggggacggcttctaccaagatcgccattcctgtgcagtctgccatgagtcctgtgcaggttgctggggcccaacggagaagcactgcttggcctgcagagatcccctccacgtgctgagagatggcggctgtgagagcagctgtggaaaaggcttctacaacaggcagggcacctgtagcgcttgtgaccaatcctgtgacagttgtggccccagtagccccaggtgtcttacctgtactgagaagacagtgctgcatgatgggaaatgcatgtctgaatgccctggcgggtactatgctgatgccactggcaggtgcaaagtttgtcataactcatgtgccagctgctctgggcccacaccctctcactgtacagcctgcagcccccccaaggctctgcgtcaaggccactgtctgccccgctgtggagagggtttctactctgaccatggagtctgcaaagcctgtcactcctcctgcctggcttgtatgggtcccgcaccctctcactgtactgggtgtaagaagccagaggaaggactgcaagtggagcagctgtctgacgtgggcatcccctctggcgagtgtctagcccagtgtagagcccatttttacttggagagcactggcatatgtgaagggcaaaatctggacttctgtcagaatttagaagtgatttctgctgtttgccttggcatatcatctacagagaattgatgacatcctgaataaataatttgactcaatagccaggccatctatgagtggttgaggagatgaaagggaagtattatagtttcctttctgttcccacaagtagccttgctgttgggtgaatagtttgactctaaagctacgtgaaaaaaaaatcattagtttgtatttttcattgtaaacatatgttcattaaaaaaattttataatacacccacta

SEQ ID NO: 7693 - DNA, 2169 bp, Homo sapiens
  source 1..2169: mol_type = unassigned DNA; mol_type = unassigned DNA
ctgttcctatgaaggccatgtgtttcaggatggggaggactggcggctgagccggtgtgccaaatgtctgtgtagaaatggggttgcccagtgcttcacagctcagtgtcagcctctattttgtaaccaggatgagactgtagtccgagtccctggaaaatgttgcccgcagtgctctgcaagatcctgctctgcagctggccaagtatacgagcatggtgagcagtggagcgaaaatgcctgcaccacgtgtatatgtgaccggggtgaggtcaggtgtcacaagcaggcctgcctgcccctgagatgcggaaagggtcagagcagggctcggcgtcatgggcaatgctgtgaggaatgtgtgtctcctgccgggagctgctcctatgatggagttgtgcggtaccaggacgaaatgtggaagggctcggcctgtgagttctgcatgtgtgatcatggccaagtgacctgccagactggagagtgtgccaaagtggagtgtgcccgggatgaagaattaattcacttagatggaaagtgttgtcctgaatgcatttcaaggaatggttattgtgtttatgaagaaactggagaatttatgtcatcaaatgctagtgaagttaaacgtattccagagggagagaagtgggaagatggcccttgcaaggtgtgtgagtgccgaggggctcaggtaacttgctacgagccctcttgcccaccatgtccagtgggcacactggccttagaggtgaagggacagtgctgtccagactgcacatcagttcattgccatccagattgtttgacatgctctcagtctccagaccactgtgacctctgccaagatcctaccaagttactgcagaatggatggtgtgtgcacagctgtggactgggtttttaccaagctggcagtctctgtttagcctgccagccccagtgctccacgtgtaccagtgggctggagtgctcatcctgccagcctcccctgctgatgcggcacgggcagtgtgtgcctacctgtggggacggcttctaccaagatcgccattcctgtgcagtctgccatgagtcctgtgcaggttgctggggcccaacggagaagcactgcttggcctgcagagatcccctccacgtgctgagagatggcggctgtgagagcagctgtggaaaaggcttctacaacaggcagggcacctgtagcgcttgtgaccaatcctgtgacagttgtggccccagtagccccaggtgtcttacctgtactgagaagacagtgctgcatgatgggaaatgcatgtctgaatgccctggcgggtactatgctgatgccactggcaggtgcaaagtttgtcataactcatgtgccagctgctctgggcccacaccctctcactgtacagcctgcagcccccccaaggctctgcgtcaaggccactgtctgccccgctgtggagagggtttctactctgaccatggagtctgcaaagcctgtcactcctcctgcctggcttgtatgggtcccgcaccctctcactgtactgggtgtaagaagccagaggaaggactgcaagtggagcagctgtctgacgtgggcatcccctctggcgagtgtctagcccagtgtagagcccatttttacttggagagcactggcatatgtgaagcttgccaccagtcctgtttcagatgtgcagggaaaagcccacataactgcacagactgtgggccttcccatgtgctgttggatgggcagtgcctctcccagtgcccagatggctactttcaccaggaaggtagttgcacagagtgtcacccaacctgcaggcagtgtcatgggccgttggagtctgactgcatctcctgttaccctcacatctctcttaccaatggtaactgcaggaccagctgcagggaagagcagttcctcaacctcgtgggatactgtgctggtgagtgaaactcctgtggactcctcggaaatcactgggcagctgccggggctcttcataccaggcttaagggggctctttgtcctcagtttatgagctcttttataggagacatttgtttcatgtctggaaactcatgttactgcttctccttgggcatttagtaaatacttgtggatttaaatagaacttctaataatactcttgcaaatcctgaaaa

SEQ ID NO: 7694 - DNA, 2125 bp, Homo sapiens
  source 1..2125: mol_type = unassigned DNA; mol_type = unassigned DNA
cactctacctctgcatccaaatcaaggtctcccagaatcagtgaaattccacttcacagtttcagatggagaacacacaagtccggagatggtcctcaccattcacttacttcccagtgatcagcaactgccagtgttccaggtcacagctccacggctggcggtcagcccaggaggcagcacttctgtaggacttcaggtggtagtaagagatgctgagacagcgcccaaagaactcttctttgagcttcggagacctccacagcatggtgtgcttcttaagcatacagctgagttccgaaggccgatggccacaggtgacactttcacctatgaggatgttgagaaaaatgctctacagtatatacatgatggttcctctacccgggaagacagcatggagatctcagtcacagatggcctcacagtgacaatgctggaggtgagagtagaggtgtccctgtcagaagaccgagggcctcgactggctgctggctcctctctgagcattactgttgccagtaaaagcacagccataatcactaggtcacaccttgcttacgtggatgattcttcccccgacccagagatctggattcagttaaattatctgccctcatatggtactctcttaagaatctcaggatctgaggtggaagagctctcagaagtttccaatttcacaatggaagacatcaataacaagaaaatcagatactcagctgtgtttgaaactgatggtcatctggttactgatagcttctatttctctgtctctgacatggaccacaaccatctggataatcagatatttaccatcatgatcactcctgctgaaaatccacctccagtcattgcttttgctgaccttatcacggttgatgagggagggagagcaccactctcatttcaccatttttttgctactgatgatgatgacaacctccagagagatgccatcattaaactaagtgctctgcccaaatatggctgcattgagaacacaggaacaggtgatcgttttggccctgaaactgccagtgacctagaggcatcatttcctattcaagacgtcctggaaaactacatttactactttcagagtgttcatgaaagcattgagccaacccatgatatttttagtttttatgtgagtgatggaaccagtcgttcagaaattcacagcatcaatatcaccattgaggtaaagactttggaagttggaaaggttgagcccttgaccacaatatttcacaccattagagagctttctttatagggactcaaaagcaaagaagattggatttgaccttcaaaattgaaggtcgttcttaaaatatagccttcaggaatcttgtagaattaaggttggcatttggggaaggcttgagttagaaatctaaatttccatttcaggattgaatttatttgttcggtgtgaaaaacagtttgtgaaggtcagagatgctttgccagtctcatatataaatgaaaacttacatatgtctatgtttctctgaaattgtgtttggttctatatgcatatttgccttttcttattttactgcatttatttatttaattgtaacatcaaagaaatgtgttccttgatgctgtatttattctcatttgagcaactacacaggcttgctctaccgagagagagacacaggggaggggaaagataaatctcagaatgaaataccctctgccttgggaaaataaaatgtaaagaaccctctgcactcttaagggtcagtggtggaaaggggctggcaccagggcagggagacagctttagagacccacactttcaaatatagtgtccttctacaggtactgtggtatgcttagcattttctaagagagttctgagttatattagtatggtcttttatcttcaaagtatgttaatacttgtacttgtcaaagcacatatccatatttttggtctagaaaatatggtcattgtacttacggaagatatctgagaaaacttttatgaaatgtccatcagcttcttttgaagggggcattttgttgcctggacttgctctcttttcaaactaactattttgcttgggaagtaaagatggtgccacattaaatgctattttgaggtgaa

SEQ ID NO: 7695 - DNA, 564 bp, Homo sapiens
  source 1..564: mol_type = unassigned DNA; mol_type = unassigned DNA
gtactctggaggcaaactgcttctgagcctctggagaatgggagagttttagtccagggctcaaccttcacctaccaggatatcctagctgggctggttgggtatgtgcctagtgtccctggcatggtcgtggatgagttccagttctccctcactgatggcctccacgtggacacagggaggatgaagatctacacagaactgcctgcaagtgacacacctcacttggctataaaccaaggcctacagctctcagcagggtctgtagcacgcatcacagaacagcacttgaaagtgacagatattgactcagatgaccatcaggttatgtacatcatgaaggaagatcctggtgcagggcgcctgcagatgatgaagcatggcaacctggagcaaatttctattaaaggccccatccgaagtttcacccaggcagacattagccaaggtcagccagttctcttctgcctaccaggcttccgtggactgcacctacactagtaaaatgagaattaaatatctggtagtctatggcaataaactgtgcactctttgttttgagga

SEQ ID NO: 7696 - DNA, 2481 bp, Homo sapiens
  source 1..2481: mol_type = unassigned DNA; mol_type = unassigned DNA
agtctgcagggaggaaagtcagaattagatattcaagatggccgcctctgatggagtccctggcactcactcaagcttgcatttggtagatggtgacacaagaatccatgctgaaggctgccttgcctctctttaccagattcatcatcagcaatggactgcggaccgagcacggggtgtttgagatcacactggagactgtggacagagccctgcctgtggtaaccaggaacaaggggttgagactggcccaaggggccgtgggcctgctttcccctgacctccttcagctgaccgaccctgatacacctgcggagaacctcaccttcctcttggttcagctcccccagcatggccagctctacctgtgggggacagggctacttcaacacaatttcacccagcaggatgtggacagcaagaatgtggcctatcggcactcaggaggggactcccagactgactgctttactttcatggccacagatgggacaaaccaaggctttattgtgaatgggagagtgtgggaagaacctgttttattcaccattcaggtagaccaattggacaaaacagctcctcgtatcacactcttgcattccccttctcaagtggggctcctgaaaaatggctgctacgggatttacatcacttcccgcgtgttgaaggcatcagaccctgacactgaggacgatcagatcatctttaaaattctacaaggcccaaaacatggacatctggagaacacaacaacaggtgaatttatccatgagaaatttagccaaaaggacttaaacagtaagactattctttacatcataaacccatctttggaagtaaattcagataccgtggaatttcaaatcatggaccccacagggaactcggccactcctcaaattttggaactgaagtggtctcatattgaatggtcacagaccgaatatgaagtctgtgagaatgtgggtttgttgcccttggaaattatcagaaggggatattccatggactcggcctttgtgggtataaaggtcaaccaagtgtcagctgcagttggaaaagatttcaccgtgattccatctaaactgattcagtttgacccaggaatgtcaactaagatgtggaatatagcaattacctatgacggattagaggaagatgatgaggtctttgaagtaattctgaactcccctgtgaatgcagttcttggcacaaagacaaaagctgcagtgaaaattttggactcaaaaggaggacaatgccatccttcatattcctccaaccaaagcaagcacagcacatgggagaagggcatttggcatctgctgcccccagggtcttcctcatccaccacttctggttcctttcatctggaaagaagacctcttccatcttccatgcagctagcagtcatcaggggagacaccctgcggggctttgattctacagatctttctcaaaggaagcttaggacccgtgggaatggcaaaacagttcgtccatcctctgtttatagaaatggaacagacatcatctataattatcatgggatagtttccttgaaactggaggatgacagtttcccaactcacaaaaggaaggccaaagtatccatcattagtcagccacaaaagacaatcaaagtggcagaactgcctcaagcagataaggtggaatccacaactgactcacacttccccagacaggaccagttgccctcatttccaaagaactgcactctggaattaaagggactcttccattttgaagaaggcatccagaagctgtatcagtgcaatgggatcgcctggaaagcctggagtccccaaaccaaggatgtggaagacaaatcctgtccagccgggtggcaccagcactcaggctactgtcacatcttgatcacagagcagaaaggcacctggaatgcggctgcccaagcttgcagggaacaatacctgggcaaccttgtaactgtattctccaggcagcacatgcggtggctctgggacattggtgggagaaagtccttttggataggtttgaacgaccaagtgcatgctggccactgggagtggatcggtggtgaacctgttgccttcaccaatgggagaagagggccctctcaacgctccaagcttggaaagagctgtgttttggttcaaagacaagggaaatggcaaacaaaagactgtaggagagccaaacctcataattatgtgtgttccagaaaactctaaatataacagaccctacagggggccacctggagtttgtcacctatttattcacaggatctgtgaatattgctccatagaaaacaaattgttatgattgagtgggtatacctttgtgattctgtctagtgaaaatgggacatttttaatagtgccagaaagattgataaataaatattttttacaagataagatacaatttttgtatctcaataccttttaaaataaatgccagcagtattataaa

SEQ ID NO: 7697 - DNA, 6126 bp, Homo sapiens
  source 1..6126: mol_type = unassigned DNA; mol_type = unassigned DNA
acacaaaaagccttacaaatggaagaactaaggtggtacttaaaaacagcaccttaggatctagttccatcctatcttttcccttaaatgccatgacaaaagttaaaacgggccctgtcccttctgaatgctgggcttctcatctaaatttaaataaaaacctttgaagatgggaatgtgttggaagaaaagaagggcagaaaaaaagtgtgttggaagagtctgtggagtcctgaggcttggcgctcaggaagtttgcaaagctgcagcagctgccttggagaagaccagcaaagaaagtggagtgtgtatgtgaacttcaattctgtattttctgtgaggtgggttaatggatttttagtaaaaagaaatctcaaacacagctgacctgaaagactggaatttcagctctcttccttcccggggttctttttcctcccccttcctctcaaagccctttaaaccagattgctgtgtcagtgactcttatcctgcccgccagttccaagggtttctaactttttgtcttggaaaggaaaaccactacctgattagaaaagcacttgggaagcccattaatcttgccggcgttgtcaggagtgatcagcgagttttattaaaagccctgggattgcctgaaaggcccccttgtctgactttgaaatgaaaggggcatgttaagatctcggggcacattgtcaggacccctcaccctgccccttggactatgagctgaccctccaggaggaagcacagaagccctcctttgttaaagggatttcgccggtggacagagaagagttgggccctgtcagcatgaactctctgagttggggggctgcgaatgccgtgctgctgctgctcctcctggcctgggccagccccaccttcatcagcatcaaccgcggggtgagggtgatgaagggccactctgccttcctgtcaggagatgacctgaagtttgccatccctaaagagaaagatgcctgcaaagtggaagttgtgatgaatgagccaataacccagagggttgggaaactcactccacaggtctttgactgccatttccttcccaacgaagtcaagtatgttcacaatggttgtccaattcttgatgaagacacagtgaagctcagactttacagatttactgaaagagataccttcatagaaacttttatcctgtgggtctatctcctggaaccagactgtaacatcatccatatgagtaacaatgtgctggaggtgcctgaattcaatggcttgtcccaagcgattgataaaaatctgctcagattcgattatgataggatggctagcctggaatgtaccgtcagcctggacactgcgagaactcggctgccagcccatggccagatggttctcggggagcctcgaccagaagaacctcgtggagatcagccacacagttttttcccagagtcccaactgagagcaaaactgaagtgtccaggtgggagctgtaccccaggattaaagaaaataggaagcctcaaagtgagctgtgaggagttcctgctgatgggccttcgttatcagcatctggatcccccttcacccaacattgattatatctccatccaactggacctcacagataccaggagcaaaattgtgtacaagtcagagagtgcgtggctgcctgtctatatcagagctggaattccgaatcagattccaaaggctgcattcatggccgtgtttattctggaagtggatcagttcatcctgacctccttgactacatcagttctggactgtgaagaagatgagacccctaaacccttgctggtgttcaacattactaaagccccgctccagggctatgtgactcacctgttggatcacaccagaccaatctcctcattcacctggaaagatctcagtgacatgcagatcgcctatcagccaccaaacagcagccattctgagaggagacatgatgaggtagaattggaggtatacgacttcttctttgaaaggagtgcacctatgacagtccacatctccatcagaacagcagatacaaatgccccccgtgtatcctggaatacaggtctgagtctccttgaggggcagtctcgagccatcacttgggaacagtttcaggttgtcgacaatgacgacattggtgctgtccggctagtcaccgttggtggcctgcagcatggatggctgactttaagaggggggaaagggtttctcttcaccgtggctgacctccaggctggagttgttcgctatcatcatgatgacagcgactccaccaaagacttcgtggtcttccggatatttgatggccatcacagcatccgtcacaaattccccatcaacgtcttgcccaaagatgatagtcccccgttcctcataaccaatgttgtgattgaactggaggaggggcagaccatcctgatccagggatccatgctgcgagcttcagatgtggacgccagtgatgactacatcttcttcaatatcacaaagcctccacaggctggggagatcatgaagaagccagggccaggactgataggctatcctgtccatggcttccttcagagggatttgtttaatggaatcatttattatcgtcattttggtggagaaatctttgaagattcttttcaatttgtcctgtgggacagccatgaacctccaaatctttcagtgccacaggtggcaacaatccatataactccagtggatgaccagcttccaaaagaggctcctggagtttctcggcatttggttgtcaaggaaactgaggtggcctatataactaagaaacagctacattttatagattcagaatcatatgacagggagctggtctacacaataactactcctccatttttctccttcagccacagacacttggatgctgggaaattatttatggtggacagcataccaaaagtagttaagaatcctacggccctggagctgaggtcattcactcagcatgctgtgaactatatgaaagtggcctacatgccccccatgcaagacattggtccccattgcagagatgtccagttcacattttctgtcagtaaccaacatggcggtactttgcatgggatctgctttaacattacaatcctcccagtggacaatcaagttcctgaggcgttcaccaaccctctgaaagtgactgagggaggtcaaagcatcatcagcacagagcacattctaatttctgatgcagataccaagctggacaatattgacctctccctgcgggaattgcctctgcacggaagggtggagctgaatggatttcctctaaattcagggggcacattttcttggggcgatctccataccttaaaagttaggtatcaacatgatggaactgaagttcttcaggatgacctactcttggaggtcaccgatggcacaaattcagcagaatttgtactacatgttgaggtattccctgtcaacgatgagccaccagtcttaaaggctgacctcatgcctgtcatgaattgctcagagggaggagaggtggtcatcacctctgaatacatttttgctactgatgtggacagcgataacttgaagttgatgtttgtgattgctcgcgaacctcagcatggggtggtgaggagagctggagtcacagtggatcagttctctcagagagatgttatctcagaggccgtgacatacaaacacacaggtggcgagattggcctgatgccttgttttgacaccattacattggtggtttcggatggagaggctggcccttttgtgaatggctgttgctacaatggacccaatccatctgttccacttcatgcgtcctttccagtgtatgatctcaacatcacggtatacccagtagacaaccagccaccttccattgcaataggtcccgtgtttgttgtagatgagggctgctcaacagcccttactgttaaccatttgtccgccactgaccctgacactgcagcagatgacttggaatttgttttggtttctcctcctcagtttggctacctcgaaaatatactcccttctgtgggttttgaaaaaagcaatattggcataagtatagattcatttcagtggaaagacatgaacgcttttcacattaactatgtgcagtccaggcatctgaggatagaaccaactgccgaccagttcacggtgtacgtcacagatgggaagcatcactccttggagataccattttctattataatcaaccccacaaatgatgaagctcctgactttgtagtgcagaatattactgtgtgtgagggtcagatgaaagagctggactcttccatcatcagcgctgtggacctggacattccccaggatgccctgctgttcagcatcactcaaaagccacgccatggcctcctcatcgatagggggtttagcaaagacttctctgagaataagcagccagccaaccctcaccagaaacatgcacctgttcacagcttttccatggaactcctcaagactggaatgaggttgacgtacatgcatgatgactcagagagccttgctgatgattttacaatccaattgtcagatgggaaacataagatacttaaaaccatttcagtagaggtcatcccagttaatgatgaaaaaccaatgctgagcaagaaggctgaaattgcaatgaatatgggtgaaactcgtattatttccagtgctattctttcagccatagatgaagactcacccagggagaagatttactatgtatttgaaaggcttccccaaaatgggcaacttcagcttaaggaatgtcaactaagatgtggaatatagcaattacctatgacggattagaggaagatgatgaggtctttgaagtaattctgaactcccctgtgaatgcagttcttggcacaaagacaaaagctgcagtgaaaattttggactcaaaaggaggacaatgccatccttcatattcctccaaccaaagcaagcacagcacatgggagaagggcatttggcatctgctgcccccagggtcttcctcatccaccacttctggttcctttcatctggaaagaagacctcttccatcttccatgcagctagcagtcatcaggggagacaccctgcggggctttgattctacagatctttctcaaaggaagcttaggacccgtgggaatggcaaaacagttcgtccatcctctgtttatagaaatggaacagacatcatctataattatcatgggatagtttccttgaaactggaggatgacagtttcccaactcacaaaaggaaggccaaagtatccatcattagtcagccacaaaagacaatcaaagtggcagaactgcctcaagcagataaggtggaatccacaactgactcacacttccccagacaggaccagttgccctcatttccaaagaactgcactctggaattaaagggactcttccattttgaagaaggcatccagaagctgtatcagtgcaatgggatcgcctggaaagcctggagtccccaaaccaaggatgtggaagacaaatcctgtccagccgggtggcaccagcactcaggctactgtcacatcttgatcacagagcagaaaggcacctggaatgcggctgcccaagcttgcagggaacaatacctgggcaaccttgtaactgtattctccaggcagcacatgcggtggctctgggacattggtgggagaaagtccttttggataggtttgaacgaccaagtgcatgctggccactgggagtggatcggtggtgaacctgttgccttcaccaatgggagaagagggccctctcaacgctccaagcttggaaagagctgtgttttggttcaaagacaagggaaatggcaaacaaaagactgtaggagagccaaacctcataattatgtgtgttccagaaaactctaaatataacagaccctacagggggccacctggagtttgtcacctatttattcacaggatctgtgaatattgctccatagaaaacaaattgttatgattgagtgggtatacctttgtgattctgtctagtgaaaatgggacatttttaatagtgccagaaagattgataaataaatattttttacaagataagatacaa

SEQ ID NO: 7698 - DNA, 1421 bp, Homo sapiens
  source 1..1421: mol_type = unassigned DNA; mol_type = unassigned DNA
gatgctggatgagtccttggcagtcaggaggtccaaaaaatgcaaagaaatgataatgcactgggagaagaaagaagatattgacatcgtgaacacagtagaccaattggacaaaacagctcctcgtatcacactcttgcattccccttctcaagtggggctcctgaaaaatggctgctacgggatttacatcacttcccgcgtgttgaaggcatcagaccctgacactgaggacgatcagatcatctttaaaattctacaaggcccaaaacatggacatctggagaacacaacaacaggtgaatttatccatgagaaatttagccaaaaggacttaaacagtaagactattctttacatcataaacccatctttggaagtaaattcagataccgtggaatttcaaatcatggaccccacagggaactcggccactcctcaaattttggaactgaagtggtctcatattgaatggtcacagaccgaatatgaagtctgtgagaatgtgggtttgttgcccttggaaattatcagaaggggatattccatggactcggcctttgtgggtataaaggtcaaccaagtgtcagctgcagttggaaaagatttcaccgtgattccatctaaactgattcagtttgacccaggttcgtccatcctctgtttatagaaatggaacagacatcatctataattatcatgggatagtttccttgaaactggaggatgacagtttcccaactcacaaaaggaaggccaaagtatccatcattagtcagccacaaaagacaatcaaagtggcagaactgcctcaagcagataaggtggaatccacaactgactcacacttccccagacaggaccagttgccctcatttccaaagaactgcactctggaattaaagggactcttccattttgaagaaggcatccagaagctgtatcagtgcaatgggatcgcctggaaagcctggagtccccaaaccaaggatgtggaagacaaatcctgtccagccgggtggcaccagcactcaggctactgtcacatcttgatcacagagcagaaaggcacctggaatgcggctgcccaagcttgcagggaacaatacctgggcaaccttgtaactgtattctccaggcagcacatgcggtggctctgggacattggtgggagaaagtccttttggataggtttgaacgaccaagtgcatgctggccactgggagtggatcggtggtgaacctgttgccttcaccaatgggagaagagggccctctcaacgctccaagcttggaaagagctgtgttttggttcaaagacaagggaaatggcaaacaaaagactgtaggagagccaaacctcataattatgtgtgttccagaaaactctaaatataacagaccctacagggggccacctgg

SEQ ID NO: 7699 - DNA, 7324 bp, Homo sapiens
  source 1..7324: mol_type = unassigned DNA; mol_type = unassigned DNA
ttagtacaaaactagtagtgagaaaggaagctgggaagagactgggaagaggcaaccgacctcattaacaaaagctcagttttgtccctgcggacccaaccagcagaaggcacggggctagcggtggctgtccgccagggaggtcgggctctgtgtaaacagtagaaggcatctttatcatgcccttctcacagggagtcctgaggcttggcgctcaggaagtttgcaaagctgcagcagctgccttggagaagaccagcaaagaaagtggagtgtgtatgtgaacttcaattctgtattttctgtgaggtgggttaatggatttttagtaaaaagaaatctcaaacacagctgacctgaaagactggaatttcagctctcttccttcccggggttctttttcctcccccttcctctcaaagccctttaaaccagattgctgtgtcagtgactcttatcctgcccgccagttccaagggtttctaactttttgtcttggaaaggaaaaccactacctgattagaaaagcacttgggaagcccattaatcttgccggcgttgtcaggagtgatcagcgagttttattaaaagccctgggattgcctgaaaggcccccttgtctgactttgaaatgaaaggggcatgttaagatctcggggcacattgtcaggacccctcaccctgccccttggactatgagctgaccctccaggaggaagcacagaagccctcctttgttaaagggatttcgccggtggacagagaagagttgggccctgtcagcatgaactctctgagttggggggctgcgaatgccgtgctgctgctgctcctcctggcctgggccagccccaccttcatcagcatcaaccgcggggtgagggtgatgaagggccactctgccttcctgtcaggagatgacctgaagtttgccatccctaaagagaaagatgcctgcaaagtggaagttgtgatgaatgagccaataacccagagggttgggaaactcactccacaggtctttgactgccatttccttcccaacgaagtcaagtatgttcacaatggttgtccaattcttgatgaagacacagtgaagctcagactttacagatttactgaaagagataccttcatagaaacttttatcctgtgggtctatctcctggaaccagactgtaacatcatccatatgagtaacaatgtgctggaggtgcctgaattcaatggcttgtcccaagcgattgataaaaatctgctcagattcgattatgataggatggctagcctggaatgtaccgtcagcctggacactgcgagaactcggctgccagcccatggccagatggttctcggggagcctcgaccagaagaacctcgtggagatcagccacacagttttttcccagagtcccaactgagagcaaaactgaagtgtccaggtgggagctgtaccccaggattaaagaaaataggaagcctcaaagtgagctgtgaggagttcctgctgatgggccttcgttatcagcatctggatcccccttcacccaacattgattatatctccatccaactggacctcacagataccaggagcaaaattgtgtacaagtcagagagtgcgtggctgcctgtctatatcagagctggaattccgaatcagattccaaaggctgcattcatggccgtgtttattctggaagtggatcagttcatcctgacctccttgactacatcagttctggactgtgaagaagatgagacccctaaacccttgctggtgttcaacattactaaagccccgctccagggctatgtgactcacctgttggatcacaccagaccaatctcctcattcacctggaaagatctcagtgacatgcagatcgcctatcagccaccaaacagcagccattctgagaggagacatgatgaggtagaattggaggtatacgacttcttctttgaaaggagtgcacctatgacagtccacatctccatcagaacagcagatacaaatgccccccgtgtatcctggaatacaggtctgagtctccttgaggggcagtctcgagccatcacttgggaacagtttcaggttgtcgacaatgacgacattggtgctgtccggctagtcaccgttggtggcctgcagcatggatggctgactttaagaggggggaaagggtttctcttcaccgtggctgacctccaggctggagttgttcgctatcatcatgatgacagcgactccaccaaagacttcgtggtcttccggatatttgatggccatcacagcatccgtcacaaattccccatcaacgtcttgcccaaagatgatagtcccccgttcctcataaccaatgttgtgattgaactggaggaggggcagaccatcctgatccagggatccatgctgcgagcttcagatgtggacgccagtgatgactacatcttcttcaatatcacaaagcctccacaggctggggagatcatgaagaagccagggccaggactgataggctatcctgtccatggcttccttcagagggatttgtttaatggaatcatttattatcgtcattttggtggagaaatctttgaagattcttttcaatttgtcctgtgggacagccatgaacctccaaatctttcagtgccacaggtggcaacaatccatataactccagtggatgaccagcttccaaaagaggctcctggagtttctcggcatttggttgtcaaggaaactgaggtggcctatataactaagaaacagctacattttatagattcagaatcatatgacagggagctggtctacacaataactactcctccatttttctccttcagccacagacacttggatgctgggaaattatttatggtggacagcataccaaaagtagttaagaatcctacggccctggagctgaggtcattcactcagcatgctgtgaactatatgaaagtggcctacatgccccccatgcaagacattggtccccattgcagagatgtccagttcacattttctgtcagtaaccaacatggcggtactttgcatgggatctgctttaacattacaatcctcccagtggacaatcaagttcctgaggcgttcaccaaccctctgaaagtgactgagggaggtcaaagcatcatcagcacagagcacattctaatttctgatgcagataccaagctggacaatattgacctctccctgcgggaattgcctctgcacggaagggtggagctgaatggatttcctctaaattcagggggcacattttcttggggcgatctccataccttaaaagttaggtatcaacatgatggaactgaagttcttcaggatgacctactcttggaggtcaccgatggcacaaattcagcagaatttgtactacatgttgaggtattccctgtcaacgatgagccaccagtcttaaaggctgacctcatgcctgtcatgaattgctcagagggaggagaggtggtcatcacctctgaatacatttttgctactgatgtggacagcgataacttgaagttgatgtttgtgattgctcgcgaacctcagcatggggtggtgaggagagctggagtcacagtggatcagttctctcagagagatgttatctcagaggccgtgacatacaaacacacaggtggcgagattggcctgatgccttgttttgacaccattacattggtggtttcggatggagaggctggcccttttgtgaatggctgttgctacaatggacccaatccatctgttccacttcatgcgtcctttccagtgtatgatctcaacatcacggtatacccagtagacaaccagccaccttccattgcaataggtcccgtgtttgttgtagatgagggctgctcaacagcccttactgttaaccatttgtccgccactgaccctgacactgcagcagatgacttggaatttgttttggtttctcctcctcagtttggctacctcgaaaatatactcccttctgtgggttttgaaaaaagcaatattggcataagtatagattcatttcagtggaaagacatgaacgcttttcacattaactatgtgcagtccaggcatctgaggatagaaccaactgccgaccagttcacggtgtacgtcacagatgggaagcatcactccttggagataccattttctattataatcaaccccacaaatgatgaagctcctgactttgtagtgcagaatattactgtgtgtgagggtcagatgaaagagctggactcttccatcatcagcgctgtggacctggacattccccaggatgccctgctgttcagcatcactcaaaagccacgccatggcctcctcatcgatagggggtttagcaaagacttctctgagaataagcagccagccaaccctcaccagaaacatgcacctgttcacagcttttccatggaactcctcaagactggaatgaggttgacgtacatgcatgatgactcagagagccttgctgatgattttacaatccaattgtcagatgggaaacataagatacttaaaaccatttcagtagaggtcatcccagttaatgatgaaaaaccaatgctgagcaagaaggctgaaattgcaatgaatatgggtgaaactcgtattatttccagtgctattctttcagccatagatgaagactcacccagggagaagatttactatgtatttgaaaggcttccccaaaatgggcaacttcagcttaagatagggagggactgggttcctctctcccctggcatgaaatgcactcaggaggaagtggatctgaacttgctgagatacacacacaccggggcaatggattcccagaatcaagatagcttcaccttctacctttgggatggcaacaacaggtcccctgctcttgactgtcaaatcaccatcaaggacatggaaaaaggtgatattgtcatccttacaaaaccactcgtggtgtctaaaggtgatagaggtttcttaacaaccaccacgctcctggctgtggacggaacagacaagcctgaggaactgctctatgtcatcacctcccctccgcgatatggccagatcgaatatgttcactatcctggagttcccattacaaacttcagccaaatggatgtagtggggcagacagtttgctatgtacacaagagcaaggtgactgtctccagtgacagattcagattcatcatcagcaatggactgcggaccgagcacggggtgtttgagatcacactggagactgtggacagagccctgcctgtggtaaccaggaacaaggggttgagactggcccaaggggccgtgggcctgctttcccctgacctccttcagctgaccgaccctgatacacctgcggagaacctcaccttcctcttggttcagctcccccagcatggccagctctacctgtgggggacagggctacttcaacacaatttcacccagcaggatgtggacagcaagaatgtggcctatcggcactcaggaggggactcccagactgactgctttactttcatggccacagatgggacaaaccaaggctttattgtgaatgggagagtgtgggaagaacctgttttattcaccattcaggtagaccaattggacaaaacagctcctcgtatcacactcttgcattccccttctcaagtggggctcctgaaaaatggctgctacgggatttacatcacttcccgcgtgttgaaggcatcagaccctgacactgaggacgatcagatcatctttaaaattctacaaggcccaaaacatggacatctggagaacacaacaacaggtgaatttatccatgagaaatttagccaaaaggacttaaacagtaagactattctttacatcataaacccatctttggaagtaaattcagataccgtggaatttcaaatcatggaccccacagggaactcggccactcctcaaattttggaactgaagtggtctcatattgaatggtcacagaccgaatatgaagtctgtgagaatgtgggtttgttgcccttggaaattatcagaaggggatattccatggactcggcctttgtgggtataaaggtcaaccaagtgtcagctgcagttggaaaagatttcaccgtgattccatctaaactgattcagtttgacccaggaatgtcaactaagatgtggaatatagcaattacctatgacggattagaggaagatgatgaggtctttgaagtaattctgaactcccctgtgaatgcagttcttggcacaaagacaaaagctgcagtgaaaattttggactcaaaaggaggacaatgccatccttcatattcctccaaccaaagcaagcacagcacatgggagaagggcatttggcatctgctgcccccagggtcttcctcatccaccacttctggttcctttcatctggaaagaagacctcttccatcttccatgcagctagcagtcatcaggggagacaccctgcggggctttgattctacagatctttctcaaaggaagcttaggacccgtgggaatggcaaaacagttcgtccatcctctgtttatagaaatggaacagacatcatctataattatcatgggatagtttccttgaaactggaggatgacagtttcccaactcacaaaaggaaggccaaagtatccatcattagtcagccacaaaagacaatcaaagtggcagaactgcctcaagcagataaggtggaatccacaactgactcacacttccccagacaggaccagttgccctcatttccaaagaactgcactctggaattaaagggactcttccattttgaagaaggcatccagaagctgtatcagtgcaatgggatcgcctggaaagcctggagtccccaaaccaaggatgtggaagacaaatcctgtccagccgggtggcaccagcactcaggctactgtcacatcttgatcacagagcagaaaggcacctggaatgcggctgcccaagcttgcagggaacaatacctgggcaaccttgtaactgtattctccaggcagcacatgcggtggctctgggacattggtgggagaaagtccttttggataggtttgaacgaccaagtgcatgctggccactgggagtggatcggtggtgaacctgttgccttcaccaatgggagaagagggccctctcaacgctccaagcttggaaagagctgtgttttggttcaaagacaagggaaatggcaaacaaaagactgtaggagagccaaacctcataattatgtgtgttccagaaaactctaa

SEQ ID NO: 7700 - DNA, 815 bp, Homo sapiens
  source 1..815: mol_type = unassigned DNA; mol_type = unassigned DNA
cactcaggaggggactcccagactgactgctttactttcatggccacagatgggacaaaccaaggctttattgtgaatgggagagtgtgggaagaacctgttttattcaccattcaggtagaccaattggacaaaacagctcctcgtatcacactcttgcattccccttctcaagtggggctcctgaaaaatggctgctacgggatttacatcacttcccgcgtgttgaaggcatcagaccctgacactgaggacgatcagatcatctttaaaattctacaaggcccaaaacatggacatctggagaacacaacaacaggtgaatttatccatgagaaatttagccaaaaggacttaaacagtaagactattctttacatcataaacccatctttggaagtaaattcagataccgtggaatttcaaatcatggaccccacagggaactcggccactcctcaaattttggaactgaagtggtctcatattgaatggtcacagaccgaatatgaagtctgtgagaatgtgggtttgttgcccttggaaattatcagaaggggatattccatggactcggcctttgtgggtataaaggtcaaccaagtgtcagctgcagttggaaaagatttcaccgtgattccatctaaactgattcagtttgacccagccagccaaaagtagaagaagtggatagcttcacctttccattgacttctgttgaggattgaagagactgattagatcatgagatctatgtgaggcataccttcaagaaagaggccaccatatagatggacagttgagaggtataagtc

SEQ ID NO: 7701 - DNA, 699 bp, Homo sapiens
  source 1..699: mol_type = unassigned DNA; mol_type = unassigned DNA
gtgatattgtcatccttacaaaaccactcgtggtgtctaaaggtgatagaggtttcttaacaaccaccacgctcctggctgtggacggaacagacaagcctgaggaactgctctatgtcatcacctcccctccgcgatatggccagatcgaatatgttcactatcctggagttcccattacaaacttcagccaaatggatgtagtggggcagacagtttgctatgtacacaagagcaaggtgactgtctccagtgacagattcagtagatggtgacacaagaatccatgctgaaggctgccttgcctctctttaccagattcatcatcagcaatggactgcggaccgagcacggggtgtttgagatcacactggagactgtggacagagccctgcctgtggtaaccaggaacaaggggttgagactggcccaaggggccgtgggcctgctttcccctgacctccttcagctgaccgaccctgatacacctgcggagaacctcaccttcctcttggttcagctcccccagcatggccagctctacctgtgggggacagggctacttcaacacaatttcacccagcaggatgtggacagcaagaatgtggcctatcggcactcaggaggggactcccagactgactgctttactttcatggccacagatgggacaaaccaaggctttattgtgaatgggag

SEQ ID NO: 7702 - DNA, 741 bp, Homo sapiens
  source 1..741: mol_type = unassigned DNA; mol_type = unassigned DNA
gggagaagatttactatgtatttgaaaggcttccccaaaatgggcaacttcagcttaaggaggaagtggatctgaacttgctgagatacacacacaccggggcaatggattcccagaatcaagatagcttcaccttctacctttgggatggcaacaacaggtcccctgctcttgactgtcaaatcaccatcaaggacatggaaaaaggtgatattgtcatccttacaaaaccactcgtggtgtctaaaggtgatagaggtttcttaacaaccaccacgctcctggctgtggacggaacagacaagcctgaggaactgctctatgtcatcacctcccctccgcgatatggccagatcgaatatgttcactatcctggagttcccattacaaacttcagccaaatggatgtagtggggcagacagtttgctatgtacacaagagcaaggtgactgtctccagtgacagattcagattcatcatcagcaatggactgcggaccgagcacggggtgtttgagatcacactggagactgtggacagagccctgcctgtggtaaccaggaacaaggggttgagactggcccaaggggccgtgggcctgctttcccctgacctccttcagctgaccgaccctgatacacctgcggagaacctcaccttcctcttggttcagctcccccagcatggccagctctacctgtgggggacagggctacttcaacacaatttcacccagcagg

SEQ ID NO: 7703 - DNA, 701 bp, Homo sapiens
  source 1..701: mol_type = unassigned DNA; mol_type = unassigned DNA
gaaggctgaaattgcaatgaatatgggtgaaactcgtattatttccagtgctattctttcagccatagatgaagactcacccagggagaagatttactatgtatttgaaaggcttccccaaaatgggcaacttcagcttaagatagggagggactgggttcctctctcccctggcatgaaatgcactcaggaggaagtggatctgaacttgctgagatacacacacaccggggcaatggattcccagaatcaagatagcttcaccttctacctttgggatggcaacaacaggtcccctgctcttgactgtcaaatcaccatcaaggacatggaaaaaggtgatattgtcatccttacaaaaccactcgtggtgtctaaaggtgatagaggtttcttaacaaccaccacgctcctggctgtggacggaacagacaagcctgaggaactgctctatgtcatcacctcccctccgcgatatggccagatcgaatatgttcactatcctggagttcccattacaaacttcagccaaatggatgtagtggggcagacagtttgctatgtacacaagagcaaggtgactgtctccagtgacagattcaggtgagccccatggaaacttttcaaaccccttctttggattaatacttacagaaaaggagatctgttaatgtgcttcactatagtaaccatttcacaaa

SEQ ID NO: 7704 - DNA, 10086 bp, Homo sapiens
  source 1..10086: mol_type = unassigned DNA; mol_type = unassigned DNA
acacaaaaagccttacaaatggaagaactaaggtggtacttaaaaacagcaccttaggatctagttccatcctatcttttcccttaaatgccatgacaaaagttaaaacgggccctgtcccttctgaatgctgggcttctcatctaaatttaaataaaaacctttgaagatgggaatgtgttggaagaaaagaagggcagaaaaaaagtgtgttggaagagtctgtggagtcctgaggcttggcgctcaggaagtttgcaaagctgcagcagctgccttggagaagaccagcaaagaaagtggagtgtgtatgtgaacttcaattctgtattttctgtgaggtgggttaatggatttttagtaaaaagaaatctcaaacacagctgacctgaaagactggaatttcagctctcttccttcccggggttctttttcctcccccttcctctcaaagccctttaaaccagattgctgtgtcagtgactcttatcctgcccgccagttccaagggtttctaactttttgtcttggaaaggaaaaccactacctgattagaaaagcacttgggaagcccattaatcttgccggcgttgtcaggagtgatcagcgagttttattaaaagccctgggattgcctgaaaggcccccttgtctgactttgaaatgaaaggggcatgttaagatctcggggcacattgtcaggacccctcaccctgccccttggactatgagctgaccctccaggaggaagcacagaagccctcctttgttaaagggatttcgccggtggacagagaagagttgggccctgtcagcatgaactctctgagttggggggctgcgaatgccgtgctgctgctgctcctcctggcctgggccagccccaccttcatcagcatcaaccgcggggtgagggtgatgaagggccactctgccttcctgtcaggagatgacctgaagtttgccatccctaaagagaaagatgcctgcaaagtggaagttgtgatgaatgagccaataacccagagggttgggaaactcactccacaggtctttgactgccatttccttcccaacgaagtcaagtatgttcacaatggttgtccaattcttgatgaagacacagtgaagctcagactttacagatttactgaaagagataccttcatagaaacttttatcctgtgggtctatctcctggaaccagactgtaacatcatccatatgagtaacaatgtgctggaggtgcctgaattcaatggcttgtcccaagcgattgataaaaatctgctcagattcgattatgataggatggctagcctggaatgtaccgtcagcctggacactgcgagaactcggctgccagcccatggccagatggttctcggggagcctcgaccagaagaacctcgtggagatcagccacacagttttttcccagagtcccaactgagagcaaaactgaagtgtccaggtgggagctgtaccccaggattaaagaaaataggaagcctcaaagtgagctgtgaggagttcctgctgatgggccttcgttatcagcatctggatcccccttcacccaacattgattatatctccatccaactggacctcacagataccaggagcaaaattgtgtacaagtcagagagtgcgtggctgcctgtctatatcagagctggaattccgaatcagattccaaaggctgcattcatggccgtgtttattctggaagtggatcagttcatcctgacctccttgactacatcagttctggactgtgaagaagatgagacccctaaacccttgctggtgttcaacattactaaagccccgctccagggctatgtgactcacctgttggatcacaccagaccaatctcctcattcacctggaaagatctcagtgacatgcagatcgcctatcagccaccaaacagcagccattctgagaggagacatgatgaggtagaattggaggtatacgacttcttctttgaaaggagtgcacctatgacagtccacatctccatcagaacagcagatacaaatgccccccgtgtatcctggaatacaggtctgagtctccttgaggggcagtctcgagccatcacttgggaacagtttcaggttgtcgacaatgacgacattggtgctgtccggctagtcaccgttggtggcctgcagcatggatggctgactttaagaggggggaaagggtttctcttcaccgtggctgacctccaggctggagttgttcgctatcatcatgatgacagcgactccaccaaagacttcgtggtcttccggatatttgatggccatcacagcatccgtcacaaattccccatcaacgtcttgcccaaagatgatagtcccccgttcctcataaccaatgttgtgattgaactggaggaggggcagaccatcctgatccagggatccatgctgcgagcttcagatgtggacgccagtgatgactacatcttcttcaatatcacaaagcctccacaggctggggagatcatgaagaagccagggccaggactgataggctatcctgtccatggcttccttcagagggatttgtttaatggaatcatttattatcgtcattttggtggagaaatctttgaagattcttttcaatttgtcctgtgggacagccatgaacctccaaatctttcagtgccacaggtggcaacaatccatataactccagtggatgaccagcttccaaaagaggctcctggagtttctcggcatttggttgtcaaggaaactgaggtggcctatataactaagaaacagctacattttatagattcagaatcatatgacagggagctggtctacacaataactactcctccatttttctccttcagccacagacacttggatgctgggaaattatttatggtggacagcataccaaaagtagttaagaatcctacggccctggagctgaggtcattcactcagcatgctgtgaactatatgaaagtggcctacatgccccccatgcaagacattggtccccattgcagagatgtccagttcacattttctgtcagtaaccaacatggcggtactttgcatgggatctgctttaacattacaatcctcccagtggacaatcaagttcctgaggcgttcaccaaccctctgaaagtgactgagggaggtcaaagcatcatcagcacagagcacattctaatttctgatgcagataccaagctggacaatattgacctctccctgcgggaattgcctctgcacggaagggtggagctgaatggatttcctctaaattcagggggcacattttcttggggcgatctccataccttaaaagttaggtatcaacatgatggaactgaagttcttcaggatgacctactcttggaggtcaccgatggcacaaattcagcagaatttgtactacatgttgaggtattccctgtcaacgatgagccaccagtcttaaaggctgacctcatgcctgtcatgaattgctcagagggaggagaggtggtcatcacctctgaatacatttttgctactgatgtggacagcgataacttgaagttgatgtttgtgattgctcgcgaacctcagcatggggtggtgaggagagctggagtcacagtggatcagttctctcagagagatgttatctcagaggccgtgacatacaaacacacaggtggcgagattggcctgatgccttgttttgacaccattacattggtggtttcggatggagaggctggcccttttgtgaatggctgttgctacaatggacccaatccatctgttccacttcatgcgtcctttccagtgtatgatctcaacatcacggtatacccagtagacaaccagccaccttccattgcaataggtcccgtgtttgttgtagatgagggctgctcaacagcccttactgttaaccatttgtccgccactgaccctgacactgcagcagatgacttggaatttgttttggtttctcctcctcagtttggctacctcgaaaatatactcccttctgtgggttttgaaaaaagcaatattggcataagtatagattcatttcagtggaaagacatgaacgcttttcacattaactatgtgcagtccaggcatctgaggatagaaccaactgccgaccagttcacggtgtacgtcacagatgggaagcatcactccttggagataccattttctattataatcaaccccacaaatgatgaagctcctgactttgtagtgcagaatattactgtgtgtgagggtcagatgaaagagctggactcttccatcatcagcgctgtggacctggacattccccaggatgccctgctgttcagcatcactcaaaagccacgccatggcctcctcatcgatagggggtttagcaaagacttctctgagaataagcagccagccaaccctcaccagaaacatgcacctgttcacagcttttccatggaactcctcaagactggaatgaggttgacgtacatgcatgatgactcagagagccttgctgatgattttacaatccaattgtcagatgggaaacataagatacttaaaaccatttcagtagaggtcatcccagttaatgatgaaaaaccaatgctgagcaagaaggctgaaattgcaatgaatatgggtgaaactcgtattatttccagtgctattctttcagccatagatgaagactcacccagggagaagatttactatgtatttgaaaggcttccccaaaatgggcaacttcagcttaagatagggagggactgggttcctctctcccctggcatgaaatgcactcaggaggaagtggatctgaacttgctgagatacacacacaccggggcaatggattcccagaatcaagatagcttcaccttctacctttgggatggcaacaacaggtcccctgctcttgactgtcaaatcaccatcaaggacatggaaaaaggtgatattgtcatccttacaaaaccactcgtggtgtctaaaggtgatagaggtttcttaacaaccaccacgctcctggctgtggacggaacagacaagcctgaggaactgctctatgtcatcacctcccctccgcgatatggccagatcgaatatgttcactatcctggagttcccattacaaacttcagccaaatggatgtagtggggcagacagtttgctatgtacacaagagcaaggtgactgtctccagtgacagattcagattcatcatcagcaatggactgcggaccgagcacggggtgtttgagatcacactggagactgtggacagagccctgcctgtggtaaccaggaacaaggggttgagactggcccaaggggccgtgggcctgctttcccctgacctccttcagctgaccgaccctgatacacctgcggagaacctcaccttcctcttggttcagctcccccagcatggccagctctacctgtgggggacagggctacttcaacacaatttcacccagcaggatgtggacagcaagaatgtggcctatcggcactcaggaggggactcccagactgactgctttactttcatggccacagatgggacaaaccaaggctttattgtgaatgggagagtgtgggaagaacctgttttattcaccattcaggtagaccaattggacaaaacagctcctcgtatcacactcttgcattccccttctcaagtggggctcctgaaaaatggctgctacgggatttacatcacttcccgcgtgttgaaggcatcagaccctgacactgaggacgatcagatcatctttaaaattctacaaggcccaaaacatggacatctggagaacacaacaacaggtgaatttatccatgagaaatttagccaaaaggacttaaacagtaagactattctttacatcataaacccatctttggaagtaaattcagataccgtggaatttcaaatcatggaccccacagggaactcggccactcctcaaattttggaactgaagtggtctcatattgaatggtcacagaccgaatatgaagtctgtgagaatgtgggtttgttgcccttggaaattatcagaaggggatattccatggactcggcctttgtgggtataaaggtcaaccaagtgtcagctgcagttggaaaagatttcaccgtgattccatctaaactgattcagtttgacccaggaatgtcaactaagatgtggaatatagcaattacctatgacggattagaggaagatgatgaggtctttgaagtaattctgaactcccctgtgaatgcagttcttggcacaaagacaaaagctgcagtgaaaattttggactcaaaaggaggacaatgccatccttcatattcctccaaccaaagcaagcacagcacatgggagaagggcatttggcatctgctgcccccagggtcttcctcatccaccacttctggttcctttcatctggaaagaagacctcttccatcttccatgcagctagcagtcatcaggggagacaccctgcggggctttgattctacagatctttctcaaaggaagcttaggacccgtgggaatggcaaaacagttcgtccatcctctgtttatagaaatggaacagacatcatctataattatcatgggatagtttccttgaaactggaggatgacagtttcccaactcacaaaaggaaggccaaagtatccatcattagtcagccacaaaagacaatcaaagtggcagaactgcctcaagcagataaggtggaatccacaactgactcacacttccccagacaggaccagttgccctcatttccaaagaactgcactctggaattaaagggactcttccattttgaagaaggcatccagaagctgtatcagtgcaatgggatcgcctggaaagcctggagtccccaaaccaaggatgtggaagacaaatcctgtccagccgggtggcaccagcactcaggctactgtcacatcttgatcacagagcagaaaggcacctggaatgcggctgcccaagcttgcagggaacaatacctgggcaaccttgtaactgtattctccaggcagcacatgcggtggctctgggacattggtgggagaaagtccttttggataggtttgaacgaccaagtgcatgctggccactgggagtggatcggtggtgaacctgttgccttcaccaatgggagaagagggccctctcaacgctccaagcttggaaagagctgtgttttggttcaaagacaagggaaatggcaaacaaaagactgtaggagagccaaacctcataattatgtgtgttccagaaaactctaaatataacagaccctacagggggccacctggagtttgtcacctatttattcacaggatctgtgaatattgctccatagaaaacaaattgttatgattgagtgggtatacctttgtgattctgtctagtgaaaatgggacatttttaatagtgccagaaagattgataaataaatattttttacaagataagatacaatttttgtatctcaataccttttaaaataaatgccagcagtattataaagtgtaaggtttgtttattccagaagaccctcacccttaccccattccaaatctcagggagcaccagtctcatagtccttggatttttttaaaaaaaatttttggtcccgttacctctaatgaatttattctgaaatatgtatcgtaggtgctcctaccactttagtctgagtgaagctaactctactagttcattaaaccaaagttgaaccgcaaagttgtccctttggagccctttaaatgtgaaatctaagattagaggctggggttgaaaaagagaattttctatgatgaaaaagaaagactttagatgaaagaatcttgtaggtggaggctcatctacaaagctgtagttcaggtaagaattcggggggctggctgtactcagagttctactcatcactattcatgaaacagatctccctttccaatttgagtgttggcattgtaccatcccaaagctaatgattgggtttccccagccttacagagtcatgagaaatttcaagtaacataatctgttcctctgtgtttattgtactgacaagcatttctcagggacacttgggataaggagtatatatgaatgatggttgacacatggaagaaaaatactgcttcctcagaaatgtcctgatgaactgtgctgatgaacagagaaaaataataccgaaaacagagcccctgaaagcctacattctcggaaaggattttgaggaattttgagccaccttaaatctttaatatttgcagaaatgccatgttaactagattctctaacggaaaggtaccttattaatttataatctcaggtgagtggaacatttttgtaacaatgaagtatgttgcagcgttaccagaactcccttctgaaatcaaggtttaacagttataggaaattagaatgtctgaaacatttatttaaagtttttctcttttcataatcactgagaaatatggttgtgccaaatgtcacttgctctatgagcaccaatgtaacttcagaatcaaattggggttatcaagtaggctagagctctggtgctggttttattataaaaataccttgagtgttgtagacactaaaactgcttgaagaaagtcagttcagtttctgggatataaaaacatggcaagctttttttatttcagttcatttatcaaggttgtaattaatagaaacatttagaaagagatattggaatatgatccagacattctgtctattacttaaatctaaacataattatagtgtcagagggtccttacctgagatgtcgcaggtgggctccagattggcataatgtacaggttctctgtgagacacaagcagtttctggcatttaaccaaaagatgccacacctatcctcttaccagctcctttcaaattccttctggtccacaggcttcttgcagtatggaaatgtgagatttgggctaaagaaaaaatagttgtttacctaaagggttaagtcctaggaaggaagtagaagtttgggaaatgagggattcaagggccactccttccactggaactctaaaactatataaaccatctaaaactggaaatctagaactatgtcaactgtgtagaaccttgtcagcatggcagatttattatacatttctgcaatataaatgataaatgatactgaactaattgcaaatgttagcataaagagtgttttgatttttataacaattagaaatgctacaagaatatttaaaaatattcctgatcatgaaagcattaatcaaattagaaaatccaagtcattttaagaagataaaaatagaaattcaggcaagtttgggtgatgggcggtattcatcacaaccttcattttattcttacaattgagctttgactcagggggaaaagaagtaaatgattgtcaaggttccctctgccttgattgatagtttctgatgggagtgggaaggaaggaattggagtaatgggtagaatgggaatgagagattacgggagagagagatgagatgggttgaacagaagaggatgggaactgatggtagctaggaaggaaagcgtcaagaaggacctgaatgtacccagcttttctccccaaacttcaataccacctcaggaaaaggcccactgtgtccaggggcgtcagtccagctcaatagtgtctagcttttcagaatcttctgattgtttggtctttaacaaaaacatagcatctatttgctaacaataaacttaagcaacatatgataatcatttcatctccttccaagaagtggtgaaaatgaaccaggtgacattaatttaacttctgtttttgtttatttttaatacaaccaaaaagatatgcacatattttaatttacattatggtactgtataatttaaaccataaactggtgctgattaatttctgcaacaaagcagcatattaaatgtactacatctagtgttgtagcaaaattaataaacttgttttaagttctgagacactttc

SEQ ID NO: 7705 - DNA, 3067 bp, Homo sapiens
  source 1..3067: mol_type = unassigned DNA; mol_type = unassigned DNA
gtgatctgggaggtgctgagcacccacctgcgacccatggcgggggagggccgagtaacgacagcatggcggtgcccccgagagggaggggcatagaccccgcccggacaaaccctgacacgttccctccttcaggggcgcgatgtatggaacccagtcctgagaggcctgcatgcagtcagcaggagccgaccctgggaatggacgcgatggcctcggaacacagggatgtcctcgtgctgctgcccagccgggagcaactgcggctggccgtgggggtgaaggctactggccgcgagcttttccagcaagtgtgcaacgtggcgagcatcagagacgcgcagttctttggcctctgtgtggtcagaaacaatgagtatatatttatggatttggagcaaaagctcagcaagtacttctcaaaagattggaagaaagaaagaaatgaaggaaatgagaaacccagagcccccttcgtggccttcctccgagtgcagcactacgtggaaaacggaagggtcataagcgaccacagggcacggcacctgtactactgccacttgaaggagcgcgtgctgaggtcacagtgcgctcaccgggaggaagcctacttcctgctggctgcctgcgcgctgcaggctgacctgggcgagcaccgggagtcggcccatgccgggaggtacttcgagccacactcctacttcccacagtggatcatcaccaagagggggattgactacatcctccggcacatgcctaccctgcaccgtgagcgccagggcctgagccccaaggaggccatgctgtgcttcatccaggaggcctgccggctggaggacgtgcccgtgcacttcttcaggctgcacaaggataagaaggaaggtcgtcccaccgtgatcctgggactggccctcaggggagtgcacatctaccagggaaagaagctggagatccagctggatgggctgcccgcagcacagaagctggtttactacacggggtgcacctggcggtccaggcacctgctgcacctgctgcgcgccagccaccagctccacctccgcgtgcggcccactctgcaacagctgcggcagcgggaggaggcagaagagaagcagcactaccgggagtcctatatcagcgatgagctggagctggacctggccagcaggagcttcccgggcagtggggtcagcagccagcactgcccccactgcctctcacgccactccgccgacagccacggcagttcctacacgtcaggcatcaaggccaactcctggctcagggaatccagagagatgtctgtggacgtgcccttggaggtccacgggctccatgagaaggagccgtcctccagccccaggaccagccgcagccaccccagcacacgtggtgacagccaagccactcgtcaggagccctgcacccaggtcaggaccagaggccagagcgccgaggccgtgcaccagatccaggaaatgacagccggggtcagtgaggagcagcacagccatggcctggacgacatgcagctgcaccagctggccctgcacccagcgcccacctcactcagccataccttccaccgcgccctggactgcaggctggcaggcccctgcgagaccagggccactctccccagcaagaggtccagcaactgtctcgccctggacctgttcggagaggctccaccacaggagtttgtggtgtaggcaccacccacccagcagtaccgtccgcaccgccaggctcagcccctgcccaccccacttccacatggccctcgtcccttcctgcccgccagatgctgcctgcacttccgcagccagcacgctccacaggttcacctgtaagaggtgtggagctggctctgacatcaacctgggaggtaacaaacaggtcccgcacctcatgcctgtctgccatacacccgggagctctttccctcagggtctcagggagccagttcaaggtctggctgtcaagtgtccagagagccatggtgttggcccctgaggcagcctgtcacccatcctaatctgggagagaaggtgacacagctgggcccagaccctggagagacagctctgcagtttcccacactgtcagctccccaagagacagtcctgatgggcacaggctgccagagctcccaagccggagttcacagtcatcactgtgcaggacccaggttcctcccagacctgaacccctctctgcaactcctgtttgcaagcgctgggcctgccagacagaggcccctcttgtggtgcaagcccagctctgtcacctgagatccagccagagaccctcctccaccatccacagtcaatggctgtgctttcccttccaagccagggcttccaaagaccccactgccccggagctgaagccgactctgctcccatctcagccatgaggcctcaggacccactctgctcacaggtggcttccttaagccattgccctggctggggttgggctggtgcagcccagctggcggaggggcgaagctttggtgacagacggagagtgggggactagctgtgcatggcacctgctctgatccggtgggctccacgggtagtgcgacctcggttctgtgggctctggaaggccaccagggtagggtctccccagggctcctccccctgcacaacactcctgcacacgtgcaaacctgctgtcctctgcatttagaggaatggcccgtgcatccctgctagtctcaggcccatcccagagcactgagaggccacaatcgttcagccctgtgccctgaacaccactgcccccttcactgtctgtgtgtggtgaagaccacgccacaccaccctccagctcactggagacaagcatgagcttgagccccatggcctggtgcagggctgcgtgcattgaggccgcctctttgacgggtccatccagggggaccctctcctttctgtgaaagggaatcgtgtgtgtgccccaggcacgtgtaataaagaacccgagcagatgcctcctgcttgaaccaggaccagcctgcctggggggctggtgagatgccggctgtaactca

SEQ ID NO: 7706 - DNA, 2650 bp, Homo sapiens
  source 1..2650: mol_type = unassigned DNA; mol_type = unassigned DNA
gctgccttagagcttctagggtaacaaagacgtccctcaggaggatcctgagacttacttccagaacagagcttcagggcgaccacagggcacggcacctgtactactgccacttgaaggagcgcgtgctgaggtcacagtgcgctcaccgggaggaagcctacttcctgctggctgcctgcgcgctgcaggctgacctgggcgagcaccgggagtcggcccatgccgggaggtacttcgagccacactcctacttcccacagtggatcatcaccaagagggggattgactacatcctccggcacatgcctaccctgcaccgtgagcgccagggcctgagccccaaggaggccatgctgtgcttcatccaggaggcctgccggctggaggacgtgcccgtgcacttcttcaggctgcacaaggataagaaggaaggtcgtcccaccgtgatcctgggactggccctcaggggagtgcacatctaccaggaggtggaccgtgctccgcagctgctgtacgacctcccctggccccacgttgggaagctggcatttctgggaaagaagctggagatccagctggatgggctgcccgcagcacagaagctggtttactacacggggtgcacctggcggtccaggcacctgctgcacctgctgcgcgccagccaccagctccacctccgcgtgcggcccactctgcaacagctgcggcagcgggaggaggcagaagagaagcagcactaccgggagtcctatatcagcgatgagctggagctggacctggccagcaggagcttcccgggcagtggggtcagcagccagcactgcccccactgcctctcacgccactccgccgacagccacggcagttcctacacgtcaggcatcaaggccaactcctggctcagggaatccagagagatgtctgtggacgtgcccttggaggtccacgggctccatgagaaggagccgtcctccagccccaggaccagccgcagccaccccagcacacgtggtgacagccaagccactcgtcaggagccctgcacccaggtcaggaccagaggccagagcgccgaggccgtgcaccagatccaggaaatgacagccggggtcagtgaggagcagcacagccatggcctggacgacatgcagctgcaccagctggccctgcacccagcgcccacctcactcagccataccttccaccgcgccctggactgcaggctggcaggcccctgcgagaccagggccactctccccagcaagaggtccagcaactgtctcgccctggacctgttcggagaggctccaccacaggagtttgtggtgtaggcaccacccacccagcagtaccgtccgcaccgccaggctcagcccctgcccaccccacttccacatggccctcgtcccttcctgcccgccagatgctgcctgcacttccgcagccagcacgctccacaggttcacctgtaagaggtgtggagctggctctgacatcaacctgggaggtaacaaacaggtcccgcacctcatgcctgtctgccatacacccgggagctctttccctcagggtctcagggagccagttcaaggtctggctgtcaagtgtccagagagccatggtgttggcccctgaggcagcctgtcacccatcctaatctgggagagaaggtgacacagctgggcccagaccctggagagacagctctgcagtttcccacactgtcagctccccaagagacagtcctgatgggcacaggctgccagagctcccaagccggagttcacagtcatcactgtgcaggacccaggttcctcccagacctgaacccctctctgcaactcctgtttgcaagcgctgggcctgccagacagaggcccctcttgtggtgcaagcccagctctgtcacctgagatccagccagagaccctcctccaccatccacagtcaatggctgtgctttcccttccaagccagggcttccaaagaccccactgccccggagctgaagccgactctgctcccatctcagccatgaggcctcaggacccactctgctcacaggtggcttccttaagccattgccctggctggggttgggctggtgcagcccagctggcggaggggcgaagctttggtgacagacggagagtgggggactagctgtgcatggcacctgctctgatccggtgggctccacgggtagtgcgacctcggttctgtgggctctggaaggccaccagggtagggtctccccagggctcctccccctgcacaacactcctgcacacgtgcaaacctgctgtcctctgcatttagaggaatggcccgtgcatccctgctagtctcaggcccatcccagagcactgagaggccacaatcgttcagccctgtgccctgaacaccactgcccccttcactgtctgtgtgtggtgaagaccacgccacaccaccctccagctcactggagacaagcatgagcttgagccccatggcctggtgcagggctgcgtgcattgaggccgcctctttgacgggtccatccagggggaccctctcctttctgtgaaagggaatcgtgtgtgtgccccaggcacgtgtaataaagaacccgagcagatgcctcctgcttgaaccaggacca

SEQ ID NO: 7707 - DNA, 4677 bp, Homo sapiens
  source 1..4677: mol_type = unassigned DNA; mol_type = unassigned DNA
gtcccggaaagcacagctgtgatctgggaggtgctgagcacccacctgcgacccatggcgggggagggccgagggcgcgatgtatggaacccagtcctgagaggcctgcatgcagtcagcaggagccgaccctgggaatggacgcgatggcctcggaacacagggatgtcctcgtgctgctgcccagccgggagcaactgcggctggccgtgggggtgaaggctactggccgcgagcttttccagcaagtgtgcaacgtggcgagcatcagagacgcgcagttctttggcctctgtgtggtcagaaacaatgagtatatatttatggatttggagcaaaagctcagcaagtacttctcaaaagattggaagaaagaaagaaatgaaggaaatgagaaacccagagcccccttcgtggccttcctccgagtgcagcactacgtggaaaacggaagggtcataaggtaacggcatgcggactgtaaggggtgtttcctggaatactgaaaatctgccgcatgacgtggaagtcccctgaaggccacacattacatttgagtttatccaaaaacaaaaaacaaacaaacaaccccactatatcggctgtttgctttggggttaacacaggaattctatttaatcgaaaggtatacagactgtgtcataaattggtacttctttttcttttctttttctttttgttttgttttgttttgttttgagacggagtttcactcttgtcgcccaggctggagtgcaatggcacaatctcgactcactgcaacctccacctcctgggttcaagcgattcttctgccttagtctccagagtagctgggattacaggcgggcgccaccacacctggctaattttgtattttcagtagagacggggtttctctgtgttggtcaagctggtctcaaactcccgacctcaggtgatccacccgcctcgacctcccaaagtgctgggattacaggtgtgagccaccgtgcccggcctaaagtggtacttcctcaaatgccaggactcgtactctctagggtgggtataccatccgggggtgggcgaggcttctggaggtcgctgggctaagggctgctatgcttgctgcgtggcggttctcgctgttcactgcccactctgcaggtgtctagtgggaagctttccccgacaggagtgggtaagttgtacatctggtgggctgcactctaaaccaacgggggctgcttcttccagagctgccttagagcttctagggtaacaaagacgtccctcaggaggatcctgagacttacttccagaacagagcttcaggggtgcgtgaacagggtttaccctgggggaaaacctaagggggtttcccaggaattccctaagcaggcacaatccctgccagttccaaaaggcatgtgtgcggttgtgtggaaggttctagggggtgaggggcgtgtggttgtgtgggagggttctggagagtgaaaggtgtgtggttgtgtggagagccctggagacactggtatgtggttgtgtggcaggttctggagagtgaggggtgtgtgaatatgtggaaggttctggatagccttggaggggaggtctggaaagtgttgggttgatggatggagctacctggtgctatggggccagttcgggggaattatatgagaagatcttgcacctgcatcttgggcgagcctccacctggcctgtgattaatgaataccagccatggccaagccccgtgctgggcggtgagctctgggagccaggtctgtccacatccagggattcaagttgtccaggccctgtgcacctccagggattcgagtcgcccgggctctgtgcacctctcctgcactggggcttggtttggtgaaggccaagctcactggggaaggagtgggacctcggcaggtggagcctcatctagtggctccttggtggcagcaagtcacctgtgccccgctccaggaagagtgtgggcctgtgccgtgctggccctgcagggacacagctgtgggtataacaagacaggaactaggtaccaggggctcaggacagccctgggagctggtgtggggagggacaaggcagggccagaggggccagcagtccccacaccggtcgtcctggaactcactccctgccaccttccagcgaccacagggcacggcacctgtactactgccacttgaaggagcgcgtgctgaggtcacagtgcgctcaccgggaggaagcctacttcctgctggctgcctgcgcgctgcaggctgacctgggcgagcaccgggagtcggcccatgccgggagatcatcaccaagagggggattgactacatcctccggcacatgcctaccctgcaccgtgagcgccagggcctgagccccaaggaggccatgctgtgcttcatccaggaggcctgccggctggaggacgtgcccgtgcacttcttcaggctgcacaaggataagaaggaaggtcgtcccaccgtgatcctgggactggccctcaggggagtgcacatctaccaggaggtggaccgtgctccgcagctgctgtacgacctcccctggccccacgttgggaagctggcatttctgggaaagaagctggagatccagctggatgggctgcccgcagcacagaagctggtttactacacggggtgcacctggcggtccaggcacctgctgcacctgctgcgcgccagccaccagctccacctccgcgtgcggcccactctgcaacagctgcggcagcgggaggaggcagaagagaagcagcactaccgggagtcctatatcagcgatgagctggagctggacctggccagcaggagcttcccgggcagtggggtcagcagccagcactgcccccactgcctctcacgccactccgccgacagccacggcagttcctacacgtcaggcatcaaggccaactcctggctcagggaatccagagagatgtctgtggacgtgcccttggaggtccacgggctccatgagaaggagccgtcctccagccccaggaccagccgcagccaccccagcacacgtggtgacagccaagccactcgtcaggagccctgcacccaggtcaggaccagaggccagagcgccgaggccgtgcaccagatccaggaaatgacagccggggtcagtgaggagcagcacagccatggcctggacgacatgcagctgcaccagctggccctgcacccagcgcccacctcactcagccataccttccaccgcgccctggactgcaggctggcaggcccctgcgagaccagggccactctccccagcaagaggtccagcaactgtctcgccctggacctgttcggagaggctccaccacaggagtttgtggtgtaggcaccacccacccagcagtaccgtccgcaccgccaggctcagcccctgcccaccccacttccacatggccctcgtcccttcctgcccgccagatgctgcctgcacttccgcagccagcacgctccacaggttcacctgtaagaggtgtggagctggctctgacatcaacctgggaggtaacaaacaggtcccgcacctcatgcctgtctgccatacacccgggagctctttccctcagggtctcagggagccagttcaaggtctggctgtcaagtgtccagagagccatggtgttggcccctgaggcagcctgtcacccatcctaatctgggagagaaggtgacacagctgggcccagaccctggagagacagctctgcagtttcccacactgtcagctccccaagagacagtcctgatgggcacaggctgccagagctcccaagccggagttcacagtcatcactgtgcaggacccaggttcctcccagacctgaacccctctctgcaactcctgtttgcaagcgctgggcctgccagacagaggcccctcttgtggtgcaagcccagctctgtcacctgagatccagccagagaccctcctccaccatccacagtcaatggctgtgctttcccttccaagccagggcttccaaagaccccactgccccggagctgaagccgactctgctcccatctcagccatgaggcctcaggacccactctgctcacaggtggcttccttaagccattgccctggctggggttgggctggtgcagcccagctggcggaggggcgaagctttggtgacagacggagagtgggggactagctgtgcatggcacctgctctgatccggtgggctccacgggtagtgcgacctcggttctgtgggctctggaaggccaccagggtagggtctccccagggctcctccccctgcacaacactcctgcacacgtgcaaacctgctgtcctctgcatttagaggaatggcccgtgcatccctgctagtctcaggcccatcccagagcactgagaggccacaatcgttcagccctgtgccctgaacaccactgcccccttcactgtctgtgtgtggtgaagaccacgccacaccaccctccagctcactggagacaagcatgagcttgagccccatggcctggtgcagggctgcgtgcattgaggccgcctctttgacgggtccatccagggggaccctctcctttctgtgaaagggaatcgtgtgtgtgccccaggcacgtgtaataaagaacccgagcagatgcc

SEQ ID NO: 7708 - DNA, 2857 bp, Homo sapiens
  source 1..2857: mol_type = unassigned DNA; mol_type = unassigned DNA
ggaaatgtggacacgggacgccggaaacagggacacgcaccagacgctgggtgtttagaggctgccgtgagaggctcagctgtaggaacactgttgggatcactcgcatcagttgggcgatggatgatgtgaaggctactggccgcgagcttttccagcaagtgtgcaacgtggcgagcatcagagacgcgcagttctttggcctctgtgtggtcagaaacaatgagtatatatttatggatttggagcaaaagctcagcaagtacttctcaaaagattggaagaaagaaagaaatgaaggaaatgagaaacccagagcccccttcgtggccttcctccgagtgcagcactacgtggaaaacggaagggtcataagcgaccacagggcacggcacctgtactactgccacttgaaggagcgcgtgctgaggtcacagtgcgctcaccgggaggaagcctacttcctgctggctgcctgcgcgctgcaggctgacctgggcgagcaccgggagtcggcccatgccgggaggtacttcgagccacactcctacttcccacagtggatcatcaccaagagggggattgactacatcctccggcacatgcctaccctgcaccgtgagcgccagggcctgagccccaaggaggccatgctgtgcttcatccaggaggcctgccggctggaggacgtgcccgtgcacttcttcaggctgcacaaggataagaaggaaggtcgtcccaccgtgatcctgggactggccctcaggggagtgcacatctaccagggaaagaagctggagatccagctggatgggctgcccgcagcacagaagctggtttactacacggggtgcacctggcggtccaggcacctgctgcacctgctgcgcgccagccaccagctccacctccgcgtgcggcccactctgcaacagctgcggcagcgggaggaggcagaagagaagcagcactaccgggagtcctatatcagcgatgagctggagctggacctggccagcaggagcttcccgggcagtggggtcagcagccagcactgcccccactgcctctcacgccactccgccgacagccacggcagttcctacacgtcaggcatcaaggccaactcctggctcagggaatccagagagatgtctgtggacgtgcccttggaggtccacgggctccatgagaaggagccgtcctccagccccaggaccagccgcagccaccccagcacacgtggtgacagccaagccactcgtcaggagccctgcacccaggtcaggaccagaggccagagcgccgaggccgtgcaccagatccaggaaatgacagccggggtcagtgaggagcagcacagccatggcctggacgacatgcagctgcaccagctggccctgcacccagcgcccacctcactcagccataccttccaccgcgccctggactgcaggctggcaggcccctgcgagaccagggccactctccccagcaagaggtccagcaactgtctcgccctggacctgttcggagaggctccaccacaggagtttgtggtgtaggcaccacccacccagcagtaccgtccgcaccgccaggctcagcccctgcccaccccacttccacatggccctcgtcccttcctgcccgccagatgctgcctgcacttccgcagccagcacgctccacaggttcacctgtaagaggtgtggagctggctctgacatcaacctgggaggtaacaaacaggtcccgcacctcatgcctgtctgccatacacccgggagctctttccctcagggtctcagggagccagttcaaggtctggctgtcaagtgtccagagagccatggtgttggcccctgaggcagcctgtcacccatcctaatctgggagagaaggtgacacagctgggcccagaccctggagagacagctctgcagtttcccacactgtcagctccccaagagacagtcctgatgggcacaggctgccagagctcccaagccggagttcacagtcatcactgtgcaggacccaggttcctcccagacctgaacccctctctgcaactcctgtttgcaagcgctgggcctgccagacagaggcccctcttgtggtgcaagcccagctctgtcacctgagatccagccagagaccctcctccaccatccacagtcaatggctgtgctttcccttccaagccagggcttccaaagaccccactgccccggagctgaagccgactctgctcccatctcagccatgaggcctcaggacccactctgctcacaggtggcttccttaagccattgccctggctggggttgggctggtgcagcccagctggcggaggggcgaagctttggtgacagacggagagtgggggactagctgtgcatggcacctgctctgatccggtgggctccacgggtagtgcgacctcggttctgtgggctctggaaggccaccagggtagggtctccccagggctcctccccctgcacaacactcctgcacacgtgcaaacctgctgtcctctgcatttagaggaatggcccgtgcatccctgctagtctcaggcccatcccagagcactgagaggccacaatcgttcagccctgtgccctgaacaccactgcccccttcactgtctgtgtgtggtgaagaccacgccacaccaccctccagctcactggagacaagcatgagcttgagccccatggcctggtgcagggctgcgtgcattgaggccgcctctttgacgggtccatccagggggaccctctcctttctgtgaaagggaatcgtgtgtgtgccccaggcacgtgtaataaagaacccgagcagatgc

SEQ ID NO: 7709 - DNA, 3821 bp, Homo sapiens
  source 1..3821: mol_type = unassigned DNA; mol_type = unassigned DNA
agccgtccagaagaagagagagttgggccgaggaggactccagggctcagccatgaggagatctgggcggtggtctcctcttcctcgcggcctctgcccgtccactgcccggccctgacatcacgaacgtggcaggccagcctcttccatcacgaacaggccagtcgagaagacaagacattcagaggggcgcgatgtatggaacccagtcctgagaggcctgcatgcagtcagcaggagccgaccctgggaatggacgcgatggcctcggaacacagggatgtcctcgtgctgctgcccagccgggagcaactgcggctggccgtgggggtgaaggctactggccgcgagcttttccagcaagtgtgcaacgtggcgagcatcagagacgcgcagttctttggcctctgtgtggtcagaaacaatgagtatatatttatggatttggagcaaaagctcagcaagtacttctcaaaagattggaagaaagaaagaaatgaactgctccgtccagaggggctgtccgcagggggactgtggtgagccctgaggctgcaagcaggtgtgcccgcccgaagcccgcctttgcagatgttcttgaacgctgtagaccacgtcccactcagggttctccgggtagaaaataccatgagtcgaattgtcagctatggctgcagacacctgagcttcgactttaagctgagtgtgaagcaatccaggcccccccaactgggaagacaggacagccagcggcacctccctgcggctcacttgctctttcttgcattttccccactagggaaatgagaaacccagagcccccttcgtggccttcctccgagtgcagcactacgtggaaaacggaagggtcataagtagagacggggtttctctgtgttggtcaagctggtctcaaactcccgacctcaggtgatccacccgcctcgacctcccaaagtgctgggattacagagctgccttagagcttctagggtaacaaagacgtccctcaggaggatcctgagacttacttccagaacagagcttcagggcgaccacagggcacggcacctgtactactgccacttgaaggagcgcgtgctgaggtcacagtgcgctcaccgggaggaagcctacttcctgctggctgcctgcgcgctgcaggctgacctgggcgagcaccgggagtcggcccatgccgggaggtacttcgagccacactcctacttcccacagtggatcatcaccaagagggggattgactacatcctccggcacatgcctaccctgcaccgtgagcgccagggcctgagccccaaggaggccatgctgtgcttcatccaggaggcctgccggctggaggacgtgcccgtgcacttcttcaggctgcacaaggataagaaggaaggtcgtcccaccgtgatcctgggactggccctcaggggagtgcacatctaccaggaggtggaccgtgctccgcagctgctgtacgacctcccctggccccacgttgggaagctggcatttctgggaaagaagctggagatccagctggatgggctgcccgcagcacagaagctggtttactacacggggtgcacctggcggtccaggcacctgctgcacctgctgcgcgccagccaccagctccacctccgcgtgcggcccactctgcaacagctgcggcagcgggaggaggcagaagagaagcagcactaccgggagtcctatatcagcgatgagctggagctggacctggccagcaggagcttcccgggcagtggggtcagcagccagcactgcccccactgcctctcacgccactccgccgacagccacggcagttcctacacgtcaggcatcaaggccaactcctggctcagggaatccagagagatgtctgtggacgtgcccttggaggtccacgggctccatgagaaggagccgtcctccagccccaggaccagccgcagccaccccagcacacgtggtgacagccaagccactcgtcaggagccctgcacccaggtcaggaccagaggccagagcgccgaggccgtgcaccagtttcctcccgtataaaataggaggccgttcttgaccactgaggtgcttccagagctagtgttcaaggcccacactcagacctgatcctaaattacaccaaacgctaagagtccaggtccactgagttaaaaggcagaaagcagccccaggaaagaagctgggcaaggtgggggcctcctgaaatgcatcaaaggaagatgccaagcctctctcgcagagatccaggaaatgacagccggggtcagtgaggagcagcacagccatggcctggacgacatgcagctgcaccagctggccctgcacccagcgcccacctcactcagccataccttccaccgcgccctggactgcaggctggcaggcccctgcgagaccagggccactctccccagcaagaggtccagcaactgtctcgccctggacctgttcggagaggctccaccacaggagtttgtggtgtaggcaccacccacccagcagtaccgtccgcaccgccaggctcagcccctgcccaccccacttccacatggccctcgtcccttcctgcccgccagatgctgcctgcacttccgcagccagcacgctccacaggttcacctgtaagaggtgtggagctggctctgacatcaacctgggaggtaacaaacaggtcccgcacctcatgcctgtctgccatacacccgggagctctttccctcagggtctcagggagccagttcaaggtctggctgtcaagtgtccagagagccatggtgttggcccctgaggcagcctgtcacccatcctaatctgggagagaaggtgacacagctgggcccagaccctggagagacagctctgcagtttcccacactgtcagctccccaagagacagtcctgatgggcacaggctgccagagctcccaagccggagttcacagtcatcactgtgcaggacccaggttcctcccagacctgaacccctctctgcaactcctgtttgcaagcgctgggcctgccagacagaggcccctcttgtggtgcaagcccagctctgtcacctgagatccagccagagaccctcctccaccatccacagtcaatggctgtgctttcccttccaagccagggcttccaaagaccccactgccccggagctgaagccgactctgctcccatctcagccatgaggcctcaggacccactctgctcacaggtggcttccttaagccattgccctggctggggttgggctggtgcagcccagctggcggaggggcgaagctttggtgacagacggagagtgggggactagctgtgcatggcacctgctctgatccggtgggctccacgggtagtgcgacctcggttctgtgggctctggaaggccaccagggtagggtctccccagggctcctccccctgcacaacactcctgcacacgtgcaaacctgctgtcctctgcatttagaggaatggcccgtgcatccctgctagtctcaggcccatcccagagcactgagaggccacaatcgttcagccctgtgccctgaacaccactgcccccttcactgtctgtgtgtggtgaagaccacgccacaccaccctccagctcactggagacaagcatgagcttgagccccatggcctggtgcagggctgcgtgcattgaggccgcctctttgacgggtccatccagggggaccctctcctttctgtgaaagggaatcgtgtgtgtgccccaggcacgtgtaataaagaacccgagcagatgc

SEQ ID NO: 7710 - DNA, 2108 bp, Homo sapiens
  source 1..2108: mol_type = unassigned DNA; mol_type = unassigned DNA
agccgtccagaagaagagagagttgggccgaggaggactccagggctcagccatgaggagatctgggcggtggtctcctcttcctcgcggcctctgcccgtccactgcccggccctgacatcacgaacgtggcaggccagcctcttccatcacgaacaggccagtcgagaagacaagacattcagaggggcgcgatgtatggaacccagtcctgagaggcctgcatgcagtcagcaggagccgaccctgggaatggacgcgatggcctcggaacacagggatgtcctcgtgctgctgcccagccgggagcaactgcggctggccgtgggggtgaaggctactggccgcgagcttttccagcaagtgtgcaacgtggcgagcatcagagacgcgcagttctttggcctctgtgtggtcagaaacaatgagtatatatttatggatttggagcaaaagctcagcaagtacttctcaaaagattggaagaaagaaagaaatgaactgctccgtccagaggggctgtccgcagggggactgtggtgagccctgaggctgcaagcagggaaatgagaaacccagagcccccttcgtggccttcctccgagtgcagcactacgtggaaaacggaagggtcataagcgaccacagggcacggcacctgtactactgccacttgaaggagcgcgtgctgaggtcacagtgcgctcaccgggaggaagcctacttcctgctggctgcctgcgcgctgcaggctgacctgggcgagcaccgggagtcggcccatgccgggaggtacttcgagccacactcctacttcccacagtggatcatcaccaagagggggattgactacatcctccggcacatgcctaccctgcaccgtgagcgccagggcctgagccccaaggaggccatgctgtgcttcatccaggaggcctgccggctggaggacgtgcccgtgcacttcttcaggctgcacaaggataagaaggaaggtcgtcccaccgtgatcctgggactggccctcaggggagtgcacatctaccagggaaagaagctggagatccagctggatgggctgcccgcagcacagaagctggtttactacacggggtgcacctggcggtccaggcacctgctgcacctgctgcgcgccagccaccagctccacctccgcgtgcggcccactctgcaacagctgcggcagcgggaggaggcagaagagaagcagcactaccgggagtcctatatcagcgatgagctggagctggacctggccagcaggagcttcccgggcagtggggtcagcagccagcactgcccccactgcctctcacgccactccgccgacagccacggcagttcctacacgtcaggcatcaaggccaactcctggctcagggaatccagagagatgtctgtggacgtgcccttggaggtccacgggctccatgagaaggagccgtcctccagccccaggaccagccgcagccaccccagcacacgtggtgacagccaagccactcgtcaggagccctgcacccaggtcaggaccagaggccagagcgccgaggccgtgcaccagatccaggaaatgacagccggggtcagtgaggagcagcacagccatggcctggacgacatgcagctgcaccagctggccctgcacccagcgcccacctcactcagccataccttccaccgcgccctggactgcaggctggcaggcccctgcgagaccagggccactctccccagcaagaggtccagcaactgtctcgccctggacctgttcggagaggctccaccacaggagtttgtggtgtaggcaccacccacccagcagtaccgtccgcaccgccaggctcagcccctgcccaccccacttccacatggccctcgtcccttcctgcccgccagatgctgcctgcacttccgcagccagcacgctccacaggttcacctgtaagaggtgtggagctggctctgacatcaacctgggaggtaacaaacaggtcccgcacctcatgcctgtctgccatacacccgggagctctttccctcagggtctcagggagccagttcaaggtctggctgtcaagtgtcca

SEQ ID NO: 7711 - DNA, 1600 bp, Homo sapiens
  source 1..1600: mol_type = unassigned DNA; mol_type = unassigned DNA
acactcagttttgaacacacggtgacacctgagaagcatggtgactgctctgatgaagccttttgttttgctttcagacaatgagtatatatttatggatttggagcaaaagctcagcaagtacttctcaaaagattggaagaaagaaagaaatgaaggaaatgagaaacccagagcccccttcgtggccttcctccgagtgcagcactacgtggaaaacggaagggtcataagcgaccacagggcacggcacctgtactactgccacttgaaggagcgcgtgctgaggtcacagtgcgctcaccgggaggaagcctacttcctgctggctgcctgcgcgctgcaggctgacctgggcgagcaccgggagtcggcccatgccgggaggtacttcgagccacactcctacttcccacagtggatcatcaccaagagggggattgactacatcctccggcacatgcctaccctgcaccgtgagcgccagggcctgagccccaaggaggccatgctgtgcttcatccaggaggcctgccggctggaggacgtgcccgtgcacttcttcaggctgcacaaggataagaaggaaggtcgtcccaccgtgatcctgggactggccctcaggggagtgcacatctaccaggaggtggaccgtgctccgcagctgctgtacgacctcccctggccccacgttgggaagctggcatttctgggaaagaagctggagatccagctggatgggctgcccgcagcacagaagctggtttactacacggggtgcacctggcggtccaggcacctgctgcacctgctgcgcgccagccaccagctccacctccgcgtgcggcccactctgcaacagctgcggcagcgggaggaggcagaagagaagcagcactaccgggagtcctatatcagcgatgagctggagctggacctggccagcaggagcttcccgggcagtggggtcagcagccagcactgcccccactgcctctcacgccactccgccgacagccacggcagttcctacacgtcaggcatcaaggccaactcctggctcagggaatccagagagatgtctgtggacgtgcccttggaggtccacgggctccatgagaaggagccgtcctccagccccaggaccagccgcagccaccccagcacacgtggtgacagccaagccactcgtcaggagccctgcacccaggtcaggaccagaggccagagcgccgaggccgtgcaccagatccaggaaatgacagccggggtcagtgaggagcagcacagccatggcctggacgacatgcagctgcaccagctggccctgcacccagcgcccacctcactcagccataccttccaccgcgccctggactgcaggctggcaggcccctgcgagaccagggccactctccccagcaagaggtccagcaactgtctcgccctggacctgttcggagaggctccaccacaggagtttgtggtgtaggcaccacccacccagcagtaccgtccgcaccgccaggctcagcccctgcccaccccacttccacatggccctcgtcccttcctgcccgccagatgctgcctgcacttc

SEQ ID NO: 7712 - DNA, 556 bp, Homo sapiens
  source 1..556: mol_type = unassigned DNA; mol_type = unassigned DNA
ttttgaacacacggtgacacctgagaagcatggtgactgctctgatgaagccttttgttttgctttcagacaatgagtatatatttatggatttggagcaaaagctcagcaagtacttctcaaaagattggaagaaagaaagaaatgaactgctccgtccagaggggctgtccgcagggggactgtggtgagccctgaggctgcaagcagggaaatgagaaacccagagcccccttcgtggccttcctccgagtgcagcactacgtggaaaacggaagggtcataagcgaccacagggcacggcacctgtactactgccacttgaaggagcgcgtgctgaggtcacagtgcgctcaccgggaggaagcctacttcctgctggctgcctgcgcgctgcaggctgacctgggcgagcaccgggagtcggcccatgccgggaggtacttcgagccacactcctacttcccacagtggatcatcaccaagagggggattgactacatcctccggcacatgcctaccctgcaccgtgagcgccagggcctgagccccaagg

SEQ ID NO: 7713 - DNA, 606 bp, Homo sapiens
  source 1..606: mol_type = unassigned DNA; mol_type = unassigned DNA
atctatctcatgatagaggatggaaaccagccgtccagaagaagagagagttgggccgaggaggactccagggctcagccatgaggagatctgggcggtggtctcctcttcctcgcggcctctgcccgtccactgcccggccctgacatcacgaacgtggcaggccagcctcttccatcacgaacaggccagtcgagaagacaagacattcagaggggcgcgatgtatggaacccagtcctgagaggcctgcatgcagtcagcaggagccgaccctgggaatggacgcgatggcctcggaacacagggatgtcctcgtgctgctgcccagccgggagcaactgcggctggccgtgggggtgaaggctactggccgcgagcttttccagcaagtgtgcaacgtggcgagcatcagagacgcgcagttctttggcctctgtgtggtcagaaacaatgagtatatatttatggatttggagcaaaagctcagcaagtacttctcaaaagattggaagaaagaaagaaatgaaggaaatgagaaacccagagcccccttcgtggccttcctccgagtgcagcactacgtggaaaacggaagggtcataag

SEQ ID NO: 7714 - DNA, 964 bp, Homo sapiens
  source 1..964: mol_type = unassigned DNA; mol_type = unassigned DNA
tgagttatttctgttggccgcattaggaacctgacatttgattcattcagtgggtcctgcctaggtcctttaaaacagaatggactgttagggaaaggctgccctgggccatgcaggccgaggagaccaaggggattggaataaccagtatggcaaaatgcttggtcaagatccagactcgacgaagcctccaattgcacatggtgaaccactgcaacagtaatgtgtttgttcgtctgctgagactcggctccaaggtcacagctcgtaacactggtgttccattgcctaaagaggagaacatttctgctcccttgatctccagctccccagtgaaggcagcccgggagtatgaagatccccctagtgaagaggaagataaaataaaagaagaacctttaaccatctctgaactagtgtacaacccaagtgccagcctgctccccacccctgtggatgacgatgagattgacatgctctttgactgtccttctaggcttgagttggaaagagaagacacagattcatttgaggatctggaagcagatgaaaacgcctttttgattgctgaagaagaggagctgaaggaggctcgccgtgctttgtcgtggagctatgacattctgactggccatattcgggtgaacccactggtcaagagtttttccaggctccttgtggtgggcctgggactgctgctctttgtatttcccctgctcctcctccttttggagtcagtctccatgcagtaaacagacccagcagaacctgcccgtggtgagctcagccaagacttggctctccatgttccagcctccgtctgtgactgggtgggtaagttcggtgggccccacccagtgggctcggcagccgtcacttcacagaagaagaaaggaaccttgcttaggcctcagatcccagctgtgctctccaatccattaataaagctgcttttaaccctctc

SEQ ID NO: 7715 - DNA, 1397 bp, Homo sapiens
  source 1..1397: mol_type = unassigned DNA; mol_type = unassigned DNA
gcttcatttcggaagtgattcatagcacttctgcttacaactctctgatcaggactcatcccaagatcttacccaggatcaaggaaatgcaattctatggtgttcagaagggggcagagcccaccagttgctgaatttaacttgctcctgaaagctcacactttggaaacctacggggtggatcctcacccatgcaaggattcaacaggcacaacaacatttttaggattcacagctgcaggctttgtggtctttcagggaaataagagaatccatttgataaaatggccagatgtctgcaaattgaagtttgaagggaagacattttatgtgattggcacccagaaggagaaaaaagccatgttggcattccatacttcaacaccagctgcctgcaaacatctttggaagtgtggagtggaaaaccaggccttttataagtatgcaaaatccagtcagatcaagactgtatcaagcagcaagatattttttaaaggaagtagatttcgatatagtgggaaagttgccaaagaggtggtggaggccagttccaagatccagagggagcctcctgaggtgcacagagccaacattactcagagccgcagttcccactccttgaacaaacagctcatcattaacatggaacccctgcagcccctgcttccttcccccagcgagcaagaagaagaacttcctctgggtgagggtgttccattgcctaaagaggagaacatttctgctcccttgatctccagctccccagtgaaggcagcccgggagtatgaagatccccctagtgaagaggaagataaaataaaagaagaacctttaaccatctctgaactagtgtacaacccaagtgccagcctgctccccacccctgtggatgacgatgagattgacatgctctttgactgtccttctaggcttgagttggaaagagaagacacagattcatttgaggatctggaagcagatgaaaacgcctttttgattgctgaagaagaggagctgaaggaggctcgccgtgctttgtcgtggagctatgacattctgactggccatattcgggtgaacccactggtcaagagtttttccaggctccttgtggtgggcctgggactgctgctctttgtatttcccctgctcctcctccttttggagtcagtctccatgcagtaaacagacccagcagaacctgcccgtggtgagctcagccaagacttggctctccatgttccagcctccgtctgtgactgggtgggtaagttcggtgggccccacccagtgggctcggcagccgtcacttcacagaagaagaaaggaaccttgcttaggcctcagatcccagctgtgctctccaatccattaataaagctgcttttaaccctctc

SEQ ID NO: 7716 - DNA, 2198 bp, Homo sapiens
  source 1..2198: mol_type = unassigned DNA; mol_type = unassigned DNA
cgcgagcccgccgggggtctcaggctctgggcgtcctcggcgagcgagcccgggcagagggaggcgcacgagcgcgcgcgacagaaggaggcggggaaaggagggggcgaggcggaggcgagcgaacagagggagggacccgcccgccgcgccccggccgctgggcatgtgtgtccgcaggcgcccgacgctgccgatgtcccggggctgagccgcgcccaggtgtcccggacagtgcgtgcgagcgtgtgtgtccgcgcaggcgagcaccgcgccggccctgagcctcccgctcgctccccacggccgcggtgcatgttcgcctcctgccactgtgtgccgagaggcaggaggaccatgaaaatgatccactttcggagctccagcgtcaaatcgctcagccaggagatgagatgcaccatccggctgctggacgactcggagatctcctgccacatccagagggaaaccaaagggcagtttctcattgaccacatctgcaactactacagcctgctggagaaggactactttggcattcgctatgtggacccagagaagcaaaggcactggcttgaacctaacaagtccatcttcaagcaaatgaaaactcatccaccatacaccatgtgctttagagtgaaattctacccacatgaacccttgaagattaaagaagagctcacaagataccttttataccttcagattaaaagggacatttttcatggccgcctgctgtgctccttttctgatgctgcctacctgggtgcctgtattgttcaagctgagcttggtgattacgatcctgatgagcatcctgagaattacatcagtgagtttgagattttccccaagcagtcacagaagctggaaagaaaaatagtggaaattcataaaaatgaactcagggggcagagcccaccagttgctgaatttaacttgctcctgaaagctcacactttggaaacctacggggtggatcctcacccatgcaaggattcaacaggcacaacaacatttttaggattcacagctgcaggctttgtggtctttcagggaaataagagaatccatttgataaaatggccagatgtctgcaaattgaagtttgaagggaagacattttatgtgattggcacccagaaggagaaaaaagccatgttggcattccatacttcaacaccagctgcctgcaaacatctttggaagtgtggagtggaaaaccaggccttttataagtatgcaaaatccagtcagatcaagactgtatcaagcagcaagatattttttaaaggaagtagatttcgatatagtgggaaagttgccaaagaggtggtggaggccagttccaagatccagagggagcctcctgaggtgcacagagccaacattactcagagccgcagttcccactccttgaacaaacagctcatcattaacatggaacccctgcagcccctgcttccttcccccagcgagcaagaagaagaacttcctctgggtgagggtgttccattgcctaaagaggagaacatttctgctcccttgatctccagctccccagtgaaggcagcccgggagtatgaagatccccctagtgaagaggaagataaaataaaagaagaacctttaaccatctctgaactagtgtacaacccaagtgccagcctgctccccacccctgtggatgacgatgagattgacatgctctttgactgtccttctaggcttgagttggaaagagaagacacagattcatttgaggatctggaagcagatgaaaacgcctttttgattgctgaagaagaggagctgaaggaggctcgccgtgctttgtcgtggagctatgacattctgactggccatattcgggtgaacccactggtcaagagtttttccaggctccttgtggtgggcctgggactgctgctctttgtatttcccctgctcctcctccttttggagtcagtctccatgcagtaaacagacccagcagaacctgcccgtggtgagctcagccaagacttggctctccatgttccagcctccgtctgtgactgggtgggtaagttcggtgggccccacccagtgggctcggcagccgtcacttcacagaagaagaaaggaaccttgcttaggcctcagatcccagctgtgctctccaatccattaataaagctgcttttaaccctctc

SEQ ID NO: 7717 - DNA, 5297 bp, Homo sapiens
  source 1..5297: mol_type = unassigned DNA; mol_type = unassigned DNA
gaggcggaggcgagcgaacagagggagggacccgcccgccgcgccccggccgctgggcatgtgtgtccgcaggcgcccgacgctgccgatgtcccggggctgagccgcgcccaggtgtcccggacagtgcgtgcgagcgtgtgtgtccgcgcaggcgagcaccgcgccggccctgagcctcccgctcgctccccacggccgcggtgcatgttcgcctcctgccactgtgtgccgagaggcaggaggaccatgaaaatgatccactttcggagctccagcgtcaaatcgctcagccaggagatgagatgcaccatccggctgctggacgactcggagatctcctgccacatccagagggaaaccaaagggcagtttctcattgaccacatctgcaactactacagcctgctggagaaggactactttggcattcgctatgtggacccagagaagcaaaggcactggcttgaacctaacaagtccatcttcaagcaaatgaaaactcatccaccatacaccatgtgctttagagtgaaattctacccacatgaacccttgaagattaaagaagagctcacaagataccttttataccttcagattaaaagggacatttttcatggccgcctgctgtgctccttttctgatgctgcctacctgggtgcctgtattgttcaagctgagcttggtgattacgatcctgatgagcatcctgagaattacatcagtgagtttgagattttccccaagcagtcacagaagctggaaagaaaaatagtggaaattcataaaaatgaactcagggggcagagcccaccagttgctgaatttaacttgctcctgaaagctcacactttggaaacctacggggtggatcctcacccatgcaaggattcaacaggcacaacaacatttttaggattcacagctgcaggctttgtggtctttcagggaaataagagaatccatttgataaaatggccagatgtctgcaaattgaagtttgaagggaagacattttatgtgattggcacccagaaggagaaaaaagccatgttggcattccatacttcaacaccagctgcctgcaaacatctttggaagtgtggagtggaaaaccaggccttttataagtatgcaaaatccagtcagatcaagactgtatcaagcagcaagatattttttaaaggaagtagatttcgatatagtgggaaagttgccaaagaggtggtggaggccagttccaagatccagagggagcctcctgaggtgcacagagccaacattactcagagccgcagttcccactccttgaacaaacagctcatcattaacatggaacccctgcagcccctgcttccttcccccagcgagcaagaagaagaacttcctctgggtgagggtgttccattgcctaaagaggagaacatttctgctcccttgatctccagctccccagtgaaggcagcccgggagtatgaagatccccctagtgaagaggaagataaaataaaagaagaacctttaaccatctctgaactagtgtacaacccaagtgccagcctgctccccacccctgtggatgacgatgagattgacatgctctttgactgtccttctaggcttgagttggaaagagaagacacagattcatttgaggatctggaagcagatgaaaacgcctttttgattgctgaagaagaggagctgaaggaggctcgccgtgctttgtcgtggagctatgacattctgactggccatattcgggtgaacccactggtcaagagtttttccaggctccttgtggtgggcctgggactgctgctctttgtatttcccctgctcctcctccttttggagtcaggtattgatctctccttcttatgcgaaatccgccagacaccagagtttgagcagtttcactatgaatactactgtcccctcaaggagtgggtggctgggaaagtccacctcatcctctacatgctgggttgctcatgaagttaatctctcacgtgactaagggctatattcaatgctagtgatttctttttttcagcaaatgcctggttctgaagggtcacggggctgtcaacaggtgttccttactcataattgattattcaaacctttaagttagctttccataattcactgcacttaaataagtttaaatcaaatacagttattttagttacaggttaggaagatggtctttaaataaccaaaaatatgtttattttttattatagtgtagacatacccttcatctattatatcataatacatgttacattggactgaattagattttcccatttctaatagttggcaccattataagctataaggttcagaatcagaattttagtaacaactcaagagaaagttgttgaatataatccttagtgaaaacagtgtcctctaaccaatgcctatacaactaaatttatgctgggtttttggttctgtttttttaaaaatatttttatgtgttcaaactattttggtaaatttttagcaaaaaaaaaaaagaagcctcctggagttatttacatgtacagattgtaagactaatgcacaaaaggtatatcagaatttttttaatgttttggcgctactttgtttttaaaaatatttttggctgaacaataccataatttgttatgatctgcataggagatagaaaatgggtagaaagacactatagtaagtaagctgctaaaacagaggatggaactggaggatgtagaaactgagagcatcaagtggactcagggtggtccatttttcaaagtatttggacaagaggacttgttattttcatttgtattctgtccgtatattttggctggagaagcagatgttttaaaaagaaagtgagagtttaaaggaaaaaaggtaacagatgtgctagtcagttgcatatcaatgtacattaacccaagagtgaaggcagataggaactggagaaatggaaagtggcaaaaatgagttctggtgaggctggcaggcaaatggtgacaggcgaatggtctattttatgaaagtgatggtgatgccagcgttcgatgatgtgaagagcagtgcagtcgctgtctgagttaacatgaacatgtttaagtggatctaaataaaagtggagaaactttaaggtaaatattttgatccctcatgccatttgttgtgattctgtagaagaaacttcaaaaatgtgtttgtatgtgagtgtgcgtgtgtgtgtgtgtgagagagagagagagagagagagagagaatatgaatggctttttgatacatgtccatgatcatgttttgcggtggtcattatactcctttcctttcccagttgttttaaaatttgacttccatagagaaactggagaggcctcatgagatgacataccagttcagcctgggtaaagtagtgacatgaccctaaccagactgtagaggggaccagtgctctagtaccttccttgataccattaaatccatgatggaaaggatttaatccaacaatttaatggtatcaaggaaggtactagagcattgtaccatcagcaacgtactgatgccttcccatgcagactacctgctgatactgtgttatgtgggagaaagataagagtctagaacttatgccatggagcatagagcttctctgtggattgaaaacattccactgccctaatgtacaaagttacagggcccacttggaatcgctctctctagctaatgacattccaaccctatcattagcatgatttctaaattgggcaatacatttccactcactcagtggagctctgagtacttcactggacatttaattttggaaatgagttttgaaactcagttcgtgaagcctgcagtcgagcaaatgactatatatttgccattaagtttgaggggtttcctttcctatatgctttcagtgatttattttgctttttaaataaagattgtttgtttattacctgaaagttgatactgatttaggaatatattttctgtgattggaatcctcaacaatttattttggaagcttgcagatggctaggtttgaaattgaaatttgtgtttttctccttcttttctcatacgacttctaagtcatcctttctgacataaggcaactttagtgtagtctgcacaaaattagtccccttctgatcatgcgtcatataattttctctaaagttctgactatgacaaatcatctggccctcagtctttcaaaataatattatataatattttttaaattatggaactaatatattttccattgtaaaatacttaaaaaatatgatagtataaatatcacatgtaatccaacgatgcagatttatcttaaggagtaataaatatattattttaacatttccagctaacatctcttttctcttaggtggaaacttcattgttgaatagaaatgtttttaagtgaagaagttgacagaatagggtctgctgaatttaaacagccatcaaaagttaaactggaatcttgaaatgccatttgctcggcatagaatcagagccttttagaaacatccatttaagttttgttagaagatagtcaccagttgcctgaatcgaatgaggaaaagcctgcttccagagatggacagtatattatagagtgagatatagagtttaaagcaagtgtgtgagtatatgtatattccatattattggtatatgtgtgtttatatatgaatctgtatatatgtgtgtctttgaatagacacaacatatatgcccctcatgcataattgtgcttattttgccctaattgaggaatttgagatgtattattggttcttctccctctcagatactatggtgggtaaaacccacagcctgaaagggttaaattttccataaatgccactgagtgtacatttgtggatataaataaatatatataatacacacacacatatggcaaatacatatacacacacaatattgcctttagtgctaatgcaagttggatcatgaaaacaatgtaggtaaagtaaagtatgtatttgtctgtgcttgaaaaatattgtaaaatgttatgtatttggaatatattttgtggtttgtctaatatttataaacacaactcggggtgaattcacaatgagtttatttcattgaaatactagagatatgggggccatgttactgtgattggagccttacctttgtatagtgaaatttgcatttctatgtcaacatccagattgttttatatgttaatatggtggcaggaatccctaataaaaatactctggggtaaaa

SEQ ID NO: 7718 - DNA, 604 bp, Homo sapiens
  source 1..604: mol_type = unassigned DNA; mol_type = unassigned DNA
ggctgtcttcgtggaagcaattcagtagcagagcttcccaaatcattcctcctgttcaggtgttccattgcctaaagaggagaacatttctgctcccttgatctccagctccccagtgaaggcagcccgggagtatgaagatccccctagtgaagaggaagataaaataaaagaagaacctttaaccatctctgaactagtgtacaacccaagtgccagcctgctccccacccctgtggatgacgatgagattgacatgctctttgactgtccttctaggcttgagttggaaagagaagacacagattcatttgaggatctggaagcagatgaaaacgcctttttgattgctgaagaagaggagctgaaggaggctcgccgtgctttgtcgtggagctatgacattctgactggccatattcgggtgaacccactggtcaagagtttttccaggctccttgtggtgggcctgggactgctgctctttgtatttcccctgctcctcctccttttggagtcaggtattgatctctccttcttatgcgaaatccgccagacaccagagtttgagcagtttcactatgaatactactgtcccctcaag

SEQ ID NO: 7719 - DNA, 662 bp, Homo sapiens
  source 1..662: mol_type = unassigned DNA; mol_type = unassigned DNA
ggcacaacaacatttttaggattcacagctgcaggctttgtggtctttcagggaaataagagaatccatttgataaaatggccagatgtctgcaaattgaagtttgaagggaagacattttatgtgattggcacccagaaggagaaaaaagccatgttggcattccatacttcaacaccagctgcctgcaaacatctttggaagtgtggagtggaaaaccaggccttttataagtatgcaaaatccagtcagatcaagactgtatcaagcagcaagatattttttaaaggaagtagatttcgatatagtgggaaagttgccaaagaggtggtggaggccagttccaagatccagagggagcctcctgaggtgcacagatgtgtacagaagaaaatttgttcctgctttggggtgacttggtgaggagctgtaatgtgaaagtctgcaaaaccaggctatcacactgtaagaagcagaagactacaggatgagagaagctggagaatcttggctccaggcatgttggtgcagatcctgaaagtgcagcctgcccaccaatgagaaaagtctttatggttccctcctcttccccaaattgtacttattcaatgcagcagaaatgaagaggaaatgataaaacatatcattcatctgtttcagaa

SEQ ID NO: 7720 - DNA, 5064 bp, Homo sapiens
  source 1..5064: mol_type = unassigned DNA; mol_type = unassigned DNA
agccctagagctcccagagacagaagacgagatggcagtattttaaggcactagcagatcacggcactgcaaatcctttttgtcttggcaaggcacaaggagacctgcttatgcagctttcaaagagggaaaccaaagggcagtttctcattgaccacatctgcaactactacagcctgctggagaaggactactttggcattcgctatgtggacccagagaagcaaaggcactggcttgaacctaacaagtccatcttcaagcaaatgaaaactcatccaccatacaccatgtgctttagagtgaaattctacccacatgaacccttgaagattaaagaagagctcacaagataccttttataccttcagattaaaagggacatttttcatggccgcctgctgtgctccttttctgatgctgcctacctgggtgcctgtattgttcaagctgagcttggtgattacgatcctgatgagcatcctgagaattacatcagtgagtttgagattttccccaagcagtcacagaagctggaaagaaaaatagtggaaattcataaaaatgaactcagggggcagagcccaccagttgctgaatttaacttgctcctgaaagctcacactttggaaacctacggggtggatcctcacccatgcaaggattcaacaggcacaacaacatttttaggattcacagctgcaggctttgtggtctttcagggaaataagagaatccatttgataaaatggccagatgtctgcaaattgaagtttgaagggaagacattttatgtgattggcacccagaaggagaaaaaagccatgttggcattccatacttcaacaccagctgcctgcaaacatctttggaagtgtggagtggaaaaccaggccttttataagtatgcaaaatccagtcagatcaagactgtatcaagcagcaagatattttttaaaggaagtagatttcgatatagtgggaaagttgccaaagaggtggtggaggccagttccaagatccagagggagcctcctgaggtgcacagagccaacattactcagagccgcagttcccactccttgaacaaacagctcatcattaacatggaacccctgcagcccctgcttccttcccccagcgagcaagaagaagaacttcctctgggtgagggtgttccattgcctaaagaggagaacatttctgctcccttgatctccagctccccagtgaaggcagcccgggagtatgaagatccccctagtgaagaggaagataaaataaaagaagaacctttaaccatctctgaactagtgtacaacccaagtgccagcctgctccccacccctgtggatgacgatgagattgacatgctctttgactgtccttctaggcttgagttggaaagagaagacacagattcatttgaggatctggaagcagatgaaaacgcctttttgattgctgaagaagaggagctgaaggaggctcgccgtgctttgtcgtggagctatgacattctgactggccatattcgggtgaacccactggtcaagagtttttccaggctccttgtggtgggcctgggactgctgctctttgtatttcccctgctcctcctccttttggagtcaggtattgatctctccttcttatgcgaaatccgccagacaccagagtttgagcagtttcactatgaatactactgtcccctcaaggagtgggtggctgggaaagtccacctcatcctctacatgctgggttgctcatgaagttaatctctcacgtgactaagggctatattcaatgctagtgatttctttttttcagcaaatgcctggttctgaagggtcacggggctgtcaacaggtgttccttactcataattgattattcaaacctttaagttagctttccataattcactgcacttaaataagtttaaatcaaatacagttattttagttacaggttaggaagatggtctttaaataaccaaaaatatgtttattttttattatagtgtagacatacccttcatctattatatcataatacatgttacattggactgaattagattttcccatttctaatagttggcaccattataagctataaggttcagaatcagaattttagtaacaactcaagagaaagttgttgaatataatccttagtgaaaacagtgtcctctaaccaatgcctatacaactaaatttatgctgggtttttggttctgtttttttaaaaatatttttatgtgttcaaactattttggtaaatttttagcaaaaaaaaaaaagaagcctcctggagttatttacatgtacagattgtaagactaatgcacaaaaggtatatcagaatttttttaatgttttggcgctactttgtttttaaaaatatttttggctgaacaataccataatttgttatgatctgcataggagatagaaaatgggtagaaagacactatagtaagtaagctgctaaaacagaggatggaactggaggatgtagaaactgagagcatcaagtggactcagggtggtccatttttcaaagtatttggacaagaggacttgttattttcatttgtattctgtccgtatattttggctggagaagcagatgttttaaaaagaaagtgagagtttaaaggaaaaaaggtaacagatgtgctagtcagttgcatatcaatgtacattaacccaagagtgaaggcagataggaactggagaaatggaaagtggcaaaaatgagttctggtgaggctggcaggcaaatggtgacaggcgaatggtctattttatgaaagtgatggtgatgccagcgttcgatgatgtgaagagcagtgcagtcgctgtctgagttaacatgaacatgtttaagtggatctaaataaaagtggagaaactttaaggtaaatattttgatccctcatgccatttgttgtgattctgtagaagaaacttcaaaaatgtgtttgtatgtgagtgtgcgtgtgtgtgtgtgtgagagagagagagagagagagagagagaatatgaatggctttttgatacatgtccatgatcatgttttgcggtggtcattatactcctttcctttcccagttgttttaaaatttgacttccatagagaaactggagaggcctcatgagatgacataccagttcagcctgggtaaagtagtgacatgaccctaaccagactgtagaggggaccagtgctctagtaccttccttgataccattaaatccatgatggaaaggatttaatccaacaatttaatggtatcaaggaaggtactagagcattgtaccatcagcaacgtactgatgccttcccatgcagactacctgctgatactgtgttatgtgggagaaagataagagtctagaacttatgccatggagcatagagcttctctgtggattgaaaacattccactgccctaatgtacaaagttacagggcccacttggaatcgctctctctagctaatgacattccaaccctatcattagcatgatttctaaattgggcaatacatttccactcactcagtggagctctgagtacttcactggacatttaattttggaaatgagttttgaaactcagttcgtgaagcctgcagtcgagcaaatgactatatatttgccattaagtttgaggggtttcctttcctatatgctttcagtgatttattttgctttttaaataaagattgtttgtttattacctgaaagttgatactgatttaggaatatattttctgtgattggaatcctcaacaatttattttggaagcttgcagatggctaggtttgaaattgaaatttgtgtttttctccttcttttctcatacgacttctaagtcatcctttctgacataaggcaactttagtgtagtctgcacaaaattagtccccttctgatcatgcgtcatataattttctctaaagttctgactatgacaaatcatctggccctcagtctttcaaaataatattatataatattttttaaattatggaactaatatattttccattgtaaaatacttaaaaaatatgatagtataaatatcacatgtaatccaacgatgcagatttatcttaaggagtaataaatatattattttaacatttccagctaacatctcttttctcttaggtggaaacttcattgttgaatagaaatgtttttaagtgaagaagttgacagaatagggtctgctgaatttaaacagccatcaaaagttaaactggaatcttgaaatgccatttgctcggcatagaatcagagccttttagaaacatccatttaagttttgttagaagatagtcaccagttgcctgaatcgaatgaggaaaagcctgcttccagagatggacagtatattatagagtgagatatagagtttaaagcaagtgtgtgagtatatgtatattccatattattggtatatgtgtgtttatatatgaatctgtatatatgtgtgtctttgaatagacacaacatatatgcccctcatgcataattgtgcttattttgccctaattgaggaatttgagatgtattattggttcttctccctctcagatactatggtgggtaaaacccacagcctgaaagggttaaattttccataaatgccactgagtgtacatttgtggatataaataaatatatataatacacacacacatatggcaaatacatatacacacacaatattgcctttagtgctaatgcaagttggatcatgaaaacaatgtaggtaaagtaaagtatgtatttgtctgtgcttgaaaaatattgtaaaatgttatgtatttggaatatattttgtggtttgtctaatatttataaacacaactcggggtgaattcacaatgagtttatttcattgaaatactagagatatgggggccatgttactgtgattggagccttacctttgtatagtgaaatttgcatttctatgtcaacatccagattgttttatatgttaatatggtggcaggaatccctaataaaaatactctggggt

SEQ ID NO: 7721 - DNA, 6821 bp, Homo sapiens
  source 1..6821: mol_type = unassigned DNA; mol_type = unassigned DNA
gaacgctcacagaacaggcagtgcaattccatgttcctcttaagtatgttagccctaccgggagctgagctggccagtctacttggagaggaaaagtagatctggggaaggtggaagggtcagttcctaagtgacttcctcctcggggatggtaagggcatttgctgatctccagtgactgcctggtgcctcatggtcagactcggctgtctcactcccagatatctgattttgcaaaaagggacacacctatctgcagcaaagaagacactgaccagattgcgagcggtgcttttggatgctctgtagccacccggggcccaggaggactgactcggcagcaggattcgtgcatgggaatcggagaccatggcagtgcagctggtgcccgactcagctctcggcctgctgatgatgacggagggccgccgatgtcaagtacatcttcttgatgacaggaagctggaactcctagtacagcccaagctgttggccaaggagcttcttgaccttgtggcttctcacttcaatctgaaggaaaaggagtactttggaatagcattcacagatgaaacgggacacttaaactggcttcagctagatcgaagagtattggaacatgacttccctaaaaagtcaggacccgtggttttatacttttgtgtcaggttctatatagaaagcatttcatacctgaaggataatgctaccattgagcttttctttctgaacgcgaagtcctgcatctacaaggagcttattgacgttgacagcgaagtggtgtttgaattagcttcctatattttacaggaggcaaagggagatttttctagcaatgaagttgtgaggagtgacttgaagaagctgccagcccttcccacccaagccctgaaggagcacccttccctggcctactgtgaagacagagtcattgagcactacaagaaactgaacggtcagacaagaggtcaagcaatcgtaaactacatgagcatcgtggagtctctcccaacctacggggttcactattatgcagtgaaggacaagcagggcataccatggtggctgggcctgagctacaaagggatcttccagtatgactaccatgataaagtgaagccaagaaagatattccaatggagacagttggaaaacctgtacttcagagaaaagaagttttccgtggaagttcatgacccacgcagggcttcagtgacaaggaggacgtttgggcacagcggcattgcagtgcacacgtggtatgcatgtccggcattgatcaagtccatctgggctatggccataagccaacaccagttctatctggacagaaagcagagtaagtccaaaatccatgcagcacgcagcctgagtgagatcgccatcgacctgaccgagacggggacgctgaagacctcgaagctggccaacatgggtagcaaggggaagatcatcagcggcagcagcggcagcctgctgtcttcaggttctcaggaatcagatagctcgcagtcggccaagaaggacatgctggctgccttgaagtccaggcaggaagctctggaggaaaccctgcgtcagaggctggaggaactgaagaagctgtgtctccgagaagctgagctcacgggcaagctgccagtagaatatcccctggatccaggggaggaaccacccattgttcggagaagaataggaacagccttcaaactggatgaacagaaaatcctgcccaaaggagaggaagctgagctggaacgcctggaacgagagtttgccattcagtcccagattacggaggccgcccgccgcctagccagtgaccccaacgtcagcaaaaaactgaagaaacaaaggaaaacctcgtatctgaatgcactgaagaaactgcaggagattgaaaatgcaatcaatgagaaccgcatcaagtctgggaagaaacccacccagagggcttcgctgatcatagacgatggaaacattgccagtgaagacagctccctctcagatgcccttgttcttgaggatgaagactctcaggttaccagcacaatatcccccctacattctcctcacaagggactccctcctcggccaccgtcgcacaacaggcctcctcctccccagtccctggagggactccgacagatgcactatcaccgcaacgactatgacaagtcacccatcaagcccaaaatgtggagtgagtcctctttagatgaaccctatgagaaggtcaagaagcgctcctctcacagccattccagcagccacaagcgcttccccagcacaggaagctgtgcggaagccggcggaggaagcaactccttgcagaacagccccatccgcggcctcccgcactggaactcccagtccagcatgccgtccacgccagacctgcgggtccggagtccccactacgtccattccacgaggtcggtggacatcagccccacccgactgcacagcctcgcactgcactttaggcaccggagctccagcctggagtcccagggcaagctcctgggctcggaaaacgacaccgggagccccgacttctacaccccgcggactcgtagcagcaacggctcagaccccatggacgactgctcgtcgtgcaccagccactcgagctcggagcactactacccggcgcagatgaacgccaactactccacgctggccgaggactcgccgtccaaggcgcgccagaggcagaggcagcggcagcgggcggcgggcgcactgggctcagccagctcgggcagcatgcccaacctggcggcgcgcgggggtgcggggggcgcggggggcgcggggggcggtgtgtacctgcacagccagagccagcccagctcgcagtaccgcatcaaggagtacccgctgtacatcgagggcggcgccacgcccgtggtggtgcgcagcctggagagcgaccaggagggccactacagcgtcaaggctcagttcaagacgtccaactcctacacggcgggcggcctgttcaaggagagctggcgcggcggcggcggcgacgagggcgacacgggccgcctgacgccgtcgcgatcgcagatcctgcggactccgtcgctgggccgcgagggcgcccacgacaagggcgcgggccgtgccgccgtctcagacgagctgcgccagtggtaccagcgttccaccgcctcgcacaaggagcacagccgcctgtcgcacaccagctccacctcctcggacagcggctcgcagtacagcacctcctcccagagcaccttcgtggcgcacagcagggtcaccaggatgccccagatgtgcaaggccacgtcagctgccttacctcaaagccagagaagctcgacaccgtcaagtgaaattggagccacccccccaagcagcccccaccacatcctaacctggcagactggagaagcaacagaaaactcacccattctggatgggtctgagtctccacctcaccaaagtactgatgaatagaggagctacaatgatagctgtttcctggattcctccctctatccagaactagctgatgtccagtggtacgggcaggaaaaagccaagcccgggaccctcgtgtgagccagcccggcctaatctgaccgcctcaacgccattctgagatcacctcactgcctctcatttgccttacccagacgcaccgtcaccctgcaccagctttggccctcagcactttttttctcctgtctccgcattccctcccccttgaaaacctgactgaggagacattctggaaggttccggtcccactgtgtgtcccctggcgctcttgcccatagagagccagacaccaatcctcaatggcaccttggtggcttccctctgccatgacagcccctaggccaggaaccatcaggggggccagccggcatccaattcctgcggataagtagcgttgggagagaacgggaaaggggacttgagttacagggtgacccagaaagacgattcagctgtgtccagcctgccacccatacgtaggccaaccaagcacttcatgaagaggaggcctcgtggcatattcagtttacacctgaaatattccttgatgggacagcttgtggggatggctatgggggaaggggaggttgagaaaggaagttctcgacaccagaaatgcatcggaggaccacaatcagttctatgctgccaaagattaaaaataaataaaaacataaaaaattaagaggggccaagaggaagacattctttctgcaaggaaatttcttttaaattctgaactgctactacacacaagtgaaagtcaaccctatgtaaactggtgtcctctctctagccctctcccttactggcccacttctctctccgtagagagcctgaaaaactgccccaatgccacggtaaaggcgaggaagtcttggctggcgttgctgactcacagtcgccatccatctggacacaaagagagacctgtgggagtcgtagagggtactgttagccccggtccatgcagggggttcagccgagcccaagactcaaagctgctttcctttcaggatttgtagtaacgtaaggtgataatggccaaaagtggttctctctcattaaaccaaccagtaaaagcgtatcctatttttttgcacaaggtgtttcattttcgtttttatgggaaaccaagggaaaagcacattgcgatccattcagtgtttaactgtcgtggctcattttctgttcgttagcacttgtgtgacaaaagagctcagatccgacttctcctatgtgtcacttattccaagaacccaactatgcccttaggtagaaagatttgactcgtgtgtctactagccaacaggcagagcagggttgaaaaaaatatcagctcccaaagggcccatgtgtctacatcatcagttactgtcatgcaccacatttgtgtgcagataccaaaagaggaggaaagaagaaaaaaattaatgtgtgggagctgcacgtttacatgttttgagctatgcttcaaacacaactggaaagccatcaatcttcaaaggcctcaaaaatacttttatagtaacaagtgcacgactttagttgggttattcaagatggcacaaaaaggtttccgcagaggtggtatgctgtgcttttggcgcaagtggtggggggatggggtgggggtggaatttttttctcactctaatgacttcctattggaaaggcattgacagccagggacaggagccagggtgggggtagttttgtgggaaagcagaactgaagttagcttaagcataaaaacaaagaaaaatcttcgcttttcatgtatgtggaatccaagaataaccataggctctaccagaccagaagggtaaggatggacactaaaatgaaacaaataccaaggtattccttctgctgcagcctggagaccaccgagagtcgagctggggcacacacacacctggccgggacccggcagggacaaggcgggccgtggcctcctccaccaagtctctctagacaattcagggcctgctttccccagctccatgcatggctggactggtgattccagggtgcagaagggattcatattcccagaacgctttaagtgtacacctgcaggataaagagataccggttacattattaaatgattctagggattcactgggggatatttttgttgcttttactttcatggttagagctacaaagaacagtgattttttttttttctcccttccccattcagaaacattatacattgggccatttttctttctcccaaagaagattcatggatagtcagactgaactgtgtgcaacaggaaaagtcaaaagggaaaaggtagctgatgaggttacatggttacatgttctacatcatgcatagtagcttgaaatctagtctggagaaaactggatcaagattctagcccactggagttgcaaggaatgagaggcaaaaattctaaagatttgggttatattttcaacttgggggacagagagaaatggagagcaggaattacagttccaacaaacatcatgatagtctggtagtcaagacagagattaagtaaaacaggttttactgtttagctgagttcagttaatacaaaatgtacataaaacgttagtcctttgagactgacatgattaatgatcagtgtggtgggaaatgatgtagttattgtacacaagcacttgcaaactctttatccctatttctttaaaacaaaataaggtgaaatacgaagtccttggtctgatataaagcccctattggattcttcggatgcgtaaaagaaattgcctgtttcagccagaagactggtgaaaacacatacatcagactatgttgtgagccaggttgattttttattttattatatgcaggtgagtgttgaaactgttaaaattccaatttgttttcattcagtattagtttagttctaaatatagcaaaccccatccaggtgctatcagatgaccagttactgcttagttaactaggtgtaaagttttacatatacattaatgtcaatagtttattacaagttgtgtaaaatggactctagtttaataatgggggaaaaaagattaggttgctcctgaaactgactgtagagcatgtaaaatgattttactggattctgttcaactgtaatcaatgaaaaagatgtacgttgtagacaaagttgcagaattaaaaaaagaaatctgcttttaatttattctttttgtattaagaatttgtatagtacctttacattttgcaaaacagtgttgtcaacacttattaaagcattttcaaaatgaaaaga

SEQ ID NO: 7722 - DNA, 875 bp, Homo sapiens
  source 1..875: mol_type = unassigned DNA; mol_type = unassigned DNA
ccacctgcatgtagctgccttacctcaaagccagagaagctcgacaccgtcaagtgaaattggagccacccccccaagcagcccccaccacatcctaacctggcagactgggagctacaatgatagctgtttcctggattcctccctctatccagaactagctgatgtccagtggtacgggcaggaaaaagccaagcccgggaccctcgtgtgagccagcccggcctaatctgaccgcctcaacgccattctgagatcacctcactgcctctcatttgccttacccagacgcaccgtcaccctgcaccagctttggccctcagcactttttttctcctgtctccgcattccctcccccttgaaaacctgactgaggagacattctggaaggttccggtcccactgtgtgtcccctggcgctcttgcccatagagagccagacaccaatcctcaatggcaccttggtggcttccctctgccatgacagcccctaggccaggaaccatcaggggggccagccggcatccaattcctgcggataagtagcgttgggagagaacgggaaaggggacttgagttacagggtgacccagaaagacgattcagctgtgtccagcctgccacccatacgtaggccaaccaagcacttcatgaagaggaggcctcgtggcatattcagtttacacctgaaatattccttgatgggacagcttgtggggatggctatgggggaaggggaggttgagaaaggaagttctcgacaccagaaatgcatcggaggaccacaatcagttctatgctgccaaagattaaaaataaataaaaacataaaaaattaagaggggccaagaggaagacattctttctgcaaggaa

SEQ ID NO: 7723 - DNA, 1287 bp, Homo sapiens
  source 1..1287: mol_type = unassigned DNA; mol_type = unassigned DNA
gcacagccagagccagcccagctcgcagtaccgcatcaaggagtacccgctgtacatcgagggcggcgccacgcccgtggtggtgcgcagcctggagagcgaccaggagggccactacagcgtcaaggctcagttcaagacgtccaactcctacacggcgggcggcctgttcaaggagagctggcgcggcggcggcggcgacgagggcgacacgggccgcctgacgccgtcgcgatcgcagatcctgcggactccgtcgctgggccgcgagggcgcccacgacaagggcgcgggccgtgccgccgtctcagacgagctgcgccagtggtaccagcgttccaccgcctcgcacaaggagcacagccgcctgtcgcacaccagctccacctcctcggacagcggctcgcagtacagcacctcctcccagagcaccttcgtggcgcacagcagggtcaccaggatgccccagatgtgcaaggccacgtcagctgccttacctcaaagccagagaagctcgacaccgtcaagtgaaattggagccacccccccaagcagcccccaccacatcctaacctggcagactgggagctacaatgatagctgtttcctggattcctccctctatccagaactagctgatgtccagtggtacgggcaggaaaaagccaagcccgggaccctcgtgtgagccagcccggcctaatctgaccgcctcaacgccattctgagatcacctcactgcctctcatttgccttacccagacgcaccgtcaccctgcaccagctttggccctcagcactttttttctcctgtctccgcattccctcccccttgaaaacctgactgaggagacattctggaaggttccggtcccactgtgtgtcccctggcgctcttgcccatagagagccagacaccaatcctcaatggcaccttggtggcttccctctgccatgacagcccctaggccaggaaccatcaggggggccagccggcatccaattcctgcggataagtagcgttgggagagaacgggaaaggggacttgagttacagggtgacccagaaagacgattcagctgtgtccagcctgccacccatacgtaggccaaccaagcacttcatgaagaggaggcctcgtggcatattcagtttacacctgaaatattccttgatgggacagcttgtggggatggctatgggggaaggggaggttgagaaaggaagttctcgacaccagaaatgcatcggaggaccacaatcagttctatgctgccaaagattaa

SEQ ID NO: 7724 - DNA, 2145 bp, Homo sapiens
  source 1..2145: mol_type = unassigned DNA; mol_type = unassigned DNA
atttctccagtgctgctacagaatgggactttttgcttgaccttgtggaaactcatgggttctccaagttgtaaagagttaagaaaagggatggaatgtctggggaatgttgcagggaaggctgcagctctctgctcttagctttctcaccctggaggggatcccaacactcggtggtgcttctgggtctgaggtcttccctaagttctgtttgatctgccaaagagccagcctcagtccactgagaaacagggatgtgccgttatctgcacactgaggtttatttttaccttgtccctggtgagtccccagagacaaggagaaaacactttgggagggagttaagagccttttgcttatccttgaaggaaagcagtctctgaggattagtgagggtggtggtgagggtaggtagggggaggagagtcagaggaatcagagttatttggactgcattttttccttgcctgattaaatcttactgacattggcactttgtgtcactaaaagaacacagccctggatgtggggccagggaccagagggttggcggcagagtctggggctggcatggctgctgggctgcttggctctgaggacccaccgtggagttggaacctgacttgtcgggcgctgaggacctgccaagtgaggaacattcgagttctgcagctgctgctaaaaccatggtgcatctccagggccgtctatcagatgacggagggccgccgatgtcaagtacatcttcttgatgacaggaagctggaactcctagtacagcccaagctgttggccaaggagcttcttgaccttgtggcttctcacttcaatctgaaggaaaaggagtactttggaatagcattcacagatgaaacgggacacttaaactggcttcagctagatcgaagagtattggaacatgacttccctaaaaagtcaggacccgtggttttatacttttgtgtcaggttctatatagaaagcatttcatacctgaaggataatgctaccattgagcttttctttctgaacgcgaagtcctgcatctacaaggagcttattgacgttgacagcgaagtggtgtttgaattagcttcctatattttacaggaggcaaagggagatttttctagcaatgaagttgtgaggagtgacttgaagaagctgccagcccttcccacccaagccctgaaggagcacccttccctggcctactgtgaagacagagtcattgagcactacaagaaactgaacggtcagacaagaggtcaagcaatcgtaaactacatgagcatcgtggagtctctcccaacctacggggttcactattatgcagtgaaggacaagcagggcataccatggtggctgggcctgagctacaaagggatcttccagtatgactaccatgataaagtgaagccaagaaagatattccaatggagacagttggaaaacctgtacttcagagaaaagaagttttccgtggaagttcatgacccacgcagggcttcagtgacaaggaggacgtttgggcacagcggcattgcagtgcacacgtggtatgcatgtccggcattgatcaagtccatctgggctatggccataagccaacaccagttctatctggacagaaagcagagtaagtccaaaatccatgcagcacgcagcctgagtgagatcgccatcgacctgaccgagacggggacgctgaagacctcgaagctggccaacatgggtagcaaggggaagatcatcagcggcagcagcggcagcctgctgtcttcaggttctcaggaatcagatagctcgcagtcggccaagaaggacatgctggctgccttgaagtccaggcaggaagctctggaggaaaccctgcgtcagaggctggaggaactgaagaagctgtgtctccgagaagctgagctcacgggcaagctgccagtagaatatcccctggatccaggggaggaaccacccattgttcggagaagaataggaacagccttcaaactggatgaacagaaaatcctgcccaaaggagaggaagctgagctggaacgcctggaacgagagtttgccattcagtcccagattacggaggccgcccgccgcctagccagtgaccccaacgtcagcaaaaaactg

SEQ ID NO: 7725 - DNA, 662 bp, Homo sapiens
  source 1..662: mol_type = unassigned DNA; mol_type = unassigned DNA
ccctcctgagcgctcgctcctctcgctcctctcccctcacccgccgccttccctgctgggtccctctccccggtctccacctctcctccctctcctggaagggaaaagtctgccaagctggggactgccacgaccaaaccaacaaaggccgaccgaaggcggagaacttgaaaagaacttgttttgttccagttaaggaacctgcaggaaaatccacacccacattgcctggttttgaactggagagctgcgtgtgtgtgtatattccaatggagacagttggaaaacctgtacttcagagaaaagaagttttccgtggaagttcatgacccacgcagggcttcagtgacaaggaggacgtttgggcacagcggcattgcagtgcacacgtggtatgcatgtccggcattgatcaagtccatctgggctatggccataagccaacaccagttctatctggacagaaagcagagtaagtccaaaatccatgcagcacgcagcctgagtgagatcgccatcgacctgaccgagacggggacgctgaagacctcgaagctggccaacatgggtagcaaggggaagatcatcagcggcagcagcggcagcctgctgtcttcaggatctggtgccaggagacactgcattctactcccaggttctca

SEQ ID NO: 7726 - DNA, 1236 bp, Homo sapiens
  source 1..1236: mol_type = unassigned DNA; mol_type = unassigned DNA
gttttctgtccagatattccaatggagacagttggaaaacctgtacttcagagaaaagaagttttccgtggaagttcatgacccacgcagggcttcagtgacaaggaggacgtttgggcacagcggcattgcagtgcacacgtggtatgcatgtccggcattgatcaagtccatctgggctatggccataagccaacaccagttctatctggacagaaagcagagtaagtccaaaatccatgcagcacgcagcctgagtgagatcgccatcgacctgaccgagacggggacgctgaagacctcgaagctggccaacatgggtagcaaggggaagatcatcagcggcagcagcggcagcctgctgtcttcaggatctggtgccaggagacactgcattctactcccaggtctaaagagacggattgtcatttcccttctttagttctagaacaaccgattcctttcttctttggagcattgtttgctttgaagtttcccctccttccagagaggaaagcaccccttctctgtcttctgaaatcagtggctggtcatcaatatcccctctgtgtcaaaaacagatgagccacgcgtggctcctgacaacgtcctcctggcagaatgtgcgctcatatccggtgctgagtcgcccagggtcttctgaacaattggagcatttctggctcgcggctgaatgaggctgaaagaggctgtccttccatgtgtctgccggccgggaggagagctgctgtttgtgctgctggcgttgcctccacatccgctcctccacacccagctgtccccggctggagtctggagttccccggctggaagctgggaaacccacagtgacacaggcagtgtctccagggtctcaaacaatgttcatagcatcgggaagttcactccaaagatttccaaatgcccccgaaaatgactttctgacttggcgtgagtaactccatctctctctctgcttggatgggaattgtctttttagggtcagccctttttgtcttcctcgttggccagattattagtgaactagttcaatgaaaatcctttggattaggattgaaatgtgctcataaggtcgccaaaaacaacagattctatctttagtatcattcaagtagatcatttcctcccgataactgggaggaaagattttttgctggagaactgacctgatgacactgttttcctgacaataattcagaggcaggcttaaccttc

SEQ ID NO: 7727 - DNA, 2731 bp, Homo sapiens
  source 1..2731: mol_type = unassigned DNA; mol_type = unassigned DNA
gtgctgcagcaagaagaatgggcttgacaggctcacactgtgatcttgagttgcctgcccccgaaataaggtcccagcctcctccgccctttgcaaggctcttacacattagtgagcaggaagtggagtcccgatgggaggctgggaatttgaacgccttcccatttcagcactggaggggaggaagctcagttcagcactccacgcagatggctaccgctccctcctgagcgctcgctcctctcgctcctctcccctcacccgccgccttccctgctgggtccctctccccggtctccacctctcctccctctcctggaagggaaaagtctgccaagctggggactgccacgaccaaaccaacaaaggccgaccgaaggcggagaacttgaaaagaacttgttttgttccagttaaggaacctgcaggaaaatccacacccacattgcctggttttgaactggagagctgcgtgtgtgtgtgtatgtgtgtgtgtgtgtcaagcaagaggcggaggaggcacagactacggtctctgttttgataaggaaactgccagctgtcgaaagttaaccagcagagaggggaagatggcccaggagccagcccctcctgagttttaaactacactgttttctgtccagatattccaatggagacagttggaaaacctgtacttcagagaaaagaagttttccgtggaagttcatgacccacgcagggcttcagtgacaaggaggacgtttgggcacagcggcattgcagtgcacacgtggtatgcatgtccggcattgatcaagtccatctgggctatggccataagccaacaccagttctatctggacagaaagcagagtaagtccaaaatccatgcagcacgcagcctgagtgagatcgccatcgacctgaccgagacggggacgctgaagacctcgaagctggccaacatgggtagcaaggggaagatcatcagcggcagcagcggcagcctgctgtcttcaggtaggcagaggccagctggagggacgccccctgagcatggctgggaccccagaggggacccaggaaggtggggagagctgcagctggggagactgcagggcaagctgctccaaagctggctttgctttccagaccaaggttgggatccaaatgcgaatctgagaaaactgctcccaggaatcaaatagtggaagggaaaaaaaaaaaaaaaagcatcagtagaaccacgcagtgcaagaaggcctgctggtcacacttaagtgtcttcaggtaccccccagagcgtttcacaatccccatggcaagctgtcgggaatgtcaggtccaagggtgaaaagtggaatccgctcatgtgcccacttgtgtgttgtgaatttcaggatctggtgccaggagacactgcattctactcccaggtgggtttctccggcttttaaaaatgcggaatactctctccatcgtgtcgcagggcatgatttctccattcagtgccttttgaaattgcgagtcagagatctggttccgtcgtccgcttccgccagccttggccaagtcattttgtcttttgatgttgggagggacagaggagttccaaggtcctggatctgactgacttaaaaaggggggtgtcatttactgaaatggcaggaggaggagtgggtttgaaagaagcagagaggaagggaggcagccgtggtttggaaatgttagaaaagggcattgtggccgggcacggtggctcacacctctaatcccagcactgtgggaggccgaggctggagaatcacttgaggccagggagtttaagaccagcctgggcaatataatgagaccccgtctctaccaaaaaaaaaaaaaaaaaattaattagccaggtgtggtggcacagcacctgtagtcccagctacttgggaggctgagtagggaggatcactgaaccctggaggttgaggctgcagtgagcagtgactgcactgccctccaacctgggtgacagagcaagaccctgtttcaaaaaacaaaaaaagaaaagtggaatatgagaaaaaaacctgattgatgtaggaaccatgcagctgtctctgagccacgcaaagaaggcaagaaatcttccctggtaatttatattactatatatagtggctgtaaacaataacaaaaaggaaaagacaggagaggaagaggagctaaaaattgtctcgttagcttgtgggctggtgtgatccaatcatagccaggagaaatttaaaggaccagagagaggacagacatccttcctggactgagaggcgaggttactgttctggtgagtggagcgttaagttgaaggcccctccttggacaggctgaggccctccggggaccttagcagtgtgttcacacggtcatgtgtttttataaaatctgtgaacataatatgttttgtatttttcttcagtagaaccgctaaaggccagtgtggtggctcaggcctgtaatctcagcactttgggaggccaaggcaggtggatcacctgaggtctggagttggagaccagtctggccaacacagtgaaaccccatctctactaaaaatacaaaaattagccgagtgtggtggtgcacacctataagcccactacttgggaggctgaggcaggagaatcacttgaactcaggaggcagaggttgcagtgagcagagatcgtgccagtgcactccagcctgggcaacagagcaagactctgtc

SEQ ID NO: 7728 - DNA, 1741 bp, Homo sapiens
  source 1..1741: mol_type = unassigned DNA; mol_type = unassigned DNA
tctgcagccacgagaagcaaagttgacatttctggatcactctccccagacgcgtcacttgcccacaagcgggacacggcagtctcgctgagccagctgtgcagagggacagatggaagaaagctagagatgctgcttcgtgggcgctgaagttgcagaacttgggctggttttctttcttcccatcccccctcctcctgacaaaccacatcttgactcagatggtcgaaagaaaaactctttcagttatttgatatttgggaaccctccaggagaccataacttatttttgagggaggctccttctctccctttgctgggaacacacacacacacacacacacacacacacacacacacacacacacacagctgtacaccatggtggttcaggctgcagtggctccgaatagatcccaaagacttttactgaaaattccttatggatctctgagaaggcgcagcgttgaaaggatgacggagggccgccgatgtcaagtacatcttcttgatgacaggaagctggaactcctagtacagcccaagctgttggccaaggagcttcttgaccttgtggcttctcacttcaatctgaaggaaaaggagtactttggaatagcattcacagatgaaacgggacacttaaactggcttcagctagatcgaagagtattggaacatgacttccctaaaaagtcaggacccgtggttttatacttttgtgtcaggttctatatagaaagcatttcatacctgaaggataatgctaccattgagcttttctttctgaacgcgaagtcctgcatctacaaggagcttattgacgttgacagcgaagtggtgtttgaattagcttcctatattttacaggaggcaaagggagatttttctagcaatgaagttgtgaggagtgacttgaagaagctgccagcccttcccacccaagccctgaaggagcacccttccctggcctactgtgaagacagagtcattgagcactacaagaaactgaacggtcagacaagaggtcaagcaatcgtaaactacatgagcatcgtggagtctctcccaacctacggggttcactattatgcagtgaaggacaagcagggcataccatggtggctgggcctgagctacaaagggatcttccagtatgactaccatgataaagtgaagccaagaaagatattccaatggagacagttggaaaacctgtacttcagagaaaagaagttttccgtggaagttcatgacccacgcagggcttcagtgacaaggaggacgtttgggcacagcggcattgcagtgcacacgtggtatgcatgtccggcattgatcaagtccatctgggctatggccataagccaacaccagttctatctggacagaaagcagagtaagtccaaaatccatgcagcacgcagcctgagtgagatcgccatcgacctgaccgagacggggacgctgaagacctcgaagctggccaacatgggtagcaaggggaagatcatcagcggcagcagcggcagcctgctgtcttcaggtaggcagaggccagctggagggacgccccctgagcatggctgggaccccagaggggacccaggaaggtggggagagctgcagctggggagactgcagggcaagctgctccaaagctggctttgctttccagaccaaggttgggatccaaatgcgaatctgagaaaactgctcccaggaatcaaatagtggaagg

SEQ ID NO: 7729 - DNA, 495 bp, Homo sapiens
  source 1..495: mol_type = unassigned DNA; mol_type = unassigned DNA
agttcagcactccacgcagatggctaccgctccctcctgagcgctcgctcctctcgctcctctcccctcacccgccgccttccctgctgggtccctctccccggtctccacctctcctccctctcctggaagggaaaagtctgccaagctggggactgccacgaccaaaccaacaaaggccgaccgaaggcggagaacttgaaaagaacttgttttgttccaatattccaatggagacagttggaaaacctgtacttcagagaaaagaagttttccgtggaagttcatgacccacgcagggcttcagtgacaaggaggacgtttgggcacagcggcattgcagtgcacacgtggtatgcatgtccggcattgatcaagtccatctgggctatggccataagccaacaccagttctatctggacagaaagcagagtaagtccaaaatccatgcagcacgcagcctgagtgagatcgccatcgacctgaccgagacg

SEQ ID NO: 7730 - DNA, 806 bp, Homo sapiens
  source 1..806: mol_type = unassigned DNA; mol_type = unassigned DNA
tctgcagccacgagaagcaaagttgacatttctggatcactctccccagacgcgtcacttgcccacaagcgggacacggcagtctcgctgagccagctgtgcagagggacagatggaagaaagctagagatgctgcttcgtgggcgctgaagttgcagaacttgggctggttttctttcttcccatcccccctcctcctgacaaaccacatcttgactcagatggtcgaaagaaaaactctttcagttatttgatatttgggaaccctccaggagaccataacttatttttgagggaggctccttctctccctttgctgggaacacacacacacacacacacacacacacacacacacacacacacacacagctgtacaccatggtggttcaggctgcagtggctccgaatagatcccaaagacttttactgaaaattccttatggatctctgagaaggcgcagcgttgaaaggatgacggagggccgccgatgtcaagtacatcttcttgatgacaggaagctggaactcctagtacagcccaagctgttggccaaggagcttcttgaccttgtggcttctcacttcaatctgaaggaaaaggagtactttggaatagcattcacagatgaaacgggacacttaaactggcttcagctagatcgaagagtattggaacatgacttccctaaaaagtcaggacccgtggttttatacttttgtgtcaggttctatatagaaagcatttcatacctgaaggataatgctaccattgagcttttctttctgaacgcgaagtcctgcat

SEQ ID NO: 7731 - DNA, 1149 bp, Homo sapiens
  source 1..1149: mol_type = unassigned DNA; mol_type = unassigned DNA
gtggggtctccccatccacgtgaagctgtgcttttggatgctctgtagccacccggggcccaggaggactgactcggcagcaggattcgtgcatgggaatcggagaccatggcagtgcagctggtgcccgactcagctctcggcctgctgatgatggagtctcactgtgtcgtgcaggctggagggcaatggtgccatcttggatcactgcaatctccaatctctgcttcccgggttcaagcgattctcctgcttcatcctcctgagtagctggggttgcaggatgatgctcattccaagattttctgttttatttctgtcttttgcaatcgttggcctgctttgctgccataaatgagggaattgtggctaagagagcaatctgccggaagcatctcctcatccatcggtggacactaaccacagctataaccgggacaactagagacactgtccaagtcctctgtcaaattcacaacttagcttgcccttaggtgtgaatacagactgaccccagggccggaggggctgctgttgtgagcctttcctgctggaggggcctaaggactcagttccctttatctaagacaaaaccgaatggagacagtaagagcccatcacactccaccctccctccctcaccttcttgcagagctggtagagtgtagtggccaagagcaggtcctctgcggtgtcacaattggagacctcttctgaatccatccctcaccaactcagtgaccagagctggttacccaacctctcagtgcttcaggtttggtttgatgttttcaatctctagaatgcaacagtcgtagagttggtgagaagattatgcagctgtgctgaggaaagagtaagagctcaaacatgtcagctgtcattcaaatgtcactacaatggccttttttcaagtgtgatccacttgcaccaaaattacctgaggtgcttgtgacaaggatcttacagattcagtctccacggaaggttccagaagtgttttagtgatcgaggcaggggctctacagtcagacagacccaacttcaaatcttaccttgcaccttagttagatctgcgtgatgtgcaacaagttaatgcatttagcttcttggagtctttgtttcaataaattaagacattaatatcta

SEQ ID NO: 7732 - DNA, 1233 bp, Homo sapiens
  source 1..1233: mol_type = unassigned DNA; mol_type = unassigned DNA
tgccacgtaagacgtgactttgctccccctttgcctgctgccatgattgtggggtctccccatccacgtgaagctgtgatctatggaggtgggacattgatgtagagttgaggacgataactggcttcaggatttctcaagaaaagctttgagagatctacaccttggaaaccccagccctagaggagtgttcttccaagactccacgaacaggaaaaagtcctggatagcagctgagtgccgccatattaaccctttgggatgggccccagaatctgtgtttccatccagttcccaggtgcttttggatgctctgtagccacccggggcccaggaggactgactcggcagcaggattcgtgcatgggaatcggagaccatggcagtgcagctggtgcccgactcagctctcggcctgctgatggacagagccactcatatgaccacggaaggggggacttggagagaagacacattctggtggtggagatggccttttaggctgttgaaaagctgcctctcccatctttgcaagaatctcaggcagcgaaagaagatactgctgtgttcaccaacccgtgaggaggcttcagattgatgtgactaattgtagagcgggaagctcttggctacgtgtcatttgttgagggcgtgtgagttcagggaaagctgcaagggctggaacatgctagagccgaggattagtttatctttagagccaggataaggatgaataaccaaggggcttcaagggtgttatgatgccatttcggttcttagattataaaggctcaccttcaggacagctagattaaaatagtttttaatggaaattaactggataataaataatgcaaattaagcttttctataaatgaagtgtctttaaatacattatctcatttaattccatccatgaccctatttttaagaccaaaaaaaatctgataattagaatttgggaaactgtcaatggtcacataagtgaaactgatgaagcaagttctcaaaatctcggtcctctgagtcccaagccagtgctttctctgacagcatatcaaagctcaacaatttgacttctaggaccttctaacactttggattcgctcctgaagttagctcccctctgaaccagtcagcattttctgtgtttccaggtgaggaatcctgtctttctgttaatcatctgttcttttccatattgaagtgtaaaataaaaaagggataccacaa

SEQ ID NO: 7733 - DNA, 5060 bp, Homo sapiens
  source 1..5060: mol_type = unassigned DNA; mol_type = unassigned DNA
cgggagcccaggcgggcaggccgctggggtcggggctgcacgtacgagagccgggacgcccgggttcagagcgaaggaggaggcatggcttcggtgttcatgtgtggcgtggaggacctgctgttcagcggcagccgcttcgtatggaacttgaccgtgtccacgctgcggagatggtacacggagaggctgcgggcttgccaccaggtgctgcggacgtggtgcgggctgcaggacgtgtaccagatgacagaaggcaggcactgccaggtgcacctcctggatgataggagactggagctgctggttcagcccaaacttctagcaagagagttgctggacctagtggcttcacatttcaacctgaaagaaaaggagtattttggaataacattcatagatgacacaggtcagcagaactggctgcagttagatcaccgagttcttgaccacgatttgcccaagaaaccaggcccaaccattttgcactttgctgtgaggttttacattgagagcatatcgtttttaaaggataaaaccaccgtggagctgtttttcctgaatgcaaaggcctgtgtgcacaaggggcaaatcgaagtagagagcgaaaccatcttcaagttagcagcgtttattttacaggaagccaagggagattataccagtgatgaaaatgccaggaaagatttaaagacattaccagcctttccaaccaaaactcttcaggagcatccatcccttgcctactgtgaggacagggtaattgagcattatttgaaaatcaaaggtctcactcgaggtcaagctgtggttcagtatatgaaaatagtagaagctctaccgacttacggtgtccattattatgcagtaaaggataagcaaggacttccttggtggcttggaataagctataagggaattggccaatatgatatacaagacaaggtgaagcctcggaagttattccaatggaaacagctggagaacttatatttccgtgagaaaaaatttgctgttgaagttcatgatccacgaaggatttcagtttcaagaagaacctttgggcaaagtggcttgtttgtgcaaacatggtatgctaactcttctctcatcaagtccatttgggtaatggcaattagtcagcatcagttttacttggaccggaagcaaagcaaagcaaaaattccttcagccaggagtttagatgagattgcaatggatttgacagagacaggaacacaaagggcctccaagctggtgacactggagacgaaaagtcagttcatcatggcaagtaatggcagtttaatctcctcaggttctcaagactcagaagttagtgaagagcaaaagagagaaaaaatccttgaactaaagaagaaggagaaactattacaagaaaaacttctgaaaaaagttgaggagcttaagaagatctgtctgcgggaggctgagctcacaggcaaaatgccaaaggagtatcccctgaacataggcgagaagcctcctcaggtcagaagacgtgtgggtactgcgttcaaattagatgacaacttgctgccgagtgaagaagatcctgctttgcaagaactggagagtaattttctaatacaacaaaagctggtggaagctgcaaagaaacttgccaatgagccagacctttgtaaaactgtgaagaaaaagcgaaagcaagattacacagatgcgatgaaaaagcttcaggagattgaaaatgcaataaacgaataccgaattaggtgtggaaagaaacccagccagaaagcaacagtgttaccagaagacataatcccctcagagagtagctctttgtctgacaccaccacctatgatgatcccagtgatgccttcacttttcctgggcagcgatcaagttcagtacctcattctccaagaattcttccccccaagtctcttggtattgagcgaatccatttcagaaagtcgtccatcaatgaacagtttgtggataccaggcagtccagagaaatgctgtccacacacagcagcccttacaaaactctggagaggcggccccagggaggacgaagcatgcccaccacgccagttcttacccgaaacgcctacagcagcagccacttggaacccgaatcttcatctcagcactgccgccagcggagtggaagcctggagtcccagtcccacctgctctccgagatggacagcgataagccatttttctccctctccaaatcccaaagaagcagcagcacagaaatcctcgatgacgggtcttcttatacaagccaatcaagcacagagtattactgtgtgacaccagttaccggcccctattacaccacccagaccctggacactcgcaccaggggtcggaggaggtcaaagaaacagaatgtttctacttcaaattcaggaagcatgcccaacctagcacaaaaggatagtttgaggaatggtgtttactcaaagagtcaggagccaccgtcttccagttactacattgccgggtacacaccctatgcagagtgtgacttttattacagtggtggttatgtctatgagaatgacaccgagggacagtatagtgtcaacccttcctaccggtcctcagcccactatggatatgagcgccagagggactacagcagatcctttcacgaagatgaggtcgaccgggtaccccataacccatatgcaactctccggctgccaaggaaggctgctgcaaaatcggagcacatcaccaaaaacatccacaaggccttagttgccgagcacttgcgtggctggtaccagcgggcctctgggcagaaggatcagggacacagcccgcagaccagctttgactcagacaggggatcacagagatgcctggggtttgcggggctgcaagtaccttgttctccaagcagtcgtgcatcctcgtactcttcagtgtcttctacaaatgcttctgggaactggaggacccagttaaccatagggctgtcggattacgagactccagcacattcttcttacaccagctgctatggcaatgtctataatcctttaccctctccaagcagacaatacacagaaatcagtcaactggatggtacagatggaaaccagctggaagacaacctggagagtagtgagcagagactcttttggcatgaagattcaaagcctggaacattagtctgaactgcagttggacctcctgaccaagcactgcgttctcacactagtgtgccttgcaaattgtatttgtcttccgagaggatgttcgttttagaaacctaaagacatcaaaggttgaagagaagacttagttgccctggaagtgaatcagtgaatcacacaccaagccccacaaagcccctaaaggaggatttggcctttcaaactctaggcactaacgtaactgtagggtctgcccacatgttgaagtattgccaagagaggactcagtgtgaagccttcatcaatagcaagcactttttaagggagtaaaagttgttaaaggcaaacctcaaaaacatgaaagggcattcaggatgtcccatggcaataagaacaggggaaatctcagagcacaattcagcaggatgagagaaggggaaccagaagctccggagtcattgctcacttcagagtttgaattcgtgagctgacaaagagtaacatgctctttctacacagacatggacaatttagacagtattggaaaattacttgaagctggattttcatgaagttctgaatgagtgtaaatgttttttaggatactataaagagtgatgtttttcataagcaccataaaatgggttctggaaaaactgattaccttagcatcctgtaatataacttatggtagcagattggggaaaatgaagcagcccactgaataattgacaaagtctgcttggagaacattctaaggtacaatatcatggagctcctttttcctttctccactaattgcgtgatgagctattgttctggctgttaattctccaactcggctgtcatttgaagtggcagacttaatatggaaagtttttataattatgagtttgaaaaagcattttaagatgatacagaaagtatccaaaacaacagaaaaaaaaagccacgtcattttagatgaattgcgtgccttaaaatggtgaacgttagaaaattaaacaagtctggattccacaagtagttccaagtcaccaagtgacaaaaacaaggttaacattaaaaaagaaaaacaacaacaacgacaaaaagctccaagctgcagtggatttaattatgaggctaaaactacctcatactttccttggaagaactaattagctatggtttattgtagggttttgtttgtttgttttttaaagcaaatgatttccatattccagattgatcttttttgtcatctttgcttcaaaattacataaaaggtgctcctttcccccttcttttatacaagtttcttgttcatattgtgaatagaaaagtttctgaacaacttttttggaacattttctatctatattccaaagcatgtaatatatacataaaaacgatttgttaaactggtccttagtcatttgtataattagaaatgaagtttgggaaaaaattttggaaaaaagacaagcaaaaaaaaataacttattccttttttgcatatttgtatagccttctagaatcagaaataacctttttgcatattcttttattgttctgacttttcaagacctattatttttttacataggtcaataaacaaaaggtgtgctactgaaaatgtttacgttttcttccatttatgtcaggggttcatgtgaagcaggtcgcagtgctctacttcaagtaatcatattgggcaaggcttcggatttttatttatagtattaccgtattttattaattccgggatgtacatttttaaatatttacattaaaaacatggttcatctttttattgatggcatattctacttgaattggcagttttttcttaatagtacattaaaaataatgctgtgtcttacaataaagttgccttagaattgatgaaa

SEQ ID NO: 7734 - DNA, 3761 bp, Homo sapiens
  source 1..3761: mol_type = unassigned DNA; mol_type = unassigned DNA
attgtaactcttcctgtagaacctgttcatgtccagggtgagtaaactagggtagaaatgtcttcctaaaacagcctccggtgaaattcgtccttggattcaaagcaacttacttcctaggaagtatcaggcaaatcccaactgccctccattttagaaaggtctcttttctgggaaaatctgccactgagaactttgccctcctctccctgatgggaggaaggagtagaattagggaggtgtcactcaggagagttgctgatgtcagtagtgtgtcagccgtgggaggctcagtttgtgaaattgagttacacctaagtgtcttatgaaactcagttcagaactcaccggagctgccgtctgggaggggggagggcggaagaaccctgaggtttttcctcacatttctgtcccatttttggaacctctggatttaaagaaatgaaaacctcaagtttgtggagattttaagaaatggttattccaatggaaacagctggagaacttatatttccgtgagaaaaaatttgctgttgaagttcatgatccacgaaggatttcagtttcaagaagaacctttgggcaaagtggcttgtttgtgcaaacatggtatgctaactcttctctcatcaagtccatttgggtaatggcaattagtcagcatcagttttacttggaccggaagcaaagcaaagcaaaaattccttcagccaggagtttagatgagattgcaatggatttgacagagacaggaacacaaagggcctccaagctggtgacactggagacgaaaagtcagttcatcatggcaagtaatggcagtttaatctcctcaggttctcaagactcagaagttagtgaagagcaaaagagagaaaaaatccttgaactaaagaagaaggagaaactattacaagaaaaacttctgaaaaaagttgaggagcttaagaagatctgtctgcgggaggctgagctcacaggcaaaatgccaaaggagtatcccctgaacataggcgagaagcctcctcaggtcagaagacgtgtgggtactgcgttcaaattagatgacaacttgctgccgagtgaagaagatcctgctttgcaagaactggagagtaattttctaatacaacaaaagctggtggaagctgcaaagaaacttgccaatgagccagacctttgtaaaactgtgaagaaaaagcgaaagcaagattacacagatgcgatgaaaaagcttcaggagattgaaaatgcaataaacgaataccgaattaggtgtggaaagaaacccagccagaaagcaacagtgttaccagaagacataatcccctcagagagtagctctttgtctgacaccaccacctatgatgatcccagtgatgccttcacttttcctgggcagcgatcaagttcagtacctcattctccaagaattcttccccccaagtctcttggtattgagcgaatccatttcagaaagtcgtccatcaatgaacagtttgtggataccaggcagtccagagaaatgctgtccacacacagcagcccttacaaaactctggagaggcggccccagggaggacgaagcatgcccaccacgccagttcttacccgaaacgcctacagcagcagccacttggaacccgaatcttcatctcagcactgccgccagcggagtggaagcctggagtcccagtcccacctgctctccgagatggacagcgataagccatttttctccctctccaaatcccaaagaagcagcagcacagaaatcctcgatgacgggtcttcttatacaagccaatcaagcacagagtattactgtgtgacaccagttaccggcccctattacaccacccagaccctggacactcgcaccaggggtcggaggaggtcaaagaaacagaatgtttctacttcaaattcaggaagcatgcccaacctagcacaaaaggatagtttgaggaatggtgtttactcaaagagtcaggagccaccgtcttccagttactacattgccgggtacacaccctatgcagagtgtgacttttattacagtggtggttatgtctatgagaatgacaccgagggacagtatagtgtcaacccttcctaccggtcctcagcccactatggatatgagcgccagagggactacagcagatcctttcacgaagatgaggtcgaccgggtaccccataacccatatgcaactctccggctgccaaggaaggctgctgcaaaatcggagcacatcaccaaaaacatccacaaggccttagttgccgagcacttgcgtggctggtaccagcgggcctctgggcagaaggatcagggacacagcccgcagaccagctttgactcagacaggggatcacagagatgcctggggtttgcggggctgcaagtaccttgttctccaagcagtcgtgcatcctcgtactcttcagtgtcttctacaaatgcttctgggaactggaggacccagttaaccatagggctgtcggattacgagactccagcacattcttcttacaccagctgctatggcaatgtctataatcctttaccctctccaagcagacaatacacagaaatcagtcaactggatggtacagatggaaaccagctggaagacaacctggagagtagtgagcagagactcttttggcatgaagattcaaagcctggaacattagtctgaactgcagttggacctcctgaccaagcactgcgttctcacactagtgtgccttgcaaattgtatttgtcttccgagaggatgttcgttttagaaacctaaagacatcaaaggttgaagagaagacttagttgccctggaagtgaatcagtgaatcacacaccaagccccacaaagcccctaaaggaggatttggcctttcaaactctaggcactaacgtaactgtagggtctgcccacatgttgaagtattgccaagagaggactcagtgtgaagccttcatcaatagcaagcactttttaagggagtaaaagttgttaaaggcaaacctcaaaaacatgaaagggcattcaggatgtcccatggcaataagaacaggggaaatctcagagcacaattcagcaggatgagagaaggggaaccagaagctccggagtcattgctcacttcagagtttgaattcgtgagctgacaaagagtaacatgctctttctacacagacatggacaatttagacagtattggaaaattacttgaagctggattttcatgaagttctgaatgagtgtaaatgttttttaggatactataaagagtgatgtttttcataagcaccataaaatgggttctggaaaaactgattaccttagcatcctgtaatataacttatggtagcagattggggaaaatgaagcagcccactgaataattgacaaagtctgcttggagaacattctaaggtacaatatcatggagctcctttttcctttctccactaattgcgtgatgagctattgttctggctgttaattctccaactcggctgtcatttgaagtggcagacttaatatggaaagtttttataattatgagtttgaaaaagcattttaagatgatacagaaagtatccaaaacaacagaaaaaaaaagccacgtcattttagatgaattgcgtgccttaaaatggtgaacgttagaaaattaaacaagtctggattccacaagtagttccaagtcaccaagtgacaaaaacaaggttaacattaaaaaagaaaa

SEQ ID NO: 7735 - DNA, 561 bp, Homo sapiens
  source 1..561: mol_type = unassigned DNA; mol_type = unassigned DNA
ggtttttatgtgtgtgggaatggacgcaaaggaaaacacagctgagctgcattgtaactcttcctgtagaacctgttcatgtccaggttattccaatggaaacagctggagaacttatatttccgtgagaaaaaatttgctgttgaagttcatgatccacgaaggatttcagtttcaagaagaacctttgggcaaagtggcttgtttgtgcaaacatggtatgctaactcttctctcatcaagtccatttgggtaatggcaattagtcagcatcagttttacttggaccggaagcaaagcaaagcaaaaattccttcagccaggagtttagatgagattgcaatggatttgacagagacaggaacacaaagggcctccaagctggtgacactggagacgaaaagtcagttcatcatggcaagtaatggcagtttaatctcctcaggttctcaagactcagaagttagtgaagagcaaaagagagaaaaaatccttgaactaaagaagaaggagaaactattacaagaaaaacttctgaaaaaagttgaggagcttaagaag

SEQ ID NO: 7736 - DNA, 548 bp, Homo sapiens
  source 1..548: mol_type = unassigned DNA; mol_type = unassigned DNA
gaaactcagttcagaactcaccggagctgccgtctgggaggggggagggcggaagaaccctgaggtttttcctcacatttctgtcccatttttggaacctctggatttaaagaaatgaaaacctcaagtttgtggagattttaagaaatggttattccaatggaaacagctggagaacttatatttccgtgagaaaaaatttgctgttgaagttcatgatccacgaaggatttcagtttcaagaagaacctttgggcaaagtggcttgtttgtgcaaacatggtatgctaactcttctctcatcaagtccatttgggtaatggcaattagtcagcatcagttttacttggaccggaagcaaagcaaagtaagtaactggcatcatttctatagggacagattccccttttgcattctgttcagaagataagccttctcacaaaagatgcaagcacatatatttttgctctctgagatttttttgcgtttaacttccaactatttcaggttttttatatgtttacatgatgggcaatatataagctgct

SEQ ID NO: 7737 - DNA, 505 bp, Homo sapiens
  source 1..505: mol_type = unassigned DNA; mol_type = unassigned DNA
agacggagtctcgctctgtcgcccaggctggagtgcagtggcgcgatctgggctcactgcaacctccgcctcccgggtgcacgccattctcctgcctcagcctcccgagtagctgggactacaggcacccaccagcacgcccggctaattttttttgtatttttagtagagacaaggtttcaccgtgttagcgaggatggtctcgatctcctgacctcgtgatccacctgcctcggcctcccaaagtgctgtgattacaggcgtgagccaccgcgcccggccgagttattccaatggaaacagctggagaacttatatttccgtgagaaaaaatttgctgttgaagttcatgatccacgaaggatttcagtttcaagaagaacctttgggcaaagtggcttgtttgtgcaaacatggtatgctaactcttctctcatcaagtccatttgggtaatggcaattagtcagcatcagttttacttggaccggaagcaaagcaaagtaa

SEQ ID NO: 7738 - DNA, 1830 bp, Homo sapiens
  source 1..1830: mol_type = unassigned DNA; mol_type = unassigned DNA
actctgaggactgactcttaccagctggggagcaaacaggccagctggagaccgagatgacagaaggcaggcactgccaggtgcacctcctggatgataggagactggagctgctggttcagcccaaacttctagcaagagagttgctggacctagtggcttcacatttcaacctgaaagaaaaggagtattttggaataacattcatagatgacacaggtcagcagaactggctgcagttagatcaccgagttcttgaccacgatttgcccaagaaaccaggcccaaccattttgcactttgctgtgaggttttacattgagagcatatcgtttttaaaggataaaaccaccgtggagctgtttttcctgaatgcaaaggcctgtgtgcacaaggggcaaatcgaagtagagagcgaaaccatcttcaagttagcagcgtttattttacaggaagccaagggagattataccagtgatgaaaatgccaggaaagatttaaagacattaccagcctttccaaccaaaactcttcaggagcatccatcccttgcctactgtgaggacagggtaattgagcattatttgaaaatcaaaggtctcactcgaggtcaagctgtggttcagtatatgaaaatagtagaagctctaccgacttacggtgtccattattatgcagtaaaggataagcaaggacttccttggtggcttggaataagctataagggaattggccaatatgatatacaagacaaggtgaagcctcggaagttattccaatggaaacagctggagaacttatatttccgtgagaaaaaatttgctgttgaagttcatgatccacgaaggtgaggatcaaagacgtttctctgtatgacacagttactatacaaataacgctgctatcaacatttgtgtacaagtttttatatgaacatatgttttcatttctcttgggtgtatacctaggaatggaattgctgggtcaaatggtaactatctttaaccctctgaggaatggcaaggctgcttttcaaagtgctgcaccattttacatcccaagcagcagtatatgtggttccaatgccgacacatcctcaccgacacttgttatttttagttttgtgtgcatgtatagtttatgccatcctagtgggttgaagtggtaccttcttgtggttttgatttgcacttccctcatgactaatgatggctgagcatcttttcatgtgctgcttagctattcctatatctttagtagagaaatgtctattcagatcttttgctcatttaaaatgttggtgttcttggtcatttaaaaaaaaaaaaaaaagccaaattaccaacatgaactgaagtcaggatgtgggttctcaaatatcttaggagaaatcccgcccccctccgcccgcccccaactgccagacagagtcttactctgtcacccagactgcagtgcagtggcgcaatctttgctcactgcaacctacacctcccaggttcaggtgatgctcatgcctcaacctcccaagtagctgggagtacaggcatgcaccaccacgccaagctaattttgtatttttagtagagacgggctttcaccatgttggccaggctggtctcaaactcctgacctcaggtgatccgcccgtctccgcctcccaaagtgctgagccatggcacccggccttaagagaaattcttaatcagtccttagtgggtacttttcagtcccgagatggttatggatgtttagaggccagagggatgggaggaaatacctgtgataaaaaggtgacctgaagagataagccaaattcctacaaagaac

SEQ ID NO: 7739 - DNA, 566 bp, Homo sapiens
  source 1..566: mol_type = unassigned DNA; mol_type = unassigned DNA
atttgatcgtaaactggaggtgccaagctgtgacagcttcctcaacttcagagccatttgctacaatctaggacagccccatgttcaatgatgctttccttttccatcaacaggggcaaatcgaagtagagagcgaaaccatcttcaagttagcagcgtttattttacaggaagccaagggagattataccagtgatgaaaatgccaggaaagatttaaagacattaccagcctttccaaccaaaactcttcaggagcatccatcccttgcctactgtgaggacagggtaattgagcattatttgaaaatcaaaggtctcactcgaggtcaagctgtggttcagtatatgaaaatagtagaagctctaccgacttacggtgtccattattatgcagtaaaggataagcaaggacttccttggtggcttggaataagctataagggaattggccaatatgatatacaagacaaggtgaagcctcggaagttattccaatggaaacagctggagaacttatatttccgtgagaaaaaatttgctgttgaagttcatgatccacgaagg

SEQ ID NO: 7740 - DNA, 550 bp, Homo sapiens
  source 1..550: mol_type = unassigned DNA; mol_type = unassigned DNA
acaccccccactttcccctgcaatggtatgatctgcatttgatcgtaaactggaggtgccaagctgtgacagcttcctcaacttcagagccatttgctacaatctaggacagccccatgttcaatgatgctttccttttccatcaacaggggcaaatcgaagtagagagcgaaaccatcttcaagttagcagcgtttattttacagtgatgaaaatgccaggaaagatttaaagacattaccagcctttccaaccaaaactcttcaggagcatccatcccttgcctactgtgaggacagggtaattgagcattatttgaaaatcaaaggtctcactcgaggtcaagctgtggttcagtatatgaaaatagtagaagctctaccgacttacggtgtccattattatgcagtaaaggataagcaaggacttccttggtggcttggaataagctataagggaattggccaatatgatatacaagacaaggtgaagcctcggaagttattccaatggaaacagctggagaacttatatttccgtgagaaaaaat

SEQ ID NO: 7741 - DNA, 549 bp, Homo sapiens
  source 1..549: mol_type = unassigned DNA; mol_type = unassigned DNA
agaaatgctaatgggaggagcccaaataacagtgacaaaaccttcctgagcaaattctcttctcaagaaattacacttgtgaagccgaggttttacattgagagcatatcgtttttaaaggataaaaccaccgtggagctgtttttcctgaatgcaaaggcctgtgtgcacaaggggcaaatcgaagtagagagcgaaaccatcttcaagttagcagcgtttattttacaggaagccaagggagattataccagtgatgaaaatgccaggaaagatttaaagacattaccagcctttccaaccaaaactcttcaggagcatccatcccttgcctactgtgaggacagggtaattgagcattatttgaaaatcaaaggtctcactcgaggtcaagctgtggttcagtatatgaaaatagtagaagctctaccgacttacggtgtccattattatgcagtaaaggataagcaaggacttccttggtggcttggaataagctataagggaattggccaatatgatatacaagacaaggtgaagcctcggaag

SEQ ID NO: 7742 - DNA, 569 bp, Homo sapiens
  source 1..569: mol_type = unassigned DNA; mol_type = unassigned DNA
cagcacttgcactctgaggactgactcttaccagctggggagcaaacaggccagctggagaccgagatgacagaaggcaggcactgccaggtgcacctcctggatgataggagactggagctgctggttcagcccaaacttctagcaagagagttgctggacctagtggcttcacatttcaacctgaaagaaaaggagtattttggaataacattcatagatgacacaggtcagcagaactggctgcagttagatcaccgagttcttgaccacgatttgcccaagaaaccaggcccaaccattttgcactttgctgtgaggttttacattgagagcatatcgtttttaaaggataaaaccaccgtggagctgtttttcctgaatgcaaaggcctgtgtgcacaaggggcaaatcgaagtagagagcgaaaccatcttcaagttagcagcgtttattttacaggaagccaagggagattataccagtgatgaaaatgccaggaaagatttaaagacattaccagcctttccaaccaaaactcttcaggagcatccatcccttgcctactg

SEQ ID NO: 7743 - DNA, 581 bp, Homo sapiens
  source 1..581: mol_type = unassigned DNA; mol_type = unassigned DNA
actggcttgtagttggagaaaatgcaagcacatgcgcgcacacacacgcgcgcgcacacacacacacaccgcacaagtgcttaatacgtgtgtcttttgtcttaagcactctcttcagttcctttaaatgagccgaggtcatggtggttcggagatgacagaaggcaggcactgccaggtgcacctcctggatgataggagactggagctgctggttcagcccaaacttctagcaagagagttgctggacctagtggcttcacatttcaacctgaaagaaaaggagtattttggaataacattcatagatgacacaggtcagcagaactggctgcagttagatcaccgagttcttgaccacgatttgcccaagaaaccaggcccaaccattttgcactttgctgtgaggttttacattgagagcatatcgtttttaaaggataaaaccaccgtggagctgtttttcctgaatgcaaaggcctgtgtgcacaaggggcaaatcgaagtagagagcgaaaccatcttcaagttagcagcgtttattttacaggaagccaagggagattataccagtgatgaaa

SEQ ID NO: 7744 - DNA, 923 bp, Homo sapiens
  source 1..923: mol_type = unassigned DNA; mol_type = unassigned DNA
agggcttcccgtgccccgggagcatcgagggccagcttggtggagcttagcacagcttgctcggcgctgcgagcgggcgggggtggacactgggcttctgtgtgccagtcgcagccgttggctggcgggcacccaatcccagggcatgccgccggagcctggccaggacgcacggtgaaagacgagtttggtggcaggcttgaccccccggctgccagcagaagccggcgtcgggagcccaggcgggcaggccgctggggtcggggctgcacgtacgagagccgggacgcccgggttcagagcgaaggaggaggcatggcttcggtgttcatgtgtggcgtggaggacctgctgttcagcggcagccgcttcgtatggaacttgaccgtgtccacgctgcggagatggtacacggagaggctgcgggcttgccaccaggtgctgcggacgtggtgcgggctgcaggacgtgtaccagatgacagaaggcaggcactgccaggtgcacctcctggatgataggagactggagctgctggttcagcccaaacttctagcaagagagttgctggacctagtggcttcacatttcaacctgaaagaaaaggagtattttggaataacattcatagatgacacaggtcagcagaactggctgcagttagatcaccgagttcttgaccacgatttgcccaagaaaccaggcccaaccattttgcactttgctgtgaggttttacattgagagcatatcgtttttaaaggataaaaccaccgtggagctgtttttcctgaatgcaaaggcctgtgtgcacaaggtaggtgccccgtttgtcatgttcactggatgcctccagagcgactgggatgacaggaagaaatggttttgcctctcttcttgcattcaaactaagaaaaaaaaaaa

SEQ ID NO: 7745 - DNA, 846 bp, Homo sapiens
  source 1..846: mol_type = unassigned DNA; mol_type = unassigned DNA
agcgagaggaggcaggcaggacggaaggacgcgagaaaggcggcccggggcacagctgtaagtgtggagcaaagcgaggacgcacggcgagcggcggtggcgggggcgacctgcagacccgggccgggggatgcggcaggcgctggctgcccagagagcccgggagtcgggctgcgtagctcacgtgctgagctggagcttggacagagaggaagaggaagaagaggaaggcagccgccgccggggaaggcacagcgcagagtggacttgcaggactggcgcagagccgggtccccaggtcccgcgcggtgcgcagccgagacaataaagtagccgtctacagccccggagcgccgcagggaggaggtggcggagcaggctttgatgagaaatccagaagaaagagtgtatgaaagaaaaagatgacatctatgcatagcaaacaaaatctgaagattattacagtaaaaacaaaagaaaggcaagagaatacttactagttaaagatgacagaaggcaggcactgccaggtgcacctcctggatgataggagactggagctgctggttcagcccaaacttctagcaagagagttgctggacctagtggcttcacatttcaacctgaaagaaaaggagtattttggaataacattcatagatgacacaggtcagcagaactggctgcagttagatcaccgagttcttgaccacgatttgcccaagaaaccaggcccaaccattttgcactttgctgtgaggttttacattgagagcatatcgtttttaaaggataaaaccaccgtggagctgtttttcctgaatgcaaaggcctgtgtgcacaagg

SEQ ID NO: 7746 - DNA, 571 bp, Homo sapiens
  source 1..571: mol_type = unassigned DNA; mol_type = unassigned DNA
agatggacaaagtctttccaccagtaatcagcacttgcactctgaggactgactcttaccagctggggagcaaacaggccagctggagaccgagatgacagaaggcaggcactgccaggtgcacctcctggatgataggagactggagctgctggttcagcccaaacttctagcaagagagttgctggacctagtggcttcacatttcaacctgaaagaaaaggagtattttggaataacattcatagatgacacgccaagaggagaaacggaaaaatagatggcaattacgcaataaaagcagtgatgatgaccaacaaccacagattcaaggtcacgttactgggagagggatagcatttctgagattacgcttgttagggccttgcgcagctctgtgtgcaaagttagtctttcacccctagagggcagtcacggccctcctgaggcaccagtccttcaggtcaccgtagtggttccatctcttcacccatttcactttttgttttgccttctcatgttttgaaaggctttgctaaataagctttgtttaccaagaaataacagatag

SEQ ID NO: 7747 - DNA, 555 bp, Homo sapiens
  source 1..555: mol_type = unassigned DNA; mol_type = unassigned DNA
attcctgcgatctgttaggacttgtaaacataccagagccaagtcctctgaacttcgcgaactgatttggtgtgtttgctggtacccagacggctgcgactagaggctgggcctttcgggaagaaagaccttagggtgctgatggcagcagtctttccgggaagctggttgatccttgaagattaggctttgatgagaaatccagaagaaagagtgtatgaaagaaaaagatgacatctatgcatagcaaacaaaatctgaagattattacagtaaaaacaaaagaaaggcaagagaatacttactagttaaagatgacagaaggcaggcactgccaggtgcacctcctggatgataggagactggagctgctggttcagcccaaacttctagcaagagagttgctggacctagtggcttcacatttcaacctgaaagaaaaggagtattttggaataacattcatagatgacaccccaatttgcctacattttatgcagcccgatacattatcagaggaatccttccactttctgcagataatttccaaagagc

SEQ ID NO: 7748 - DNA, 777 bp, Homo sapiens
  source 1..777: mol_type = unassigned DNA; mol_type = unassigned DNA
tgagttctctctcccactttgacagccctgattttgcaactgagtgtagataactttgagcacttcagaatctcctcctacagagacagtagaagtctaaaacggtgtattcagtgacatgcatcctgtaagaagccaaattggctttgatgagaaatccagaagaaagagtgtatgaaagaaaaagatgacatctatgcatagcaaacaaaatctgaagattattacagtaaaaacaaaagaaaggcaagagaatacttactagttaaagagataaggtctcaccatgttgtccagactggacttgaactcctggcttcaagcaatctgcccacctccgcctcccaaagtcctgggatttataggcatgaaccaccgcacctggcctccccaccattttattttctcccgtggctatcacaaccaggaataagagagggagggggacctcagtggtgattttatgctaaggattatggataacaccatccccccattttacaaatgaagaaactggggctcaaaaagcttaattaaatgtctaaggccactgaggcagcaattaaagaggatgtgaagccagtctgctttgtcttcttctggagcctctccttgaggctgacacacctgatcatagccccattatcttaagagtgttagccatatccagtggccagcacactctagacacttctgttattgtagagagacctgttagagatggatgcaagagatttaccctttttcagccttgcctctgctgtcttggggaagtgg

SEQ ID NO: 7749 - DNA, 477 bp, Homo sapiens
  source 1..477: mol_type = unassigned DNA; mol_type = unassigned DNA
gaacttgaccgtgtccacgctgcggagatggtacacggagaggctgcgggcttgccaccaggtgctgcggacgtggtgcgggctgcaggacgtgtaccagataagtaccagtgcaaaagccttttggattatttctcattcttccacttttgcctcacccactccagtttggtctcctcacaagataaggtctcaccatgttgtccagactggacttgaactcctggcttcaagcaatctgcccacctccgcctcccaaagtcctgggatttataggcatgaaccaccgcacctggcctccccaccattttattttctcccgtggctatcacaaccaggaataagagagggagggggacctcagtggtgattttatgctaaggattatggataacaccatccccccattttacaaatgaagaaactggggctcaaaaagcttaattaaatgtctaaggccactgaggcagcaattaa

SEQ ID NO: 7750 - DNA, 574 bp, Homo sapiens
  source 1..574: mol_type = unassigned DNA; mol_type = unassigned DNA
agcagaagccggcgtcgggagcccaggcgggcaggccgctggggtcggggctgcacgtacgagagccgggacgcccgggttcagagcgaaggaggaggcatggcttcggtgttcatgtgtggcgtggaggacctgctgttcagcggcagccgcttcgtatggaacttgaccgtgtccacgctgcggagatggtacacggagaggctgcgggcttgccaccaggtgctgcggacgtggtgcgggctgcaggacgtgtaccagctcatcacctgacagaaatttctaaaagaaacatgtcacctaaactcaacaaaattagtcccaggttctttgaaaagcatttttgaacctttgttgcacagcttgaaaagcatcaagaacggactctccggactcttcaaatgagtgtttgtttttcacattccatcttttcttggtggagcttgtagcataaaataactttctcattcatcccctacttatgtttattctgaacattatatttttgttgtcccagttggttgttgtggaaaagtctgaatgactcaaatgaggaatcagatctgcagttcta

SEQ ID NO: 7751 - DNA, 4971 bp, Homo sapiens
  source 1..4971: mol_type = unassigned DNA; mol_type = unassigned DNA
ggccgcgaccgtgcccgccgctgggcggggccgcccttctccgagagcgtcagcccgctaggtccttgtccgcgcgggcggcacctcctctgcaggtaaatggaagagctggagaccagtttattccagacacggaaagcacatagaatagaacaaatggtggcaagatggcttcggcgctcccgggacagctcggcccgggctaaagttgctgcagctgatgggcccgccaggaacccaactcagaccctcatccctgtgcgacacacagtaaagatagacaaagacaccctcctccaggactatggatttcacatttctgagagccttccccttacagtggtggctgtcacagcaggaggctctgctcacggcaagcttttccctggtgatcagatcctccaaatgaacaatgagcctgctgaagacctttcctgggaacgagcagtcgatattctcagggaagcagaagattctctttcaatcacagttgttcgctgcacgtcgggagtccctaaatcgtccttcctgaccgaggagaagagagccagactgaagaccaaccccgtgaaggtgcactttgctgaagaagtgctcatcagtggacacagccagggtaattctctgctgtgtatgcccaacgtgctcaagctatacttggagaatggacagaccaaagctttcaagtttgaggcaaacacaaccgtgaaggacatcatcctcaccgtgaaggagaagctgtccatccgaagtatcgagtactttgcactggccctggaagagcagtacagcatctcccggctgcacctgctgcacgaagaggaactcatccagcaggtggtagaaagggaggagtcacatgactaccgctgcctcttcagggtctgttttgttcccaaggaccccctggacctcctgaaagaagaccccgtggcctttgaatacctctatctgcagagctgcagcgatgtgctccaggagcgctttgctgtagaaatgaaatgtagctctgcactccgactcgcggctctgcacatccaggaacggatctacgcctgtgcccagccacagaagatctctttaaagtatatagagaaagactggggaatagagaactttatatctccaactttactccgaaacatgaaaggcaaagacatcaagaaagccattagcttccacatgaagaggaaccagaatttgctggaaccccgacagaagcaacttatttctgctgcccagctacgtttaaattatctacagatcctcggagaactcaagacatatggtggaagaatctttaatgctactttaatgttacaggatagagaatcctacattgcccttctagttggagccaagtatgggattagccaggttatcaatagcaaactcaacatcatgtccacattggcagagtttgcaaacatcagccgtgtagagctaacggaagagtctgagaaagtgagcgtcgtcaaagtgtatcttcaggacgtcaaggttctgactttgctgctggaatccaacagtgcaaaagacctagcctgcctgattgctgggtactacaggctgttggttgacccagttacctccattttcctctggcctggaaacaaacaacaagcgcaccgggtatctgcagaagaaggctatgaatccagggcctgcagtgactcagaggagtcctctgaggtggactgcgtactcgaacctctctctgacaggcgcctggtgaaactggcaccctgcagatcactcataaaggaggagcagcctcctgggaacagccccacacctgaggtggctaggaggggccccagcacctgcggggccagcagcacgacagacagtgccgagtccgaggcgtccgactcagccaacactgagagccgcggctacaggaccagtggctcgagtgagtccatggacgctctggaagaggatgacttagacacctgctcctccagcaggtccaccttcttccactttggctcgccaggcctcgcagagagcattgactctgacagccaggaggagagaagcgggattgaaaccagtggcttcctctgtctcctggacctggcccagagagccaacccccagtgccagaagacagagttttccgagagtgctgctttggagacatttggctgggcaccagaactgagcacagtcaggctggaccccaggctgtatgaaggcagccacgctgactactacagcctgtgttccagtgtctccccggccagctacctgagtgacagttccgagagtacagcttcccggcaagggggagccccgccagcctggggtcagcagggctggactgaggcccagcccagttccatgctggaacccctggccctgcacccaccactggcctttgaggatggcagctcagatgaggaatactatgacgcggctgataagctcactcccccaggccccccgtcagggcccagagatgtttctactgcagaacccagtgccacaagcttgcagaataaggccagcacttctagccctgagaacagcctgccttgtgggccagatggaagacagccaagcaggaggggaggggtgaagaaatatgccaagaccctgaggaaaagaaggtctttcctacagaccgactacacctctcaggtctcatttcccctggtgccatcagcctccctggagagtgtagacgacgtgtgctactatgacagggagccctacctggcccttggtgcaccctccccaactgtgtcctctctgcaggacatgcagggtgagcctggccttctggagaccaaggccttggggctgctggctcctctgagggagaccaagagcacaaacccagcctccagggtcatggagatggagcccgagaccatggaaaccaaatcagtcatcgactctcgagtgtcttctatttctgccattcgcttccggattgaccccaacaataaagagaattctggtgttgtccctgctgccagctcctcagcaagcactcctcactgttctaacccaggttcatctggcccagatactgctcaggcaaggccttcccaaatcttacctctatctcaagacctggatgggattgcccccaaagaaccaaccatagagcatggagacagctccttctccctctccagtggtgaccctaacccagacagagcctgcctggccagcaacccaggactaaataatgtctctcaaggagacacactagagctccagttggagccccatgtccagttggaaatgggattggaatctttttgtacaaatcatatacaagaaactgcccccaaatacacagagcctttgttgtctcctagagatgagcctagaagtgatgaatgtggaataaatccaggagagaagatagcttctatccctacaaaggaagagccacaaggacaactatctctggaaagagacagagaagttacaaacaaaaatggcaccaacgtatttcaggaggagtctaggaaggattcaggtgactccccgggtgatgtgtcaaataatgtttcacagactcttgatattagctctccagctggtaaaatagtaacctccctttctttagatgctcctgtaacagggaccgagcagatcccaccacatccccctagagaccctcaaggacagagcagagaacccccagggcaaggctgccaggctcaagaacaaaaactattcgtagagttggatttagaccctgatttctttcttgggaagcagacagtttcaccagccgtccctccagaggggatcaaggcagaggcacctaaccatgtgacagggcaagatatagcccctagggacagccctgagtgggtctgttttaatcctgagccttccctgccagaaccactaccatgtccacaagaggatcctcacttagaaacttcaaaccattgcttactctcagaaggcaaaagtgacagctctagcatctgcctttctgctgagaagtcttttctgtgctttgccccagaaagccatcctgaagtctctgccagtctcagggtggccacatctttgggttttgcaggcatgaatgagatggtggctcccaggatagggatggaccagtgcagctgtcagttctcctatgccacatgcttccgtggcccgcagcctgagacagaggaagaagacagggacttggaagcacaccccatggcccccctcacctcaccgccctctgcgggaagcccggtggttctgccctggaggcctgcccgagcccacagctgcaccaccgcacccctgtcgaggaaaagccacatctggccagagtactgctccagggcactgagacagctgaaagccacccctgccagcacccctgagggcttcatccaactcatggagagcttgctggagctacaagacattttagaaacttcctggggggttggaaacaaacatcccccagagaagtgcacctggcactttaccgaaagccggagccgcctctgcatgggctcccagaagctcctgtcgagctgtcggcatgtgatcagaatggaccagtcccccgaagagatgcagggggccgtgcgtgacaccttccagcacctggtccagctggccggcctgtgctttcagttcacagactgtagccgctgctccgcccggcacagggaggcagcggggaacctgagggatgtggtgtacacctaccatcagtttatagaggctgctaaatcgacctgcgagagaggctaccacgacctgagtgtgaaactcctggcccgtcagtgcacggccctcacggccgccgtgttctgtttgacccagaagttccgggcatccacggccctgtaaacaggtcaacggcccaagggcctcctgccctgtcctgccttggacacttccctgagaagccccttccactctcccacccaccctcttcaaatgtttactatatagagtattcaaataaactgctgcttaatcttg

SEQ ID NO: 7752 - DNA, 5465 bp, Homo sapiens
  source 1..5465: mol_type = unassigned DNA; mol_type = unassigned DNA
gaacacaactgggcagaactagcaggagaccaagtattatgtggcacagaataaactctacaactataaaatggatgcatcatgagaccttgggtgtcatcttctgtgttgcccttggcacagaggaagccagtttgccaatcaaggacctctagggtttcctctctcgactggctcaagtggttgaggtcttgaggatgagaatgccatctgcaggactcctgtgcctgtcgtgctgaaaggagagaagccagacatgttgacaggcatagctgcagctgcccagtatccgcagatgaggagggtcatgctcctgtgaggagggggcccgtgccacagagataccacccaactttgcccacatggcctggcagtcggttttacttgggcttatcgatgagctatgggaaggtcatttgatattcacattcttgtggccgcaatgttgggaatgtggccttttatctttaaaaatagctgtgtgctgggaggcccgggagcagtgtcctgggatggaggggagctgccagcagggggaagaggtgtggatttctttccgaggaagagtcccttcagctctgtgccactggtaaatggaagagctggagaccagtttattccagacacggaaagcacatagaatagaacaaatggtggcaagatggcttcggcgctcccgggacagctcggcccgggctaaagttgctgcagctgatgggcccgccaggaacccaactcagaccctcatccctgtgcgacacacagtaaagatagacaaagacaccctcctccaggactatggatttcacatttctgagagccttccccttacagtggtggctgtcacagcaggaggctctgctcacggcaagcttttccctggtgatcagatcctccaaatgaacaatgagcctgctgaagacctttcctgggaacgagcagtcgatattctcagggaagcagaagattctctttcaatcacagttgttcgctgcacgtcgggagtccctaaatcgtccttcctgaccgaggagaagagagccagactgaagaccaaccccgtgaaggtgcactttgctgaagaagtgctcatcagtggacacagccagggtaattctctgctgtgtatgcccaacgtgctcaagctatacttggagaatggacagaccaaagctttcaagtttgaggcaaacacaaccgtgaaggacatcatcctcaccgtgaaggagaagctgtccatccgaagtatcgagtactttgcactggccctggaagagcagtacagcatctcccggctgcacctgctgcacgaagaggaactcatccagcaggtggtagaaagggaggagtcacatgactaccgctgcctcttcagggtctgttttgttcccaaggaccccctggacctcctgaaagaagaccccgtggcctttgaatacctctatctgcagagctgcagcgatgtgctccaggagcgctttgctgtagaaatgaaatgtagctctgcactccgactcgcggctctgcacatccaggaacggatctacgcctgtgcccagccacagaagatctctttaaagtatatagagaaagactggggaatagagaactttatatctccaactttactccgaaacatgaaaggcaaagacatcaagaaagccattagcttccacatgaagaggaaccagaatttgctggaaccccgacagaagcaacttatttctgctgcccagctacgtttaaattatctacagatcctcggagaactcaagacatatggtggaagaatctttaatgctactttaatgttacaggatagagaatcctacattgcccttctagttggagccaagtatgggattagccaggttatcaatagcaaactcaacatcatgtccacattggcagagtttgcaaacatcagccgtgtagagctaacggaagagtctgagaaagtgagcgtcgtcaaagtgtatcttcaggacgtcaaggttctgactttgctgctggaatccaacagtgcaaaagacctagcctgcctgattgctgggtactacaggctgttggttgacccagttacctccattttcctctggcctggaaacaaacaacaagcgcaccgggtatctgcagaagaaggctatgaatccagggcctgcagtgactcagaggagtcctctgaggtggactgcgtactcgaacctctctctgacaggcgcctggtgaaactggcaccctgcagatcactcataaaggaggagcagcctcctgggaacagccccacacctgaggtggctaggaggggccccagcacctgcggggccagcagcacgacagacagtgccgagtccgaggcgtccgactcagccaacactgagagccgcggctacaggaccagtggctcgagtgagtccatggacgctctggaagaggatgacttagacacctgctcctccagcaggtccaccttcttccactttggctcgccaggcctcgcagagagcattgactctgacagccaggaggagagaagcgggattgaaaccagtggcttcctctgtctcctggacctggcccagagagccaacccccagtgccagaagacagagttttccgagagtgctgctttggagacatttggctgggcaccagaactgagcacagtcaggctggaccccaggctgtatgaaggcagccacgctgactactacagcctgtgttccagtgtctccccggccagctacctgagtgacagttccgagagtacagcttcccggcaagggggagccccgccagcctggggtcagcagggctggactgaggcccagcccagttccatgctggaacccctggccctgcacccaccactggcctttgaggatggcagctcagatgaggaatactatgacgcggctgataagctcactcccccaggccccccgtcagggcccagagatgtttctactgcagaacccagtgccacaagcttgcagaataaggccagcacttctagccctgagaacagcctgccttgtgggccagatggaagacagccaagcaggaggggaggggtgaagaaatatgccaagaccctgaggaaaagaaggtctttcctacagaccgactacacctctcaggtctcatttcccctggtgccatcagcctccctggagagtgtagacgacgtgtgctactatgacagggagccctacctggcccttggtgcaccctccccaactgtgtcctctctgcaggacatgcagggtgagcctggccttctggagaccaaggccttggggctgctggctcctctgagggagaccaagagcacaaacccagcctccagggtcatggagatggagcccgagaccatggaaaccaaatcagtcatcgactctcgagtgtcttctatttctgccattcgcttccggattgaccccaacaataaagagaattctggtgttgtccctgctgccagctcctcagcaagcactcctcactgttctaacccaggttcatctggcccagatactgctcaggcaaggccttcccaaatcttacctctatctcaagacctggatgggattgcccccaaagaaccaaccatagagcatggagacagctccttctccctctccagtggtgaccctaacccagacagagcctgcctggccagcaacccaggactaaataatgtctctcaaggagacacactagagctccagttggagccccatgtccagttggaaatgggattggaatctttttgtacaaatcatatacaagaaactgcccccaaatacacagagcctttgttgtctcctagagatgagcctagaagtgatgaatgtggaataaatccaggagagaagatagcttctatccctacaaaggaagagccacaaggacaactatctctggaaagagacagagaagttacaaacaaaaatggcaccaacgtatttcaggaggagtctaggaaggattcaggtgactccccgggtgatgtgtcaaataatgtttcacagactcttgatattagctctccagctggtaaaatagtaacctccctttctttagatgctcctgtaacagggaccgagcagatcccaccacatccccctagagaccctcaaggacagagcagagaacccccagggcaaggctgccaggctcaagaacaaaaactattcgtagagttggatttagaccctgatttctttcttgggaagcagacagtttcaccagccgtccctccagaggggatcaaggcagaggcacctaaccatgtgacagggcaagatatagcccctagggacagccctgagtgggtctgttttaatcctgagccttccctgccagaaccactaccatgtccacaagaggatcctcacttagaaacttcaaaccattgcttactctcagaaggcaaaagtgacagctctagcatctgcctttctgctgagaagtcttttctgtgctttgccccagaaagccatcctgaagtctctgccagtctcagggtggccacatctttgggttttgcaggcatgaatgagatggtggctcccaggatagggatggaccagtgcagctgtcagttctcctatgccacatgcttccgtggcccgcagcctgagacagaggaagaagacagggacttggaagcacaccccatggcccccctcacctcaccgccctctgcgggaagcccggtggttctgccctggaggcctgcccgagcccacagctgcaccaccgcacccctgtcgaggaaaagccacatctggccagagtactgctccagggcactgagacagctgaaagccacccctgccagcacccctgagggcttcatccaactcatggagagcttgctggagctacaagacattttagaaacttcctggggggttggaaacaaacatcccccagagaagtgcacctggcactttaccgaaagccggagccgcctctgcatgggctcccagaagctcctgtcgagctgtcggcatgtgatcagaatggaccagtcccccgaagagatgcagggggccgtgcgtgacaccttccagcacctggtccagctggccggcctgtgctttcagttcacagactgtagccgctgctccgcccggcacagggaggcagcggggaacctgagggatgtggtgtacacctaccatcagtttatagaggctgctaaatcgacctgcgagagaggctaccacgacctgagtgtgaaactcctggcccgtcagtgcacggccctcacggccgccgtgttctgtttgacccagaagttccgggcatccacggccctgtaaacaggtcaacggcccaagggcctcctgccctgtcctgccttggacacttccctgagaagccccttccactctcccacccaccctcttcaaatgtttactatatagagtattcaaataaactgctgcttaatcttg

SEQ ID NO: 7753 - DNA, 499 bp, Homo sapiens
  source 1..499: mol_type = unassigned DNA; mol_type = unassigned DNA
ggggtcgggagttggagaccagcctgaccaacatggagaaaccccaactctactaaaaatacaaaattagccgggcatggtggcgcatgcctgtaatcccagctactcgggaggctgaggcaggagaatcgcttgaacccgggaggcggaggttgtggtgagctgagatcacgccattgcactccagcctgggcaacaagagcaaaactctctctcaaaaaaaaaaaaagaaaagaaaaaagaaagtaaataggggatttgaacagaaacaggtttgcaggtagaaaaaaacgtctcaaccactgaggtaaatggaagagctggagaccagtttattccagacacggaaagcacatagaatagaacaaatggtggcaagatggcttcggcgctcccgggacagctcggcccgggctaaagttgctgcagctgatgggcccgccaggaacccaactcagaccctcatccctgtgcgacacacagtaaagatagacaaaga

SEQ ID NO: 7754 - DNA, 2699 bp, Homo sapiens
  source 1..2699: mol_type = unassigned DNA; mol_type = unassigned DNA
attcttgtgtgtgtgtatgtctatgtttttctccccaaattcagaccatgataagtttgtgcaaatggccaatttgagtcctgcacaccaggcccggtctaagcctctcatttggattcagagattgtcatgctcagaaaacgagttgtttgtatccaggcttcagggtgctgcaggaggcctgctgagtacatcaatggataacttcaacgtggacggcagcaaggaggctggagcagaaggcatcgggcgcagcccctgcactggccgggagcagctgaagagtgcctgtgtgatccagaagccaatgacctgggactctctctctggaccacctgttcagagcatgcatgcaggctcaaagaataataggaggaagagctttatagctgaaccgggccgagaaattgtacgtgtgacactgaaacgtgacccacatcgtggttttgggtttgtcattaatgagggagagtattcaggccaagctgaccctggcatttttatatcttctattatacctggaggaccagcagaaaaagcaaaaacgatcaaaccaggagggcagatactagccctgaatcacatcagtctggagggcttcacattcaacatggctgttaggatgatccagaattcccctgacaacatagaattaattatttctcagtcaaaaggtgttggtggaaataacccagatgaagaaaagaatagcacagccaattctggggtctcctctacagacatcctgagcttcgggtaccagggaagtttgttgtcacacacacaagaccaggacagaaatactgaagaactagacatggctggggtgcagagcttagtgcccaggctgagacatcagctttcctttctgccgttaaagggtgctggttcttcttgtcctccatcacctccagaaatcagtgctggtgaaatctactttgtggaactggttaaagaagatgggacacttggattcagtgtaactggtggcattaacaccagtgtgccatatggtggtatctatgtgaaatccattgttcctggaggaccagctgccaaggaagggcagatcctacagggtgaccgactcctgcaggtggatggagtgattctgtgcggcctcacccacaagcaggctgtgcagtgcctgacgggtcctgggcaggttgcaagactggtcttagagagaagagtccccaggagtacacagcagtgtccttctgctaatgacagcatgggagatgaacgcacggctgtttccttggtaacagccttgcctggcaggccttcgagctgtgtctcagtgacagatggtcctaagtttgaagtcaaactaaaaaagaatgccaatggtttgggattcagtttcgtgcagatggagaaagagagctgcagccatctcaaaagtgatcttgtgaggattaagaggctctttccggggcagccagctgaggagaatggggccattgcagctggtgacattatcctggccgtgaatggaaggtccacggaaggcctcatcttccaggaggtgctgcatttactgagaggggccccacaggaagtcacgctcctcctttgccgaccccctccaggtgcgctgcctgagctggagcaggaatggcagacacctgaactctcagctgacaaagaattcaccagggcaacatgtactgactcatgtaccagccccatcctggatcaagaggacagctggagggacagtgcctccccagatgcaggggaaggcctgggtctcaggccagagtcttcccaaaaggccatcagagaggcacaatggggccaaaacagagagagaccttgggccagttccttgacacattctcctgagtcccaccctcatttatgcaaacttcaccaagaaagggatgaatcaacattggcgacctctttggaaaaggatgtgaggcaaaactgctattcagtttgtgatatcatgagacttggaagtcctgaattggatggggaggatggggaaggtgacatgtaccatccatgtggagccccttctcccacctcggaggatgaagagtatcttaccatcaactctacatgccaaggccagctaccctgtgaagaatgtttggaggcagattctgggaccattcccttgccacagttctgctcttggggcactgtcccagagtctttgcctccagaagagtccccagagagtgggagtgaatgggaagacctggaggagcctgtggccctggaatacggtgccctcaggtctctctcttttgggggtctgaatgtctagtgctgattcctgttttgcctgctcctacctgcccctctgctggatgtactgcagagaagagtcttggtgtcctgtcatagggcccatcttgttggactgctgtggctgagtatagaccagcatcaggaaagtctcactgttaatgcaaggagccaccagaagctgacctggtcaccaggcagggtcagaacatattgatgaggacacagaaaaaataaacacagagaacagccgtcttccgaggcagagactgagggtttctgcatggaggtcctttggatagaagagccctcaggtgaccttggtccaaagagtgtacccaccagctctgccactgggaaagaaacctgtaggctcctgcaaaggtgacctgggatgaagggcctggcccagttgttaagagctcacttcaaga

SEQ ID NO: 7755 - DNA, 4453 bp, Homo sapiens
  source 1..4453: mol_type = unassigned DNA; mol_type = unassigned DNA
aaagacagcggcaacagtgctggtggcagggagctccgcggacagacttgcaagagacccctgctccttgttggaaagttgtcccatgatgaaggcctagacctggtcacggagacttttggatgcagcctttaacgaaggacgcaggcatgagcctgtcctctgtgacgctggccagcgccctacaggtcaggggtgaagctctgtctgaggaggaaatctggtccctcctgttcctggccgctgagcagctcctggaagacctccgcaacgcccctgcagctctgcgagcccctgcactccatcctgctgaccatgtgtgaagaccagcctcacaggcggtgcacgttgcagtcggttctggaagcttgtcgggttcatgagaaagaagtgtctgtctacccagcccctgctggtctccacatcagaaggctggttggcttggttctgggtaccatttctgaggtggagaaaagagttgtggaggaaagctcctctgtgcagcagaacagaagctacctgctcaggaagaggctgcgtgggacaagcagcgagagcccagcggcacaggccccggagtgtctgcatccttgcagagtttcagaaagaagcacggagacccagagctcaccagagccccattggagcaccttgacacacagtcactgcagcctccttgttaaccgcgctcttccaggagcagatccccaggaccagcaggcgggccggaggctcagctctggatctgtgcactcggcagcagacagctcatggccaacaactccttctcagaggggttttctgcaaagaaggagcaagttttccaggccagagttcatcctgttggctggagaggccccgatgacactacatctgccgggatcggttgtgaccaaaaaagggaaatcctatttggctctcagggacctctgtgtggtcctgctgaacgggcagcacctggaggtaaaatgtgatgttgaatcaacagtgggagctgtcttcaatgccgtgacatcctttgccaacctcgaggaactcacctactttggcttggcgtatatgaaaagcaaagagttctttttcctggacagtgaaaccagattgtgcaaaatagctcctgaaggctggagagagcagcctcagaagacctccatgaataccttcacactcttcctgaggataaagttctttgtcagccactatgggctgctccagcacagcctgacaaggcaccagttttacctgcagcttcggaaagatatcctggaggagaggctgtactgcaatgaagagatactgctgcagctgggggtccttgccttgcaggctgagtttggcaattaccctaaggagcaggtggagagtaagccatactttcacgttgaagattacatcccagcgagtctgatcgagaggatgaccgctctacgggtccaggttgaagtctcagagatgcaccggctcagctctgcactgtggggagaggatgctgagctgaagttcttgagggtcactcagcagctcccagaatacggtgtgctggttcaccaagtattctcagagaagaggaggccagaagaggagatggccctggggatctgtgccaagggtgtcatagtctatgaagtgaaaaacaacagcagaattgcaatgttacggtttcagtggagagaaaccgggaagatttctacttatcaaaaaaagttcaccatcacaagcagtgtcactgggaagaagcacacatttgtcacagattcagccaagaccagtaaatacttactggacctctgctcagcccagcatgggtttaatgcacagatgggctctgggcagccttcccatgttttatttgaccatgataagtttgtgcaaatggccaatttgagtcctgcacaccaggcccggtctaagcctctcatttggattcagagattgtcatgctcagaaaacgagttgtttgtatccaggcttcagggtgctgcaggaggcctgctgagtacatcaatggataacttcaacgtggacggcagcaaggaggctggagcagaaggcatcgggcgcagcccctgcactggccgggagcagctgaagagtgcctgtgtgatccagaagccaatgacctgggactctctctctggaccacctgttcagagcatgcatgcaggctcaaagaataataggaggaagagctttatagctgaaccgggccgagaaattgtacgtgtgacactgaaacgtgacccacatcgtggttttgggtttgtcattaatgagggagagtattcaggccaagctgaccctggcatttttatatcttctattatacctggaggaccagcagaaaaagcaaaaacgatcaaaccaggagggcagatactagccctgaatcacatcagtctggagggcttcacattcaacatggctgttaggatgatccagaattcccctgacaacatagaattaattatttctcagtcaaaaggtgttggtggaaataacccagatgaagaaaagaatagcacagccaattctggggtctcctctacagacatcctgagcttcgggtaccagggaagtttgttgtcacacacacaagaccaggacagaaatactgaagaactagacatggctggggtgcagagcttagtgcccaggctgagacatcagctttcctttctgccgttaaagggtgctggttcttcttgtcctccatcacctccagaaatcagtgctggtgaaatctactttgtggaactggttaaagaagatgggacacttggattcagtgtaactggtggcattaacaccagtgtgccatatggtggtatctatgtgaaatccattgttcctggaggaccagctgccaaggaagggcagatcctacagggtgaccgactcctgcaggtggatggagtgattctgtgcggcctcacccacaagcaggctgtgcagtgcctgacgggtcctgggcaggttgcaagactggtcttagagagaagagtccccaggagtacacagcagtgtccttctgctaatgacagcatgggagatgaacgcacggctgtttccttggtaacagccttgcctggcaggccttcgagctgtgtctcagtgacagatggtcctaagtttgaagtcaaactaaaaaagaatgccaatggtttgggattcagtttcgtgcagatggagaaagagagctgcagccatctcaaaagtgatcttgtgaggattaagaggctctttccggggcagccagctgaggagaatggggccattgcagctggtgacattatcctggccgtgaatggaaggtccacggaaggcctcatcttccaggaggtgctgcatttactgagaggggccccacaggaagtcacgctcctcctttgccgaccccctccaggtgcgctgcctgagctggagcaggaatggcagacacctgaactctcagctgacaaagaattcaccagggcaacatgtactgactcatgtaccagccccatcctggatcaagaggacagctggagggacagtgcctccccagatgcaggggaaggcctgggtctcaggccagagtcttcccaaaaggccatcagagaggcacaatggggccaaaacagagagagaccttgggccagttccttgacacattctcctgagtcccaccctcatttatgcaaacttcaccaagaaagggatgaatcaacattggcgacctctttggaaaaggatgtgaggcaaaactgctattcagtttgtgatatcatgagacttggaagtcctgaattggatggggaggatggggaaggtgacatgtaccatccatgtggagccccttctcccacctcggaggatgaagagtatcttaccatcaactctacatgccaaggccagctaccctgtgaagaatgtttggaggcagattctgggaccattcccttgccacagttctgctcttggggcactgtcccagagtctttgcctccagaagagtccccagagagtgggagtgaatgggaagacctggaggagcctgtggccctggaatacggtgccctcaggtctctctcttttgggggtctgaatgtctagtgctgattcctgttttgcctgctcctacctgcccctctgctggatgtactgcagagaagagtcttggtgtcctgtcatagggcccatcttgttggactgctgtggctgagtatagaccagcatcaggaaagtctcactgttaatgcaaggagccaccagaagctgacctggtcaccaggcagggtcagaacatattgatgaggacacagaaaaagtaagggcaacagaaactgtcacactgggaggaagggaggttaaattctgggcaggtctgtaaccacccaacattctgttaaagtacttacagtgtatatttaaaaatgctgaatgttccaaaaactttcacataaacacagtttca

SEQ ID NO: 7756 - DNA, 4194 bp, Homo sapiens
  source 1..4194: mol_type = unassigned DNA; mol_type = unassigned DNA
atgcagcctttaacgaaggacgcaggcatgagcctgtcctctgtgacgctggccagcgccctacaggtcaggggtgaagctctgtctgaggaggaaatctggtccctcctgttcctggccgctgagcagctcctggaagacctccgcaacgattcctcggactatgtggtttgcccctggtcagccctgctttctgcagctggaagcctttctttccaaggccgtgtttctcatatagaggctgctcctttcaaggcccctgaactgctacagggacagagtgaggatgagcagcctgatgcatctcagatgcatgtctattctttaggaatgaccctctactggtcagcagggtttcatgttccgccacatcagcccctgcagctctgcgagcccctgcactccatcctgctgaccatgtgtgaagaccagcctcacaggcggtgcacgttgcagtcggttctggaagcttgtcgggttcatgagaaagaagtgtctgtctacccagcccctgctggtctccacatcagaaggctggttggcttggttctgggtaccatttctgaggtggagaaaagagttgtggaggaaagctcctctgtgcagcagaacagaagctacctgctcaggaagaggctgcgtgggacaagcagcgagagcccagcggcacaggccccggagtgtctgcatccttgcagagtttcagaaagaagcacggagacccagagctcaccagagccccattggagcaccttgacacacagtcactgcagcctccttgttaaccgcgctcttccaggagcagatccccaggaccagcaggcgggccggaggctcagctctggatctgtgcactcggcagcagacagctcatggccaacaactccttctcagaggggttttctgcaaagaaggagcaagttttccaggccagagttcatcctgttggctggagaggccccgatgacactacatctgccgggatcggttgtgaccaaaaaagggaaatcctatttggctctcagggacctctgtgtggtcctgctgaacgggcagcacctggaggtaaaatgtgatgttgaatcaacagtgggagctgtcttcaatgccgtgacatcctttgccaacctcgaggaactcacctactttggcttggcgtatatgaaaagcaaagagttctttttcctggacagtgaaaccagattgtgcaaaatagctcctgaaggctggagagagcagcctcagaagacctccatgaataccttcacactcttcctgaggataaagttctttgtcagccactatgggctgctccagcacagcctgacaaggcaccagttttacctgcagcttcggaaagatatcctggaggagaggctgtactgcaatgaagagatactgctgcagctgggggtccttgccttgcaggctgagtttggcaattaccctaaggagcaggtggagagtaagccatactttcacgttgaagattacatcccagcgagtctgatcgagaggatgaccgctctacgggtccaggttgaagtctcagagatgcaccggctcagctctgcactgtggggagaggatgctgagctgaagttcttgagggtcactcagcagctcccagaatacggtgtgctggttcaccaagtattctcagagaagaggaggccagaagaggagatggccctggggatctgtgccaagggtgtcatagtctatgaagtgaaaaacaacagcagaattgcaatgttacggtttcagtggagagaaaccgggaagatttctacttatcaaaaaaagttcaccatcacaagcagtgtcactgggaagaagcacacatttgtcacagattcagccaagaccagtaaatacttactggacctctgctcagcccagcatgggtttaatgcacagatgggctctgggcagccttcccatgttttatttgaccatgataagtttgtgcaaatggccaatttgagtcctgcacaccaggcccggtctaagcctctcatttggattcagagattgtcatgctcagaaaacgagttgtttgtatccaggcttcagggtgctgcaggaggcctgctgagtacatcaatggataacttcaacgtggacggcagcaaggaggctggagcagaaggcatcgggcgcagcccctgcactggccgggagcagctgaagagtgcctgtgtgatccagaagccaatgacctgggactctctctctggaccacctgttcagagcatgcatgcaggctcaaagaataataggaggaagagctttatagctgaaccgggccgagaaattgtacgtgtgacactgaaacgtgacccacatcgtggttttgggtttgtcattaatgagggagagtattcaggccaagctgaccctggcatttttatatcttctattatacctggaggaccagcagaaaaagcaaaaacgatcaaaccaggagggcagatactagccctgaatcacatcagtctggagggcttcacattcaacatggctgttaggatgatccagaattcccctgacaacatagaattaattatttctcagtcaaaaggtgttggtggaaataacccagatgaagaaaagaatagcacagccaattctggggtctcctctacagacatcctgagcttcgggtaccagggaagtttgttgtcacacacacaagaccaggacagaaatactgaagaactagacatggctggggtgcagagcttagtgcccaggctgagacatcagctttcctttctgccgttaaagggtgctggttcttcttgtcctccatcacctccagaaatcagtgctggtgaaatctactttgtggaactggttaaagaagatgggacacttggattcagtgtaactggtggcattaacaccagtgtgccatatggtggtatctatgtgaaatccattgttcctggaggaccagctgccaaggaagggcagatcctacagggtgaccgactcctgcaggtggatggagtgattctgtgcggcctcacccacaagcaggctgtgcagtgcctgacgggtcctgggcaggttgcaagactggtcttagagagaagagtccccaggagtacacagcagtgtccttctgctaatgacagcatgggagatgaacgcacggctgtttccttggtaacagccttgcctggcaggccttcgagctgtgtctcagtgacagatggtcctaagtttgaagtcaaactaaaaaagaatgccaatggtttgggattcagtttcgtgcagatggagaaagagagctgcagccatctcaaaagtgatcttgtgaggattaagaggctctttccggggcagccagctgaggagaatggggccattgcagctggtgacattatcctggccgtgaatggaaggtccacggaaggcctcatcttccaggaggtgctgcatttactgagaggggccccacaggaagtcacgctcctcctttgccgaccccctccaggtgcgctgcctgagctggagcaggaatggcagacacctgaactctcagctgacaaagaattcaccagggcaacatgtactgactcatgtaccagccccatcctggatcaagaggacagctggagggacagtgcctccccagatgcaggggaaggcctgggtctcaggccagagtcttcccaaaaggccatcagagaggcacaatggggccaaaacagagagagaccttgggccagttccttgacacattctcctgagtcccaccctcatttatgcaaacttcaccaagaaagggatgaatcaacattggcgacctctttggaaaaggatgtgaggcaaaactgctattcagtttgtgatatcatgagacttggaagtcctgaattggatggggaggatggggaaggtgacatgtaccatccatgtggagccccttctcccacctcggaggatgaagagtatcttaccatcaactctacatgccaaggccagctaccctgtgaagaatgtttggaggcagattctgggaccattcccttgccacagttctgctcttggggcactgtcccagagtctttgcctccagaagagtccccagagagtgggagtgaatgggaagacctggaggagcctgtggccctggaatacggtgccctcaggtctctctcttttgggggtctgaatgtctag

SEQ ID NO: 7757 - DNA, 1959 bp, Homo sapiens
  source 1..1959: mol_type = unassigned DNA; mol_type = unassigned DNA
agttgctgagcacccgccttgtaccagtgcttgggctggggacatgcccagatctctcacatagttgctattgttaagcttatgaacacctaatcttattgctcagtggagaatacaatctaaacgaacaggtgaatacagaagacagtgccagtcggagggtggcattaacaccagtgtgccatatggtggtatctatgtgaaatccattgttcctggaggaccagctgccaaggaagggcagatcctacagggtgaccgactcctgcaggtggatggagtgattctgtgcggcctcacccacaagcaggctgtgcagtgcctgacgggtcctgggcaggttgcaagactggtcttagagagaagagtccccaggagtacacagcagtgtccttctgctaatgacagcatgggagatgaacgcacggctgtttccttggtaacagccttgcctggcaggccttcgagctgtgtctcagtgacagatggtcctaagtttgaagtcaaactaaaaaagaatgccaatggtttgggattcagtttcgtgcagatggagaaagagagctgcagccatctcaaaagtgatcttgtgaggattaagaggctctttccggggcagccagctgaggagaatggggccattgcagctggtgacattatcctggccgtgaatggaaggtccacggaaggcctcatcttccaggaggtgctgcatttactgagaggggccccacaggaagtcacgctcctcctttgccgaccccctccaggtgcgctgcctgagctggagcaggaatggcagacacctgaactctcagctgacaaagaattcaccagggcaacatgtactgactcatgtaccagccccatcctggatcaagaggacagctggagggacagtgcctccccagatgcaggggaaggcctgggtctcaggccagagtcttcccaaaaggccatcagagaggcacaatggggccaaaacagagagagaccttgggccagttccttgacacattctcctgagtcccaccctcatttatgcaaacttcaccaagaaagggatgaatcaacattggcgacctctttggaaaaggatgtgaggcaaaactgctattcagtttgtgatatcatgagacttggaagatattccttctcatctcctctaaccagactttcgacagatattttctgagcaccttctctgcatgtctgcagtgctgtgtaaaatgccctacctttgcatggactattctttctaatcaagaggcgtgtgtggcgaacttggggcagcccctggaagtcttgttctttgaccattacgtctgcggctgcatcaccagataatgagcttcaccactcgtctgcctcctgtgtccttccgcggggagtaaatgtcacttcagcttgccgcatctctaaataggcaaattttcagtgctcagaaaaggacctgatctttgcacaaagtgctttgatggttgcctgcttgagtcactcccaatcccttcctgaagccctttctttataattcttctgttgaaatagccatcatattcacagtactaatcacagcatctcacatttactaaaaacttaccccataccaggaacccagagttgggggggctgtgtcagaattatgtaatttacgtgtcccaataatcctagacgcttcttgaccatctagttttgtcaaatgagaaaactgaggttccaaagaagtcaataaacttgtccaaagtctgaccgactctgcttgccatgtgacgagtctgtcttagaactgggtcattgccctgcttgcaatgctgtgccctctggcaagcccccccatccccccggtctcctgagctcggtaaggtgctccagctgcttctatcatagcacttcctacatggactgtaacatttctttactgctccaacttctcattaaattgggggctcctcaaagcca

SEQ ID NO: 7758 - DNA, 4997 bp, Homo sapiens
  source 1..4997: mol_type = unassigned DNA; mol_type = unassigned DNA
gagctcttcctggctctctcacgggtcactggctttgaggacgcaggctgctggggtggcagtgcctgctaacaggccagagactgcgcaggacccagggaatgagagtggtggcaggaaagggaaggggccttgttgactcactcgctgggcagcaagtgcttagtgacaagcagtaaacaaagacagcggcaacagtgctggtggcagggagctccgcggacagacttgcaagagacccctgctccttgttggaaagttgtcccatgatgaaggcctagacctggtcacggagacttttggatgcagcctttaacgaaggacgcaggcatgagcctgtcctctgtgacgctggccagcgccctacaggtcaggggtgaagctctgtctgaggaggaaatctggtccctcctgttcctggccgctgagcagctcctggaagacctccgcaacgattcctcggactatgtggtttgcccctggtcagccctgctttctgcagctggaagcctttctttccaaggccgtgtttctcatatagaggctgctcctttcaaggcccctgaactgctacagggacagagtgaggatgagcagcctgatgcatctcagatgcatgtctattctttaggaatgaccctctactggtcagcagggtttcatgttccgccacatcagcccctgcagctctgcgagcccctgcactccatcctgctgaccatgtgtgaagaccagcctcacaggcggtgcacgttgcagtcggttctggaagcttgtcgggttcatgagaaagaagtgtctgtctacccagcccctgctggtctccacatcagaaggctggttggcttggttctgggtaccatttctgaggtggagaaaagagttgtggaggaaagctcctctgtgcagcagaacagaagctacctgctcaggaagaggctgcgtgggacaagcagcgagagcccagcggcacaggccccggagtgtctgcatccttgcagagtttcagaaagaagcacggagacccagagctcaccagagccccattggagcaccttgacacacagtcactgcagcctccttgttaaccgcgctcttccaggagcagatccccaggaccagcaggcgggccggaggctcagctctggatctgtgcactcggcagcagacagctcatggccaacaactccttctcagaggggttttctgcaaagaaggagcaagttttccaggccagagttcatcctgttggctggagaggccccgatgacactacatctgccgggatcggttgtgaccaaaaaagggaaatcctatttggctctcagggacctctgtgtggtcctgctgaacgggcagcacctggaggtaaaatgtgatgttgaatcaacagtgggagctgtcttcaatgccgtgacatcctttgccaacctcgaggaactcacctactttggcttggcgtatatgaaaagcaaagagttctttttcctggacagtgaaaccagattgtgcaaaatagctcctgaaggctggagagagcagcctcagaagacctccatgaataccttcacactcttcctgaggataaagttctttgtcagccactatgggctgctccagcacagcctgacaaggcaccagttttacctgcagcttcggaaagatatcctggaggagaggctgtactgcaatgaagagatactgctgcagctgggggtccttgccttgcaggctgagtttggcaattaccctaaggagcaggtggagagtaagccatactttcacgttgaagattacatcccagcgagtctgatcgagaggatgaccgctctacgggtccaggttgaagtctcagagatgcaccggctcagctctgcactgtggggagaggatgctgagctgaagttcttgagggtcactcagcagctcccagaatacggtgtgctggttcaccaagtattctcagagaagaggaggccagaagaggagatggccctggggatctgtgccaagggtgtcatagtctatgaagtgaaaaacaacagcagaattgcaatgttacggtttcagtggagagaaaccgggaagatttctacttatcaaaaaaagttcaccatcacaagcagtgtcactgggaagaagcacacatttgtcacagattcagccaagaccagtaaatacttactggacctctgctcagcccagcatgggtttaatgcacagatgggctctgggcagccttcccatgttttatttgaccatgataagtttgtgcaaatggccaatttgagtcctgcacaccaggcccggtctaagcctctcatttggattcagagattgtcatgctcagaaaacgagttgtttgtatccaggcttcagggtgctgcaggaggcctgctgagtacatcaatggataacttcaacgtggacggcagcaaggaggctggagcagaaggcatcgggcgcagcccctgcactggccgggagcagctgaagagtgcctgtgtgatccagaagccaatgacctgggactctctctctggaccacctgttcagagcatgcatgcaggctcaaagaataataggaggaagagctttatagctgaaccgggccgagaaattgtacgtgtgacactgaaacgtgacccacatcgtggttttgggtttgtcattaatgagggagagtattcaggccaagctgaccctggcatttttatatcttctattatacctggaggaccagcagaaaaagcaaaaacgatcaaaccaggagggcagatactagccctgaatcacatcagtctggagggcttcacattcaacatggctgttaggatgatccagaattcccctgacaacatagaattaattatttctcagtcaaaaggtgttggtggaaataacccagatgaagaaaagaatagcacagccaattctggggtctcctctacagacatcctgagcttcgggtaccagggaagtttgttgtcacacacacaagaccaggacagaaatactgaagaactagacatggctggggtgcagagcttagtgcccaggctgagacatcagctttcctttctgccgttaaagggtgctggttcttcttgtcctccatcacctccagaaatcagtgctggtgaaatctactttgtggaactggttaaagaagatgggacacttggattcagtgtaactggtggcattaacaccagtgtgccatatggtggtatctatgtgaaatccattgttcctggaggaccagctgccaaggaagggcagatcctacagggtgaccgactcctgcaggtggatggagtgattctgtgcggcctcacccacaagcaggctgtgcagtgcctgacgggtcctgggcaggttgcaagactggtcttagagagaagagtccccaggagtacacagcagtgtccttctgctaatgacagcatgggagatgaacgcacggctgtttccttggtaacagccttgcctggcaggccttcgagctgtgtctcagtgacagatggtcctaagtttgaagtcaaactaaaaaagaatgccaatggtttgggattcagtttcgtgcagatggagaaagagagctgcagccatctcaaaagtgatcttgtgaggattaagaggctctttccggggcagccagctgaggagaatggggccattgcagctggtgacattatcctggccgtgaatggaaggtccacggaaggcctcatcttccaggaggtgctgcatttactgagaggggccccacaggaagtcacgctcctcctttgccgaccccctccaggtgcgctgcctgagctggagcaggaatggcagacacctgaactctcagctgacaaagaattcaccagggcaacatgtactgactcatgtaccagccccatcctggatcaagaggacagctggagggacagtgcctccccagatgcaggggaaggcctgggtctcaggccagagtcttcccaaaaggccatcagagaggcacaatggggccaaaacagagagagaccttgggccagttccttgacacattctcctgagtcccaccctcatttatgcaaacttcaccaagaaagggatgaatcaacattggcgacctctttggaaaaggatgtgaggcaaaactgctattcagtttgtgatatcatgagacttggaagatattccttctcatctcctctaaccagactttcgacagatattttctgagcaccttctctgcatgtctgcagtgctgtgtaaaatgccctacctttgcatggactattctttctaatcaagaggcgtgtgtggcgaacttggggcagcccctggaagtcttgttctttgaccattacgtctgcggctgcatcaccagataatgagcttcaccactcgtctgcctcctgtgtccttccgcggggagtaaatgtcacttcagcttgccgcatctctaaataggcaaattttcagtgctcagaaaaggacctgatctttgcacaaagtgctttgatggttgcctgcttgagtcactcccaatcccttcctgaagccctttctttataattcttctgttgaaatagccatcatattcacagtactaatcacagcatctcacatttactaaaaacttaccccataccaggaacccagagttgggggggctgtgtcagaattatgtaatttacgtgtcccaataatcctagacgcttcttgaccatctagttttgtcaaatgagaaaactgaggttccaaagaagtcaataaacttgtccaaagtctgaccgactctgcttgccatgtgacgagtctgtcttagaactgggtcattgccctgcttgcaatgctgtgccctctggcaagcccccccatccccccggtctcctgagctcggtaaggtgctccagctgcttctatcatagcacttcctacatggactgtaacatttctttactgctccaacttctcattaaattgggggctcctcaaagcca

SEQ ID NO: 7759 - DNA, 4665 bp, Homo sapiens
  source 1..4665: mol_type = unassigned DNA; mol_type = unassigned DNA
gagtacgggcccggacatgttcctggacattgcagaggccctgtcacatgcatgtctttattgtaggcatgagcctgtcctctgtgacgctggccagcgccctacaggtcaggggtgaagctctgtctgaggaggaaatctggtccctcctgttcctggccgctgagcagctcctggaagacctccgcaacgattcctcggactatgtggtttgcccctggtcagccctgctttctgcagctggaagcctttctttccaaggccgtgtttctcatatagaggctgctcctttcaaggcccctgaactgctacagggacagagtgaggatgagcagcctgatgcatctcagcccctgcagctctgcgagcccctgcactccatcctgctgaccatgtgtgaagaccagcctcacaggcggtgcacgttgcagtcggttctggaagcttgtcgggttcatgagaaagaagtgtctgtctacccagcccctgctggtctccacatcagaaggctggttggcttggttctgggtaccatttctgaggtggagaaaagagttgtggaggaaagctcctctgtgcagcagaacagaagctacctgctcaggaagaggctgcgtgggacaagcagcgagagcccagcggcacaggccccggagtgtctgcatccttgcagagtttcagaaagaagcacggagacccagagctcaccagagccccattggagcaccttgacacacagtcactgcagcctccttgttaaccgcgctcttccaggagcagatccccaggaccagcaggcgggccggaggctcagctctggatctgtgcactcggcagcagacagctcatggccaacaactccttctcagaggggttttctgcaaagaaggagcaagttttccaggccagagttcatcctgttggctggagaggccccgatgacactacatctgccgggatcggttgtgaccaaaaaagggaaatcctatttggctctcagggacctctgtgtggtcctgctgaacgggcagcacctggaggtaaaatgtgatgttgaatcaacagtgggagctgtcttcaatgccgtgacatcctttgccaacctcgaggaactcacctactttggcttggcgtatatgaaaagcaaagagttctttttcctggacagtgaaaccagattgtgcaaaatagctcctgaaggctggagagagcagcctcagaagacctccatgaataccttcacactcttcctgaggataaagttctttgtcagccactatgggctgctccagcacagcctgacaaggcaccagttttacctgcagcttcggaaagatatcctggaggagaggctgtactgcaatgaagagatactgctgcagctgggggtccttgccttgcaggctgagtttggcaattaccctaaggaggtggagagtaagccatactttcacgttgaagattacatcccagcgagtctgatcgagaggatgaccgctctacgggtccaggttgaagtctcagagatgcaccggctcagctctgcactgtggggagaggatgctgagctgaagttcttgagggtcactcagcagctcccagaatacggtgtgctggttcaccaagtattctcagagaagaggaggccagaagaggagatggccctggggatctgtgccaagggtgtcatagtctatgaagtgaaaaacaacagcagaattgcaatgttacggtttcagtggagagaaaccgggaagatttctacttatcaaaaaaagttcaccatcacaagcagtgtcactgggaagaagcacacatttgtcacagattcagccaagaccagtaaatacttactggacctctgctcagcccagcatgggtttaatgcacagatgggctctgggcagccttcccatgttttatttgaccatgataagtttgtgcaaatggccaatttgagtcctgcacaccaggcccggtctaagcctctcatttggattcagagattgtcatgctcagaaaacgagttgtttgtatccaggcttcagggtgctgcaggaggcctgctgagtacatcaatggataacttcaacgtggacggcagcaaggaggctggagcagaaggcatcgggcgcagcccctgcactggccgggagcagctgaagagtgcctgtgtgatccagaagccaatgacctgggactctctctctggaccacctgttcagagcatgcatgcaggctcaaagaataataggaggaagagctttatagctgaaccgggccgagaaattgtacgtgtgacactgaaacgtgacccacatcgtggttttgggtttgtcattaatgagggagagtattcaggccaagctgaccctggcatttttatatcttctattatacctggaggaccagcagaaaaagcaaaaacgatcaaaccaggagggcagatactagccctgaatcacatcagtctggagggcttcacattcaacatggctgttaggatgatccagaattcccctgacaacatagaattaattatttctcagtcaaaaggtgttggtggaaataacccagatgaagaaaagaatagcacagccaattctggggtctcctctacagacatcctgagcttcgggtaccagggaagtttgttgtcacacacacaagaccaggacagaaatactgaagaactagacatggctggggtgcagagcttagtgcccaggctgagacatcagctttcctttctgccgttaaagggtgctggttcttcttgtcctccatcacctccagaaatcagtgctggtgaaatctactttgtggaactggttaaagaagatgggacacttggattcagtgtaactggtggcattaacaccagtgtgccatatggtggtatctatgtgaaatccattgttcctggaggaccagctgccaaggaagggcagatcctacagggtgaccgactcctgcaggtggatggagtgattctgtgcggcctcacccacaagcaggctgtgcagtgcctgacgggtcctgggcaggttgcaagactggtcttagagagaagagtccccaggagtacacagcagtgtccttctgctaatgacagcatgggagatgaacgcacggctgtttccttggtaacagccttgcctggcaggccttcgagctgtgtctcagtgacagatggtcctaagtttgaagtcaaactaaaaaagaatgccaatggtttgggattcagtttcgtgcagatggagaaagagagctgcagccatctcaaaagtgatcttgtgaggattaagaggctctttccggggcagccagctgaggagaatggggccattgcagctggtgacattatcctggccgtgaatggaaggtccacggaaggcctcatcttccaggaggtgctgcatttactgagaggggccccacaggaagtcacgctcctcctttgccgaccccctccaggtgcgctgcctgagctggagcaggaatggcagacacctgaactctcagctgacaaagaattcaccagggcaacatgtactgactcatgtaccagccccatcctggatcaagaggacagctggagggacagtgcctccccagatgcaggggaaggcctgggtctcaggccagagtcttcccaaaaggccatcagagaggcacaatggggccaaaacagagagagaccttgggccagttccttgacacattctcctgagtcccaccctcatttatgcaaacttcaccaagaaagggatgaatcaacattggcgacctctttggaaaaggatgtgaggcaaaactgctattcagtttgtgatatcatgagacttggaagatattccttctcatctcctctaaccagactttcgacagatattttctgagcaccttctctgcatgtctgcagtgctgtgtaaaatgccctacctttgcatggactattctttctaatcaagaggcgtgtgtggcgaacttggggcagcccctggaagtcttgttctttgaccattacgtctgcggctgcatcaccagataatgagcttcaccactcgtctgcctcctgtgtccttccgcggggagtaaatgtcacttcagcttgccgcatctctaaataggcaaattttcagtgctcagaaaaggacctgatctttgcacaaagtgctttgatggttgcctgcttgagtcactcccaatcccttcctgaagccctttctttataattcttctgttgaaatagccatcatattcacagtactaatcacagcatctcacatttactaaaaacttaccccataccaggaacccagagttgggggggctgtgtcagaattatgtaatttacgtgtcccaataatcctagacgcttcttgaccatctagttttgtcaaatgagaaaactgaggttccaaagaagtcaataaacttgtccaaagtctgaccgactctgcttgccatgtgacgagtctgtcttagaactgggtcattgccctgcttgcaatgctgtgccctctggcaagcccccccatccccccggtctcctgagctcggtaaggtgctccagctgcttctatcatagcacttcctacatggactgtaacatttctttactgctccaacttctcattaaattgggggctcctcaaagcc

SEQ ID NO: 7760 - DNA, 1684 bp, Homo sapiens
  source 1..1684: mol_type = unassigned DNA; mol_type = unassigned DNA
gagaagaagggagtgagactgctcagagaggcaggattcctgctgactccagggggacacctggcacctcagcttcctttcccacttctccaggctgcatggaggggtgccgggcaggggcctcctggaagggaacctcctgcagcctcaagcaccaggtcatgacatgacatctatccctttcccaggtgaccgactcctgcaggtggatggagtgattctgtgcggcctcacccacaagcaggctgtgcagtgcctgacgggtcctgggcaggttgcaagactggtcttagagagaagagtccccaggagtacacagcagtgtccttctgctaatgacagcatgggagatgaacgcacggctgtttccttggtaacagccttgcctggcaggccttcgagctgtgtctcagtgacagatggtcctaagtttgaagtcaaactaaaaaagaatgccaatggtttgggattcagtttcgtgcagatggagaaagagagctgcagccatctcaaaagtgatcttgtgaggattaagaggctctttccggggcagccagctgaggagaatggggccattgcagctggtgacattatcctggccgtgaatggaaggtccacggaaggcctcatcttccaggaggtgctgcatttactgagaggggccccacaggaagtcacgctcctcctttgccgaccccctccaggtgcgctgcctgagctggagcaggaatggcagacacctgaactctcagctgacaaagaattcaccagggcaacatgtactgactcatgtaccagccccatcctggatcaagaggacagctggagggacagtgcctccccagatgcaggggaaggcctgggtctcaggccagagtcttcccaaaaggccatcagagaggcacaatggggccaaaacagagagagaccttgggccagttccttgacacattctcctgagtcccaccctcatttatgcaaacttcaccaagaaagggatgaatcaacattggcgacctctttggaaaaggatgtgaggcaaaactgctattcagtttgtgatatcatgagacttggaagatattccttctcatctcctctaaccagactttcgacagatattttctgagcaccttctctgcatgtctgcagtgctgtgtaaaatgccctacctttgcatggactattctttctaatcaagaggcgtgtgtggcgaacttggggcagcccctggaagtcttgttctttgaccattacgtctgcggctgcatcaccagataatgagcttcaccactcgtctgcctcctgtgtccttccgcggggagtaaatgtcacttcagcttgccgcatctctaaataggcaaattttcagtgctcagaaaaggacctgatctttgcacaaagtgctttgatggttgcctgcttgagtcactcccaatcccttcctgaagccctttctttataattcttctgttgaaatagccatcatattcacagtactaatcacagcatctcacatttactaaaaacttaccccataccaggaacccagagttgggggggctgtgtcagaattatgtaatttacgtgtcccaataatcctagacgcttcttgaccatctagttttgtcaaatgagaaaactgaggttccaaagaagtcaataaacttgtccaaagtctgac

SEQ ID NO: 7761 - DNA, 1845 bp, Homo sapiens
  source 1..1845: mol_type = unassigned DNA; mol_type = unassigned DNA
cagggagcaggggacagagctgggattcggattggcctccagagcagaaaccttcaccccaggccttcctctgggtgctggttcttcttgtcctccatcacctccagaaatcagtgctggtgaaatctactttgtggaactggttaaagaagatgggacacttggattcagtgtaactgtaagagtttttaggagagcttgaaaagcagttaacaagatgtccgtctagaacctggtggccattccacccagatggcaacctctgacagtgtgcttagtttgcacaaatgtaaggggtaaataaaaaagccagtgggggcctgcactgggggatgagttcagagacaaacagaggtactggggaacctcaggatgagcagggcatgcactaggggactccaaactcatgaggaggcagtgtgggcagagttggctgatgtgtcctgactctgaggtcaagctggactgcagagagagagaagcacattggggcttcagggacacaagctaaagggtggcattaacaccagtgtgccatatggtggtatctatgtgaaatccattgttcctggaggaccagctgccaaggaagggcagatcctacagggtgaccgactcctgcaggtggatggagtgattctgtgcggcctcacccacaagcaggctgtgcagtgcctgacgggtcctgggcaggttgcaagactggtcttagagagaagagtccccaggagtacacagcagtgtccttctgctaatgacagcatgggagatgaacgcacggctgtttccttggtaacagccttgcctggcaggccttcgagctgtgtctcagtgacagatggtcctaagtttgaagtcaaactaaaaaagaatgccaatggtttgggattcagtttcgtgcagatggagaaagagagctgcagccatctcaaaagtgatcttgtgaggattaagaggctctttccggggcagccagctgaggagaatggggccattgcagctggtgacattatcctggccgtgaatggaaggtccacggaaggcctcatcttccaggaggtgctgcatttactgagaggggccccacaggaagtcacgctcctcctttgccgaccccctccaggtgcgctgcctgagctggagcaggaatggcagacacctgaactctcagctgacaaagaattcaccagggcaacatgtactgactcatgtaccagccccatcctggatcaagaggacagctggagggacagtgcctccccagatgcaggggaaggcctgggtctcaggccagagtcttcccaaaaggccatcagagaggcacaatggggccaaaacagagagagaccttgggccagttccttgacacattctcctgagtcccaccctcatttatgcaaacttcaccaagaaagggatgaatcaacattggcgacctctttggaaaaggatgtgaggcaaaactgctattcagtttgtgatatcatgagacttggaagagatactgtaaatccaacctgccaaaactaaatgcagttgtcaggagcagagacctggggctcccagctgtgtcatcagggctaatggagacctcaatatggggcctgatgttggagaactggagacatgaagggacacaaaccccaaactttgttgtgagtttaaccgtaagtaaataggacaattataataccttcatatttcaagcctgaaatgcccaatctgcttctatgaatttcctcctgaaaggcagagatgaatttggtggcccaagtctttaaaggacagctgtccagaaaagttgggcacagtgtcttttctcagtaaacattctgtagcaagcag

SEQ ID NO: 7762 - DNA, 561 bp, Homo sapiens
  source 1..561: mol_type = unassigned DNA; mol_type = unassigned DNA
aatgaaaaatgcacatatcctttggcccatcaaagcacacaagacgtgccaggcacaagccttcaggcccacagccatatccacctacgctggtcactacctatatagagatagtggtgcatcccacgtgagcagttgctgagcacccgccttgtaccagtgcttgggctggggacatgcccagatctctcacatagttgctattgttaagcttatgaacacctaatcttattgctcagtggagaatacaatctaaacgaacaggtgaatacagaagacagtgccagtcggaggtaaggtcatgggatagagtggtgggcaggtggggattcccttagctggggaggttggggaggcttcctggaggaggaaagatgggtggtgagttttttgttgtgtttttcagggtggcattaacaccagtgtgccatatggtggtatctatgtgaaatccattgttcctggaggaccagctgccaaggaagggcagatcctacagggtgaccgactcctgcaggtggatggagtgattctgtgcggcctcacccacaagcaggctgt

SEQ ID NO: 7763 - DNA, 3466 bp, Homo sapiens
  source 1..3466: mol_type = unassigned DNA; mol_type = unassigned DNA
agtgctggtggcagggagctccgcggacagacttgcaagagacccctgctccttgttggaaagttgtcccatgatgaaggcctagacctggtcacggagacttttggatgcagcctttaacgaaggacgcaggcatgagcctgtcctctgtgacgctggccagcgccctacaggtcaggggtgaagctctgtctgaggaggaaatctggtccctcctgttcctggccgctgagcagctcctggaagacctccgcaacgattcctcggactatgtggtttgcccctggtcagccctgctttctgcagctggaagcctttctttccaaggccgtgtttctcatatagaggctgctcctttcaaggcccctgaactgctacagggacagagtgaggatgagcagcctgatgcatctcagatgcatgtctattctttaggaatgaccctctactggtcagcagggtttcatgttccgccacatcagcccctgcagctctgcgagcccctgcactccatcctgctgaccatgtgtgaagaccagcctcacaggcggtgcacgttgcagtcggttctggaagcttgtcgggttcatgagaaagaagtgtctgtctacccagcccctgctggtctccacatcagaaggctggttggcttggttctgggtaccatttctgaggtggagaaaagagttgtggaggaaagctcctctgtgcagcagaacagaagctacctgctcaggaagaggctgcgtgggacaagcagcgagagcccagcggcacaggccccggagtgtctgcatccttgcagagtttcagaaagaagcacggagacccagagctcaccagagccccattggagcaccttgacacacagtcactgcagcctccttgttaaccgcgctcttccaggagcagatccccaggaccagcaggcgggccggaggctcagctctggatctgtgcactcggcagcagacagctcatggccaacaactccttctcagaggggttttctgcaaagaaggagcaagttttccaggccagagttcatcctgttggctggagaggccccgatgacactacatctgccgggatcggttgtgaccaaaaaagggaaatcctatttggctctcagggacctctgtgtggtcctgctgaacgggcagcacctggaggtaaaatgtgatgttgaatcaacagtgggagctgtcttcaatgccgtgacatcctttgccaacctcgaggaactcacctactttggcttggcgtatatgaaaagtggagagtaagccatactttcacgttgaagattacatcccagcgagtctgatcgagaggatgaccgctctacgggtccaggttgaagtctcagagatgcaccggctcagctctgcactgtggggagaggatgctgagctgaagttcttgagggtcactcagcagctcccagaatacggtgtgctggttcaccaagtattctcagagaagaggaggccagaagaggagatggccctggggatctgtgccaagggtgtcatagtctatgaagtgaaaaacaacagcagaattgcaatgttacggtttcagtggagagaaaccgggaagatttctacttatcaaaaaaagttcaccatcacaagcagtgtcactgggaagaagcacacatttgtcacagattcagccaagaccagtaaatacttactggacctctgctcagcccagcatgggtttaatgcacagatgggctctgggcagccttcccatgttttatttgaccatgataagtttgtgcaaatggccaatttgagtcctgcacaccaggcccggtctaagcctctcatttggattcagagattgtcatgctcagaaaacgagttgtttgtatccaggcttcagggtgctgcaggaggcctgctgagtacatcaatggataacttcaacgtggacggcagcaaggaggctggagcagaaggcatcgggcgcagcccctgcactggccgggagcagctgaagagtgcctgtgtgatccagaagccaatgacctgggactctctctctggaccacctgttcagagcatgcatgcaggctcaaagaataataggaggaagagctttatagctgaaccgggccgagaaattgtacgtgtgacactgaaacgtgacccacatcgtggttttgggtttgtcattaatgagggagagtattcaggccaagctgaccctggcatttttatatcttctattatacctggaggaccagcagaaaaagcaaaaacgatcaaaccaggagggcagatactagccctgaatcacatcagtctggagggcttcacattcaacatggctgttaggatgatccagaattcccctgacaacatagaattaattatttctcagtcaaaaggtgttggtggaaataacccagatgaagaaaagaatagcacagccaattctggggtctcctctacagacatcctgagcttcgggtaccagggaagtttgttgtcacacacacaagaccaggacagaaatactgaagaactagacatggctggggtgcagagcttagtgcccaggctgagacatcagctttcctttctgccgttaaagggtgctggttcttcttgtcctccatcacctccagaaatcagtgctggtgaaatctactttgtggaactggttaaagaagatgggacacttggattcagtgtaactgtaagagtttttaggagagcttgaaaagcagttaacaagatgtccgtctagaacctggtggccattccacccagatggcaacctctgacagtgtgcttagtttgcacaaatgtaaggggtaaataaaaaagccagtgggggcctgcactgggggatgagttcagagacaaacagaggtactggggaacctcaggatgagcagggcatgcactaggggactccaaactcatgaggaggcagtgtgggcagagttggctgatgtgtcctgactctgaggtcaagctggactgcagagagagagaagcacattggggcttcagggacacaagctaaaggtaagaagggcagtccactgtcatctggccaaggatgggtggggcagtccactgtcatccagcatagaatcagtgtggagcctcttgctcagacatcccagggccaggcctccatcaggactgacactttccatttggtttctgagctctgcctggtagacccttgtgaaaggagattacccatataactgtgtttacccaaggggttggggaatggcacacacaaagctggtgaaaatccagaggtcagaggttggaaggtgctgcttttattactgagtattgaaagtgatccattacaggctgggctcggtggctcatgactgtaatcccagaactttgggaggccgaggcgggtggatcgcaaggtcaggagattgagactatcctggctaacatggtgaaaccccatctctact

SEQ ID NO: 7764 - DNA, 531 bp, Homo sapiens
  source 1..531: mol_type = unassigned DNA; mol_type = unassigned DNA
agttgtgcgtcagtggagggttgtggatgatcagtgtattaaagtctgtgtttgcttccttcagcaaaaaaagttcaccatcacaagcagtgtcactgggaagaagcacacatttgtcacagattcagccaagaccagtaaatacttactggacctctgctcagcccagcatgggtttaatgcacagatgggctctgggcagccttcccatgttttatttgaccatgataagtttgtgcaaatggccaatttgagtcctgcacaccaggcccggtctaagcctctcatttggattcagagattgtcatgctcagaaaacgagttgtttgtatccaggcttcagggtgctgcaggaggcctgctgagtacatcaatggataacttcaacgtggacggcagcaaggaggctggagcagaaggcatcgggcgcagcccctgcactggccgggagcagctgaagagtgcctgtgtgatccagaagccaatgacctgggactctctctctggaccacctgttcagagcatgcatgc

SEQ ID NO: 7765 - DNA, 606 bp, Homo sapiens
  source 1..606: mol_type = unassigned DNA; mol_type = unassigned DNA
ccacttcatattcttctcacccagcacactccttgaaaaatagttattgtttgataaacaatttgattgatgaatgaaggaaaaactaaaaagagggattttctttaagctaaggaaaatatcaggccatagtcagacagcatctgccatgcacccgtggatgcctgctacagggtgtggaaccaagggaccgagcattttcttgcagttgtgcgtcagtggagggttgtggatgatcagtgtattaaagtctgtgtttgcttccttcagcaaaaaaagttcaccatcacaagcagtgtcactgggaagaagcacacatttgtcacagattcagccaagaccagtaaatacttactggacctctgctcagcccagcatgggtttaatgcacagatgggctctgggcagccttcccatgttttatttgaacacagtcacatggcccccaagacaactgcaagacgggttggaaagggaggacttcctgtgtgcccaggaagaggaagtagtgtaacgatacaccatggtccttgccataacggctgcagccgtctgctgtatcactcttaattgagagtttggtattaaactcatagcaggaccaga

SEQ ID NO: 7766 - DNA, 619 bp, Homo sapiens
  source 1..619: mol_type = unassigned DNA; mol_type = unassigned DNA
caggtcaggggtgaagctctgtctgaggaggaaatctggtccctcctgttcctggccgctgagcagctcctggaagacctccgcaacgattcctcggactatgtggtttgcccctggtcagccctgctttctgcagctggaagcctttctttccaaggccgtgtttctcatatagaggctgctcctttcaaggcccctgaactgctacagggacagagtgaggatgagcagcctgatgcatctcagatgcatgtctattctttaggaatgaccctctactggtcagcagggtttcatgttccgccacatcagcccctgcagctctgcgagcccctgcactccatcctgctgaccatgtgtgaagaccagcctcacaggcggtgcacgttgcagtcggttctggaagcttgtcgggttcatgagaaagaagtgtctgtctacccagcccctgctggtctccacatcagaaggctggttggcttggttctgggtaccatttctgaggtcagtagagaaccgtgcttttcaagcagtagctgctggtcatgtgtggctattaaaatttgaattagttatattatcattaactaaaataaaataaaaaattaaattaatcagt

SEQ ID NO: 7767 - DNA, 682 bp, Homo sapiens
  source 1..682: mol_type = unassigned DNA; mol_type = unassigned DNA
ctcctgttcctggccgctgagcagctcctggaagacctccgcaacgattcctcggactatgtggtttgcccctggtcagccctgctttctgcagctggaagcctttctttccaaggccgtgtttctcatatagaggctgctcctttcaaggcccctgaactgctacagggacagagtgaggatgagcagcctgatgcatctcaggtaagctgtgcagctactctgcaacttctgagtcctgtgccctgggaaaggcctgtcccagcggcagcctccccagctcccagctcagccttgcagagcttggttctcaacaccaagccagagtgggtttcaagagttttattcccaggatttcttgtcaacaacttactagctcatggacaagggcaagtccacttctctgagccccaatttctacattggtaaaatggggttaatgtggcttaattgatcaggttattatcaatattcaaaaagaagtgttgaaaagctgtggttaagtggtctggcacattgttaccattggcagtatgtagcaagacacctcaaaatgacccaacacgtcctcaactaggaatttattctaaggcacaagtaaagataaatttagctgcagcaatgctgattgttgtattgctgacgttagtgataaattgaaaacaagctaaatagtgagtgg

SEQ ID NO: 7768 - DNA, 8465 bp, Homo sapiens
  source 1..8465: mol_type = unassigned DNA; mol_type = unassigned DNA
gggaggcagctgcagtgctgcgaggggtgcgtgcgcgtgtgcccagctcgcctgccgtctcccggctccgtctgcgctcctcggtgcgtggggcacgagggtccgagggccgggaagccagagcagcgcctctcgcccaggcctcgctttctctggacgcccggcagtccccggggctagagcgcacggggcggggcgcgagacccgggccgcgctccccgcccccgcctcttgcgccctgcctggctccctctccattgagttttcctgcctcgggtgcctatcaatggtcctgctcggggatgcacacgcagctcgcggccggaggggggtagcagccgccgcctccaggtgcaggttctctccggccgccgccgccacccgctgtcgccgcgactcgagccccgggcgcactgaggtcttggccatggggctgcggaggctgctgttgctggcgtgagaaggggcgacggagttgtcgcgctcgggggtccccagctgcctgcatggatgtcttcagctttgtgaagattgcaaagctttcgagccacaggacgaagtcttcaggctggccgcctccctcgggaacctggggcttgagccaggtgccgccctatggatgggagatgacggcaaaccgagatgggcgagactacttcatcaatcacatgacacaggcaatcccttttgacgaccctcggttagagagctgccaaatcatccctccggctcctcggaaggtggagatgagaagggaccccgtgctgggatttggttttgtggcaggcagtgaaaagccagtggtcgttcgctcagtaacaccaggtggcccctctgaaggcaagctgatcccgggagatcagattgtaatgattaatgatgaaccggtcagcgctgcacccagagagcgggtcatcgatctggtcagaagctgcaaagaatcgatactcctcactgtcattcagccttacccttctcccaaatcagcatttattagtgctgcaaaaaaggcaagattaaagtccaatcctgtcaaagtacgcttctctgaggaggtcatcatcaacggccaagtgtcggaaactgttaaggacaactcacttctttttatgccaaatgttttgaaagtctatctggaaaatgggcagaccaaatcatttcgttttgactgcagcacttccattaaggatgtcatcttaacccttcaagagaagctctccatcaaaggcattgaacacttctctctcatgctggagcagaggacagaaggggctggaacgaagctgctcttgcttcatgaacaggagactctaactcaggtgacacagaggcccagctcccataagatgagatgtcttttccgaattagcttcgtcccaaaagatccaattgaccttttaaggagagatccagttgctttcgagtatctctatgttcagagttgtaacgatgtggttcaggagcgatttgggccggagctgaaatatgacatagccctgcggctggccgcattacaaatgtacattgcaaccgttaccaccaagcaaacgcagaaaatctccctcaaatacatcgaaaaagaatggggattagagacttttcttccctctgctgtgctgcaaagcatgaaagagaagaacataaagaaagcactttcacaccttgtcaaagcaaatcaaaacttggtaccaccgggtaaaaagctctctgcactacaagccaaggtccattatctcaagttcctcagtgacctacgattgtatgggggccgtgtgttcaaggcaacattagtgcaggcagaaaagcgctcggaagtgactctcctggttgggccccggtatggcataagccatgtcatcaacaccaaaaccaatctggtggctcttttagccgactttagccacgtcaacaggatcgaaatgttttccgaggaggagagcttggtgcgggtagaactccacgtgctagatgtgaagcctatcacgcttctgatggaatcctcagatgccatgaacctggcctgcttgacggctggatactaccggctgcttgttgattccaggaggtcgatatttaacatggccaacaagaaaaacacagcgacccaggaaacaggacctgaaaacaaggggaagcataacctccttggcccagattggaactgtataccccaaatgaccacctttattggcgaaggggaacaagaagcccagataacatacatagattcaaagcagaagacggtggagatcacagacagcaccatgtgtccaaaagagcaccggcacttgtacatagacaatgcctatagttcagatggacttaaccagcagctgagccagcccggggaggccccctgtgaggcagactacagaagtctagctcagcggtccctattgaccctctcaggaccagaaactctgaagaaagcacaggaatctccgagaggagctaaagtgtcctttatttttggagacttcgccttggatgatggtattagtcccccaacccttggctatgaaacgctactagatgagggtcctgaaatgctggagaagcagagaaatctctacattggcagtgccaatgacatgaagggcctggatctcactccagaggcagagggcatccagtttgtggaaaattctgtttatgcaaacataggcgatgtgaagagcttccaggccgcggaggggatcgaggaacccctcttgcatgacatctgttatgcagaaaacactgatgacgcggaggacgaggacgaggtgagctgcgaggaggacctcgtggtgggggagatgaaccagccggccatcctcaacctgtctgggtcaagcgatgacatcattgacctcacatccctgccccctccagaaggtgatgacaatgaggatgacttcctgttgcgttccttgaacatggccattgccgcacccccacctggctttagagacagttcagatgaagaggactctcagagccaggcagcttccttccccgaggacaaggagaaaggcagcagcctgcaaaatgatgagatccccgtgtccctcattgacgctgtgcccaccagcgccgaaggcaagtgtgagaagggactggataatgccgtcgtctccacgctgggagctctagaggctctatccgtgtcagaagaacagcagaccagtgacaattcaggtgtagccatcttgcgggcttatagtcctgagtcttcgtcagactcgggcaatgaaactaactcttctgaaatgactgagagttctgaactggccacagcacaaaaacagtcagaaaacctctcccgcatgttcttggccactcacgaaggctaccacccccttgcagaagagcagaccgagttcccggcctccaagacccccgctgggggcttgcctccaaagtcctcgcacgccctggctgctaggccagcaaccgacctcccgcccaaagttgtgccttccaagcagttacttcactcagaccacatggagatggagcctgaaactatggagactaagtcggtcactgactattttagcaaactgcacatggggtcggtggcatactcctgcactagcaaaaggaaaagcaagctggccgatggtgaggggaaggcaccccctaatgggaacacaacaggaaaaaaacagcaggggaccaaaacggcagagatggaggaggaggccagtggtaaatttggtactgtgtcttcacgagacagtcaacacctgagcacttttaatctggagagaactgcctttcgcaaggacagtcaaagatggtatgtggccactgaaggtgggatggctgaaaaaagtggattagaagcagcaacagggaaaacctttccaagagcttctggtcttggggcaagggaggccgaagggaaggaagaaggagctcctgatggagaaaccagtgatggctcaggacttggtcaaggggaccgcttcttaactgacgtgacctgtgcatcttcagccaaagacttagataacccagaggacgctgactcgtccacctgcgaccatccttccaagcttcctgaggctgatgagagtgtggcccgcctttgtgactaccacttggccaagcggatgtcatcactgcaaagcgagggccatttttctctgcagagctcccaaggctcttcagtggatgcaggctgtggcacaggcagcagtggcagtgcctgtgccacacccgtggagtcgccgctctgcccctccctggggaagcacttgattcctgacgcttctgggaaaggcgtgaattacattccttcagaggagagagcccctgggcttcccaaccacggagccacctttaaggaactgcacccacagacagaagggatgtgtccacggatgacagtgcctgctctgcacacagccattaacaccgaacccctgtttggcacattgagagatggatgccatcggctccccaagattaaggaaaccacagtgtagctttgacagagcctgggaaggagagacgaggaggcatgccttcagcttggtctcaacatcctgaagctgatcccatcctgctaccatcaaacattcactcggaatcaaaggtgccaattccaaatcaagaccctaatgatttctcccaagcaaatcaggcatacggagaggctgtgagctggcggccaccggatctgagaggggggagcctcaggacacctcccagccagaaggctctgagacatagcagcagtatcctctccggatctgtcgatttggagaccttccgagagagaaccaagggtgcagtcagcttaaagtgtccaggcatcacagaagcacaggaggccagttctgaaaggcgagcagaactccccctggggaggaagctcaccaaaagtttttcccaaagctcaatgcacttgagctctgaggggaggtttcacaaaaggtccccagtggctcataaagactcaaagctgtataggacattacccttgcggaagctggagggcagcaattggagatgccggggacccttcagctattgcttcctgaaccgagggcaggatgaagatggtgaggaagaagaggagaggggagaggccaccgtccaggtctcttgcctctatagaccacagatgactcaagccatgccagaaccaagcagcccatgcctggctgtggcgattcagaagcaacgaggggagctatccagagggtcagtgctgaaggtctgggcagaagacctgcgagacccagatgacttggacttcagcaacctggcttttgatgcccggattgcaagaataaatgccctaaaggagagcacatatgcaatgcctgatgggttccttgcagcccaaaatgatgccaatgagctgctctgtctcgtcagggcaaccaaggagaagagggaggagtcacgccctgaagcgtacgaccttacactttctcagtacaagcaactgttatccattgagtccagacagttgggaagtgcctgtaggaaaatggcgatggctgagaaaagcccggaggagatgctcctagctatgacttccagctttcaagtgctctgttgcctaacagaagcttgcatgcgattagttaaagtcgtgaactcagaaacacagcggcaggaaattgtagggaagatcgatgaagtggtcataaattacatttgtctactgaaagctgccgaagcagccactggaaagaaccctggggaccctaatgttggactctcggcgcgacactcaaccaccatggccgctctcgtaagcacactgacacgttctctcaagaggcttttaaacaaataaatatggaagtcacgtcataatctacctttgcaaagccatacatgaacttttatttactttgtgtgtatgatgaacagatgtctcctttcttctctctgtatattttgttattttatataaaataggagataaaagtcacattgatgaaatgttgaaatgtactaatcagatgtattctgtttatattatacatatatatacacgtaaaagaaatatccaagaaagtgatgacatttggctatttttcatatagttaaaactccaggtatatgatgtgaaattttaaattctaccatgttagagcaaaacaatgaatcctatcccctttctttccaagtagctacttggaaaccatatcattcatatttagaagtaaaacacaaaacaaaaaagagagagaaaagaaaagaaatcacaatgtatataaaacagtacttatgttttaaaattatgatttttaagcattggaaatagcaaaaagacatttaaaattcaagaagctattatgaattactagagaatatatctgtaataaattaattttttgctcatagtatttggttactggatgctttcttccaagaatcccacatatttaatttgggtttttgctactggggctacaaattggtggggatggattctactgtgtcagcacaaatgctcttcacagtggttctagcatttaaaaaacttcccggggagaagaacagaggggatgatgggcagtttcctaggtaacacctagagttatagaatatctcattacataaaatgtatggaattaataataccaaaattaattatttgatggaaagatctgctttgactaaatgtcaaaaatctgcaaaccaaagacattatcttcccctcatcccaactcaactacgaaacttaaaattccctttagagtgataggacatttagtaaagtatttgcaaacttaaaaaaaggaacatttaatgatcatcaaaattaagtacagattcagtaatgtagaccagaccacacaccagcacctgtgagtctcatctcagatcacagctctcagcatagggcttcatgcatcaccgcctctacagaggctaaggctgccagtcaaatttggaattatagcgtagtactgggacaaaatctcaaatcttggatgttccagaaaatcagggagagatggctactgtaatcatgggagccatgagtaaatagttaagtatttattaaataaatacttaatctggattggctgataaaaatatgaaatctgaaaaaaaaaagaaagaaatggaagtggtatatttgaccagttcaagtgaaaccaatggaatgcaaagaactttccaggactgtcacatctctaaaagtaccctgcagtcataaaataaaatcgatatgtatatatgtatttcctgggtcattcagtgctcaagttacatgcactcctacttagacaggtggctccttaagaacatgatgggagtacaccaggtgcaaatatttctacttttgtagcctgctgagaaggagtcataacacagtccacaattgcaatctctctctagtcagccattccacagggactcaacaacaaaagccgcacgtggttatggatggcagcaaaggaaaggagtttaggtgtgtgttattataaataatgtttaactaaataataaaacattatttcattacaattataattataaatattggtgttttgatattgagagatattagtggtgtttactgtggaaaatcttagtaaatatcattctgtgtactaaaatcctaacctattaataggatgtgtgccctatgtcagacagtgtgctaagcatattaactatattatctcatttaatcatcacaacaatctgctggtttggacactattctctctggaggcaatatggatgagttcttacggatatggggtttggggtcagaaacatcttgattaaaattttgactctgccattttctagcccttttatgttgggaaagctactttttctagtctcaatttcctcataataaaatgaaaatcaattataagatcgatttccatagggttgtcatgagttttgagtaaaaatgtgtatgtaaagttcttaccacaatacctggcagagagtaagtattcaattaatgttagctattattatcatcataatcgttgtgttaaatatattgcccaagataatatgtgggggaatgtttgttttatatgcatattgtatcctgactgtgtgcagaacacattatgtgtattgcatatatgtaaaagaagtgtacaaggaagtggccatccttgttcaagttacgtatctagttagaacaacttcccagtccattggagttctttgagaagcctcagggaagtagctctgggtccttctaatcaacctcccattactgcgccagtaagtttctgtttcttataaataaactctttgctattcagaaaacctcaaggggcccccacattcactaagcatggggctcctaactggggtccaggtccatagagtgtaggaagaacatattagaacaatacttgtgcttatttttatctagcttttttatgtttgtgtatgttttataatggcataatagtacaatggtacatgtacataattttaaataaataaatgaatgaatgaataaataa

SEQ ID NO: 7769 - DNA, 1403 bp, Homo sapiens
  source 1..1403: mol_type = unassigned DNA; mol_type = unassigned DNA
cagccattaacaccgaacccctgtttggcacattgagagatggatgccatcggctccccaagattaaggaaaccacagctttgacagagcctgggaaggagagacgaggaggcatgccttcagcttggtctcaacatcctgaagctgatcccatcctgctaccatcaaacattcactcggaatcaaaggtgccaattccaaatcaagaccctaatgatttctcccaagcaaatcaggcatacggagaggctgtgagctggcggccaccggatctgagaggggggagcctcaggacacctcccagccagaaggctctgagacatagcagcagtatcctctccggatctgtcgatttggagaccttccgagagagaaccaagggtgcagtcagcttaaagtgtccaggcatcacagaagcacaggaggccagttctgaaaggcgagcagaactccccctggggaggaagctcaccaaaagtttttcccaaagctcaatgcacttgagctctgaggggaggtttcacaaaaggtccccagtggctcataaagactcaaagctgtataggacattacccttgcggaagctggagggcagcaattggagatgccggggacccttcagctattgcttcctgaaccgagggcaggatgaagatggtgaggaagaagaggagaggggagaggccaccgtccaggtctcttgcctctatagaccacagatgactcaagccatgccagaaccaagcagcccatgcctggctgtggcgattcagaagcaacgaggggagctatccagagggtcagtgctgaaggtctgggcagaagacctgcgagacccagatgacttggacttcagcaacctggcttttgatgcccggattgcaagaataaatgccctaaaggagagcacatatgcaatgcctgatgggttccttgcagcccaaaatgatgccaatgagctgctctgtctcgtcagggcaaccaaggagaagagggaggagtcacgccctgaagcgtacgaccttacactttctcagtacaagcaactgttatccattgagtccagacagttgggaagtgcctgtaggaaaatggcgatggctgagaaaagcccggaggagatgctcctagctatgacttccagctttcaagtgctctgttgcctaacagaagcttgcatgcgattagttaaagtcgtgaactcagaaacacagcggcaggaaattgtagggaagatcgatgaagtggtcataaattacatttgtctactgaaagctgccgaagcagccactggaaagaaccctggggaccctaatgttggactctcggcgcgacactcaaccaccatggccgctctcgtaagcacactgacacgttctctcaagaggcttttaaacaaataa

SEQ ID NO: 7770 - DNA, 7916 bp, Homo sapiens
  source 1..7916: mol_type = unassigned DNA; mol_type = unassigned DNA
tttccagccacaggacgaagtcttcaggctggccgcctccctcgggaacctggggcttgagccaggtgccgccctatggatgggagatgacggcaaaccgagatgggcgagactacttcatcaatcacatgacacaggcaatcccttttgacgaccctcggttagagagctgccaaatcatccctccggctcctcggaaggtggagatgagaagggaccccgtgctgggatttggttttgtggcaggcagtgaaaagccagtggtcgttcgctcagtaacaccaggtggcccctctgaaggcaagctgatcccgggagatcagattgtaatgattaatgatgaaccggtcagcgctgcacccagagagcgggtcatcgatctggtcagaagctgcaaagaatcgatactcctcactgtcattcagccttacccttctcccaaatcagcatttattagtgctgcaaaaaaggcaagattaaagtccaatcctgtcaaagtacgcttctctgaggaggtcatcatcaacggccaagtgtcggaaactgttaaggacaactcacttctttttatgccaaatgttttgaaagtctatctggaaaatgggcagaccaaatcatttcgttttgactgcagcacttccattaaggatgtcatcttaacccttcaagagaagctctccatcaaaggcattgaacacttctctctcatgctggagcagaggacagaaggggctggaacgaagctgctcttgcttcatgaacaggagactctaactcaggtgacacagaggcccagctcccataagatgagatgtcttttccgaattagcttcgtcccaaaagatccaattgaccttttaaggagagatccagttgctttcgagtatctctatgttcagagttgtaacgatgtggttcaggagcgatttgggccggagctgaaatatgacatagccctgcggctggccgcattacaaatgtacattgcaaccgttaccaccaagcaaacgcagaaaatctccctcaaatacatcgaaaaagaatggggattagagacttttcttccctctgctgtgctgcaaagcatgaaagagaagaacataaagaaagcactttcacaccttgtcaaagcaaatcaaaacttggtaccaccgggtaaaaagctctctgcactacaagccaaggtccattatctcaagttcctcagtgacctacgattgtatgggggccgtgtgttcaaggcaacattagtgcaggcagaaaagcgctcggaagtgactctcctggttgggccccggtatggcataagccatgtcatcaacaccaaaaccaatctggtggctcttttagccgactttagccacgtcaacaggatcgaaatgttttccgaggaggagagcttggtgcgggtagaactccacgtgctagatctgaaacctatcacgcttctgatggaatcctcagatgccatgaacctggcctgcttgacggctggatactaccggctgcttgttgattccaggaggtcgatatttaacatggccaacaagaaaaacacagcgacccaggaaacaggacctgaaaacaaggggaagcataacctccttggcccagattggaactgtataccccaaatgaccacctttattggcgaaggggaacaagaagcccagataacatacatagattcaaagcagaagacggtggagatcacagacagcaccatgtgtccaaaagagcaccggcacttgtacatagacaatgcctatagttcagatggacttaaccagcagctgagccagcccggggaggccccctgtgaggcagactacagaagtctagctcagcggtccctattgaccctctcaggaccagaaactctgaagaaagcacaggaatctccgagaggagctaaagtgtcctttatttttggagacttcgccttggatgatggtattagtcccccaacccttggctatgaaacgctactagatgagggtcctgaaatgctggagaagcagagaaatctctacattggcagtgccaatgacatgaagggcctggatctcactccagaggcagagggcatccagtttgtggaaaattctgtttatgcaaacataggcgatgtgaagagcttccaggccgcggaggggatcgaggaacccctcttgcatgacatctgttatgcagaaaacactgatgacgcggaggacgaggacgaggtgagctgcgaggaggacctcgtggtgggggagatgaaccagccggccatcctcaacctgtctgggtcaagcgatgacatcattgacctcacatccctgccccctccagaaggtgatgacaatgaggatgacttcctgttgcgttccttgaacatggccattgccgcacccccacctggctttagagacagttcagatgaagaggactctcagagccaggcagcttccttccccgaggacaaggagaaaggcagcagcctgcaaaatgatgagatccccgtgtccctcattgacgctgtgcccaccagcgccgaaggcaagtgtgagaagggactggataatgccgtcgtctccacgctgggagctctagaggctctatccgtgtcagaagaacagcagaccagtgacaattcaggtgtagccatcttgcgggcttatagtcctgagtcttcgtcagactcgggcaatgaaactaactcttctgaaatgactgagagttctgaactggccacagcacaaaaacagtcagaaaacctctcccgcatgttcttggccactcacgaaggctaccacccccttgcagaagagcagaccgagttcccggcctccaagacccccgctgggggcttgcctccaaagtcctcgcacgccctggctgctaggccagcaaccgacctcccgcccaaagttgtgccttccaagcagttacttcactcagaccacatggagatggagcctgaaactatggagactaagtcggtcactgactattttagcaaactgcacatggggtcggtggcatactcctgcactagcaaaaggaaaagcaagctggccgatggtgaggggaaggcaccccctaatgggaacacaacaggaaaaaaacagcaggggaccaaaacggcagagatggaggaggaggccagtggtaaatttggtactgtgtcttcacgagacagtcaacacctgagcacttttaatctggagagaactgcctttcgcaaggacagtcaaagatggtatgtggccactgaaggtgggatggctgaaaaaagtggattagaagcagcaacagggaaaacctttccaagagcttctggtcttggggcaagggaggccgaagggaaggaagaaggagctcctgatggagaaaccagtgatggctcaggacttggtcaaggggaccgcttcttaactgacgtgacctgtgcatcttcagccaaagacttagataacccagaggacgctgactcgtccacctgcgaccatccttccaagcttcctgaggctgatgagagtgtggcccgcctttgtgactaccacttggccaagcggatgtcatcactgcaaagcgagggccatttttctctgcagagctcccaaggctcttcagtggatgcaggctgtggcacaggcagcagtggcagtgcctgtgccacacccgtggagtcgccgctctgcccctccctggggaagcacttgattcctgacgcttctgggaaaggcgtgaattacattccttcagaggagagagcccctgggcttcccaaccacggagccacctttaaggaactgcacccacagacagaagggatgtgtccacggatgacagtgcctgctctgcacacagccattaacaccgaacccctgtttggcacattgagagatggatgccatcggctccccaagattaaggaaaccacagtgtagctttgacagagcctgggaaggagagacgaggaggcatgccttcagcttggtctcaacatcctgaagctgatcccatcctgctaccatcaaacattcactcggaatcaaaggtgccaattccaaatcaagaccctaatgatttctcccaagcaaatcaggcatacggagaggctgtgagctggcggccaccggatctgagaggggggagcctcaggacacctcccagccagaaggctctgagacatagcagcagtatcctctccggatctgtcgatttggagaccttccgagagagaaccaagggtgcagtcagcttaaagtgtccaggcatcacagaagcacaggaggccagttctgaaaggcgagcagaactccccctggggaggaagctcaccaaaagtttttcccaaagctcaatgcacttgagctctgaggggaggtttcacaaaaggtccccagtggctcataaagactcaaagctgtataggacattacccttgcggaagctggagggcagcaattggagatgccggggacccttcagctattgcttcctgaaccgagggcaggatgaagatggtgaggaagaagaggagaggggagaggccaccgtccaggtctcttgcctctatagaccacagatgactcaagccatgccagaaccaagcagcccatgcctggctgtggcgattcagaagcaacgaggggagctatccagagggtcagtgctgaaggtctgggcagaagacctgcgagacccagatgacttggacttcagcaacctggcttttgatgcccggattgcaagaataaatgccctaaaggagagcacatatgcaatgcctgatgggttccttgcagcccaaaatgatgccaatgagctgctctgtctcgtcagggcaaccaaggagaagagggaggagtcacgccctgaagcgtacgaccttacactttctcagtacaagcaactgttatccattgagtccagacagttgggaagtgcctgtaggaaaatggcgatggctgagaaaagcccggaggagatgctcctagctatgacttccagctttcaagtgctctgttgcctaacagaagcttgcatgcgattagttaaagtcgtgaactcagaaacacagcggcaggaaattgtagggaagatcgatgaagtggtcataaattacatttgtctactgaaagctgccgaagcagccactggaaagaaccctggggaccctaatgttggactctcggcgcgacactcaaccaccatggccgctctcgtaagcacactgacacgttctctcaagaggcttttaaacaaataaatatggaagtcacgtcataatctacctttgcaaagccatacatgaacttttatttactttgtgtgtatgatgaacagatgtctcctttcttctctctgtatattttgttattttatataaaataggagataaaagtcacattgatgaaatgttgaaatgtactaatcagatgtattctgtttatattatacatatatatacacgtaaaagaaatatccaagaaagtgatgacatttggctatttttcatatagttaaaactccaggtatatgatgtgaaattttaaattctaccatgttagagcaaaacaatgaatcctatcccctttctttccaagtagctacttggaaaccatatcattcatatttagaagtaaaacacaaaacaaaaaagagagagaaaagaaaagaaatcacaatgtatataaaacagtacttatgttttaaaattatgatttttaagcattggaaatagcaaaaagacatttaaaattcaagaagctattatgaattactagagaatatatctgtaataaattaattttttgctcatagtatttggttactggatgctttcttccaagaatcccacatatttaatttgggtttttgctactggggctacaaattggtggggatggattctactgtgtcagcacaaatgctcttcacagtggttctagcatttaaaaaacttcccggggagaagaacagaggggatgatgggcagtttcctaggtaacacctagagttatagaatatctcattacataaaatgtatggaattaataataccaaaattaattatttgatggaaagatctgctttgactaaatgtcaaaaatctgcaaaccaaagacattatcttcccctcatcccaactcaactacgaaacttaaaattccctttagagtgataggacatttagtaaagtatttgcaaacttaaaaaaaggaacatttaatgatcatcaaaattaagtacagattcagtaatgtagaccagaccacacaccagcacctgtgagtctcatctcagatcacagctctcagcatagggcttcatgcatcaccgcctctacagaggctaaggctgccagtcaaatttggaattatagcgtagtactgggacaaaatctcaaatcttggatgttccagaaaatcagggagagatggctactgtaatcatgggagccatgagtaaatagttaagtatttattaaataaatacttaatctggattggctgataaaaatatgaaatctgaaaaaaaaaagaaagaaatggaagtggtatatttgaccagttcaagtgaaaccaatggaatgcaaagaactttccaggactgtcacatctctaaaagtaccctgcagtcataaaataaaatcgatatgtatatatgtatttcctgggtcattcagtgctcaagttacatgcactcctacttagacaggtggctccttaagaacatgatgggagtacaccaggtgcaaatatttctacttttgtagcctgctgagaaggagtcataacacagtccacaattgcaatctctctctagtcagccattccacagggactcaacaacaaaagccgcacgtggttatggatggcagcaaaggaaaggagtttaggtgtgtgttattataaataatgtttaactaaataataaaacattatttcattacaattataattataaatattggtgttttgatattgagagatattagtggtgtttactgtggaaaatcttagtaaatatcattctgtgtactaaaatcctaacctattaataggatgtgtgccctatgtcagacagtgtgctaagcatattaactatattatctcatttaatcatcacaacaatctgctggtttggacactattctctctggaggcaatatggatgagttcttacggatatggggtttggggtcagaaacatcttgattaaaattttgactctgccattttctagcccttttatgttgggaaagctactttttctagtctcaatttcctcataataaaatgaaaatcaattataagatcgatttccatagggttgtcatgagttttgagtaaaaatgtgtatgtaaagttcttaccacaatacctggcagagagtaagtattcaattaatgttagctattattatcatcataatcgttgtgttaaatatattgcccaagataatatgtgggggaatgtttgttttatatgcatattgtatcctgactgtgtgcagaacacattatgtgtattgcatatatgtaaaagaagtgtacaaggaagtggccatccttgttcaagttacgtatctagttagaacaacttcccagtccattggagttctttgagaagcctcagggaagtagctctgggtccttctaatcaacctcccattactgcgccagtaagtttctgtttcttataaataaactctttgctattcagaaaacctcaaggggcccccacattcactaagcatggggctcctaactggggtccaggtccatagagtgtaggaagaacatattagaacaatacttgtgcttatttttatctagcttttttatgtttgtgtatgttttataatggcataatagtacaatggtacatgtacataattttaaataaataaatgaatgaatg

SEQ ID NO: 7771 - DNA, 2678 bp, Homo sapiens
  source 1..2678: mol_type = unassigned DNA; mol_type = unassigned DNA
atactgctgggattacaggcgcccgccaccacgcccggctaattttttgtatttttagtagagacggggtttcactgtgttggcaaggatggtctctatctcctgacctcgtgatatgcccgcctccgcctcccaaagtgctgggattacaggcttgagccaccgcgtctggcctatttatttattattttcgagacggagtgttgctcttgtggcccaggctggagtgcaacggcgggatttcggctcactgcaacctctgcctcccgggttcaagcaattctcctgcctcagcctcctgagtagctgggattacaggcaggcaccaccacacccggctaattttgtatttttagtagaaacggggtttctccatgttggtcagtctggtttcgaactcccagcgtcaggtcatctgcctgcctcggcctcccaaagtgctgggattacaggcgtgagccaccgcgcccagccacttctgtatttttaaaaaagtggtaaggaagtggaggattaaatgatttgcccaaagtctcacagtaatttgtagagctgagattgaaattcgggtgaaacttcacatatcacattctttttatcagatggcagtttctggatttactcttggtacctgcatacttctgttgcacattagttatgtggctaattatcccaatggaaaagtaacacagtcatgccatggaatgattcctgaacatggtcatagtccacagtctgttcctgttcatgacatttacgtgagtcagatgacattcaggccaggagatcagattgaagttactttgtcagggcatccatttaaaggctttctcctagaagcgcgtaatgctgaggatctgaatggccctcctattggctccttcacattgattgacagtgaagtgtcacaacttttgacctgtgaagatatacagggatcagcagtgagtcacagaagtgcatctaaaaaaacagaaattaaagtctactggaatgctccaagcagtgctccaaatcacacacagtttctagtcacagttgttgagaagtataaaatctactgggtgaagattcctggtcctataatttcacaaccaaatgcatttccttttacaacacctaaagctacagtagtacctttgccaacgttacctcccgtttcccacttaaccaaaccattcagtgcctcagattgtgggaacaagaagttctgtattaggagtcctttgaactgtgacccagagaaggaggcttcctgtgtcttcttgtccttcacaagagatgaccaatcggtgatggttgaaatgagcggccccagtaaaggctatttatcctttgcattgtctcatgatcagtggatgggtgatgatgatgcttatctgtgtattcatgaagatcagactgtgtacatccagccttcccatttaacggggcgaagtcaccctgtaatggactccagggatacccttgaggatatggcttggaggttggcggacggtgttatgcagtgttctttcagaagaaacattacccttcctggagttaagaatagatttgatctaaacacaagctattacatatttctagcagatggtgcagctaatgatggtcgaatttacaagcactctcagcaacctttgattacctatgaaaaatatgatgtgacagactctccaaagaacataggaggatcccattctgtactccttctgaaggttcatggtgccttaatgtttgtggcatggatgactactgttagcataggtgtactggttgcccggttcttcaagccagtttggtcaaaagctttcttgcttggtgaagcagcttggtttcaggtgcatcggatgctcatgttcaccacaactgtcctcacctgcattgcttttgttatgccgtttatatacaggggaggctggagtaggcatgcaggttaccacccatacctcggctgtatagtgatgactttggcagttcttcagcctcttctggcagtcttcaggccacctttacatgacccaagaaggcaaatgtttaactggactcattggagtatgggaacagctgctagaataatagcagtggcagcgatgttcctgggaatggatttaccaggactgaatcttcctgattcatggaaaacctatgcaatgaccggattcgtagcctggcatgttgggactgaggttgttctggagttgaaatattggatgatgacagaattcagatccttcagtcatttactgcagtggaaacagagggtcatgcttttaaaaaggcagtgttggcaatttatgtctgtgggaatgttacttttctcatcatatttttatctgcaatcaaccatctatgagcaagcaaagaccttggcttttgcaggccaagtgataattatcatcaaaccaaagaaacttgaagcctgtcctgactgcctggagcatatttgtgaattctcacttggaagactggggtcatgtctgtagaggaattctgaagtccagcctttagagaacaacattcaagagggtcatatagactataaattaatgtcatgccctatatgtaattctgggtcttaaaggaaagattgtacttcaggagaagtaactctcaaatatttcatgccaagattttaagaatgttggtatttaagaaaataaatagtgatttggaaaatc

SEQ ID NO: 7772 - DNA, 216 bp, Homo sapiens
  source 1..216: mol_type = unassigned DNA; mol_type = unassigned DNA
gttaccacccatacctcggctgtatagtgatgactttggcagttcttcagcctcttctggcagtcttcaggccacctttacatgacccaagtggcagcgatgttcctgggaatggatttaccaggactgaatcttcctgattcatggaaaacctatgcaatgaccggattcgtagcctggcatgttgggactgaggttgttctggaggtacatgct

SEQ ID NO: 7773 - DNA, 440 bp, Homo sapiens
  source 1..440: mol_type = unassigned DNA; mol_type = unassigned DNA
tcatgttcaccacaactgtcctcacctgcattgcttttgttatgccgtttatatacaggggaggctggagtaggcatgcaggttaccacccatacctcggctgtatagtgatgactttggcagttcttcagcctcttctggcagtcttcaggccacctttacatgacccaagaaggcaaatgtttaactggactcattggagtatgggaacagctgctagaataatagcagacttaaaacaatctggaaaatgtgggtgcatctcttttaaggattggtagattacgcagccataaaaaagaatgaagtcatgtcttttgtagcaacatggatgctgctggaagtgattatcctacatgaattaatgcagaaacagaaaatcacataccacatgttctcacttataaattggcagcgatgttcctgggaatggatttacc

SEQ ID NO: 7774 - DNA, 1304 bp, Homo sapiens
  source 1..1304: mol_type = unassigned DNA; mol_type = unassigned DNA
ggttaggctgccttcgcttctcaaggtaaggaagtggaggattaaatgatttgcccaaagtctcacagtaatttgtagagctgagattgaaattcgggtgaaacttcacatatcacattctttttatcagatggcagtttctggatttactcttggtacctgcatacttctgttgcacattagttatgtggctaattatcccaatggaaaagtaacacagtcatgccatggaatgattcctgaacatggtcatagtccacagtctgttcctgttcatgacatttacgtgagtcagatgacattcaggccaggagatcagattgaaggtaccgtgctgggattaactgtttacattttggatttcactcttttactgtttattgaatctttattattacttgatttagaagatttcacttaaatctgttttcttttgtaagatactatcatacttcttatttttggttccagatgactgtattacttaagtagtctgtgtattccccatccagaacaggctttaaaataagtttttatcgttatttactatttttattaattgtgctatcacttcaagagaagagaaaaatgaagtttattttatcttgtttaaaatataataaacccttgtccttcttgatatcatataattttaagaacaattctctaatttctctggtaaaatgtaggctgattattaaagataaatctataacagcattttgcaaactattttttgcaactctagaaatgcaaaatgttaacaggtactctgttacatagagagtatatagaaaaataagtttggaatattctgtgtgatatataatataccttagagttcacactgtacagtaggatattaaatatcctaagaaatttgcagtaaagaaacaagtatttactttcatccagtgtttttctttttttgtaattcaataagaatttattgagtgtcactgtgagccagacactgtgttaaatactgcaattcaaaagaaaacacctcatgttttttcctctaatgaggtcaagtaaacattttttttttaaacttttattttgggttcaggggtacatgtgtaggtttgtttataggtaaattccatgtcacgagggtttggtgtacagattatttcatcactcaggtgataagcatagtacccaattggtatcatctagcattttccaaactaacttagccttatggactgcccctggaccatcacctatttttcttttctctttgcggaatggctattaatatctcacagattgaatatcttatggaacactggaaaaaa

SEQ ID NO: 7775 - DNA, 8197 bp, Homo sapiens
  source 1..8197: mol_type = unassigned DNA; mol_type = unassigned DNA
atgcgcagaccgaggcagggaggcgggggtgcgggaggctccgcggctgcgcgggcgcgtgctggtggcctcggcggaggctcagtcccggcccgcgcccgcggcgcccccgctgcggcccgagcggcctggctgcgggatctgtgcgcacggatggcgcggccgccccggcagcacccgggggtctgggcgtcgctgctcctgctgctactgacggggcccgccgcctgcgcagccagccccgcggacgacggtgcgggcccggggggccggggaccccggggacgcgcgcggggggacacgggcgccgacgaggcggtgccgcgccacgactcctcctacggcaccttcgcgggggagttctacgacctgcgctacctgtcggaggagggttaccccttccctactgctcctcctgtggatccatttgccaaaatcaaagtggacgactgtggaaaaactaagggatgctttagatatggcaaaccaggctgtaatgcagagacctgtgactatttcctcagctaccggatgataggggctgatgtagaatttgagctgagtgcagacacagatggttgggtagcagttggattctcttcagacaagaaaatgggtggtgatgatgtcatggcctgcgtccatgatgacaatggcagggtccgcatacagcacttctataatgtaggccagtgggcaaaggagattcagagaaaccctgccagagatgaagaaggagtttttgagaacaatcgcgtcacctgcagatttaaacgccctgtgaatgttcccagagatgaaacaattgttgatctgcatttgagttggtattatctgtttgcttggggtccagccattcagggctctatcactcgacatgatatagactcaccgccggcttcagagcgtgttgtcagtatttacaagtatgaagacatttttatgccatcagctgcctatcaaaccttctcatctccattttgtttgcttctgattgttgctctgaccttctacctattgatgggaaccccctaaccacagctgcagggccaacagattacatggattgggaagtctttagtataaatatattttttaaagaatatccagtataattttagcttcaattatttaagaaaaaaaacctcatataatttcagctttttggaagaaagaacaagcttcttttgtagtcaaagaagattgtttaataatgaccctatacttttggaacatacttacaccttttctaagcactttcacatatgttttcttatttaacttcacaacatctctgagttggattgatgaaaattgtgattgccatcttcctgaatgggatttgagacccaaaaagactgcctttttatgatccacataccatataactttggctagaaatgacaaatagaaaggcagagaaggaactaagtatagaaatcatgtctcaaaacagtctttactatgagtgctatagcacagagagttattttgaatattactagggagaactttactgaatgtcataagttcacagtcagccttttgggcagaagaaatttcaaatttccgtaaagcagaagtgcttttggatatttacacagccaatggggagattggaggaaaatacaatgatatgaaaatagttcatatttatttgaaattttggccgagcatggtggctcacgcctgtgatcccagcactttaggaggccaagacgggcaggtcacctgaggtcaggagttcgagaccagcctggccaatgtggtgaaacccccgtctctattaaaaagtacaaaaatgagccaggcgtggtggtgcacacctataatcccagctattcgggaggctgaggcaggagaattgctggaacccaggaggcggaggttgcagtgagccgagattgtgccagtgcactccagcctaggtgacagagccagactctgtctcaaaaataactaactaaataaataatatttatttgaaatttcttctcagttagagagcagctatgggaaaacatttttactgctatttgcaaaggttggagaccaaactgtgagcattcctgaagatgtaaagttgtgttaatgatattaaaaaaaaaaaaaaagggaattcttagcagttagaatttgaacttttctaccactgaattttataaaactaaggtattcatctgtggttacagtgaattctcttgtcagagccagcataccttaagtgtgattaaaaatgtatttttttttttttttgcgatgaattttccctcttgtcgcccaggctggagtacaatggtgtgatctcagcttcactgcaacctccgcctcccaggttcaagtgattctcctgcctcagcctcctgagtagatgggattacaggcatgtgccactatgcctggctaatttttttgtatttttagtagagatggagtttcaccattttagtcaggctggtctcgaactcctgacctcaggtgatccacctgctttggcctcccagagtgctaggattacaggtgtgagccaccgtgcctggcctaaaaatgtgttatatcagacaaaacatcttagtaaaaatttagggcattttaataataagccaacagtttttgagactgtagagattttgagtagaattttttttatgaggtggctttttaaaaaataattgaaaatgggaaaatgacccataaagtgaattcacctagaatatccatttaaatgttcagacttgtggctgagcgcggtggctcacacctgtaatcccagcactttgggaggccaaggcaggcggatcacctgaggtcaggagttcgagaccagtctggccaacatggcaaaaccttgtctccactaaaaatacaaaaattagccgggtgtggtggcacatgcctgtaatcccagccacttgggaggctgaggcacgagaatcacttgaaccttggaggcagagcttgcagtgagccaaaattgtgccacttgcactccagcctgggtgacagagggagaccctgtctcaaaaaaataagtaaaataaaatgttcagacttataaactagacaggtagtcagcataattcatagtaatgccttgacattaggcgccccaaaggactcctttgttctttgttccaaatgtctgtgctaactgcccattttgaggagagaagtctgcaggtatagttagtgctgctgagacatttccactctggcattctagagttctctggcttgcccttgttgctttaaagctggttccaacttcgtgggctttatgattgagcaacactggtgattgtgatttctaataccaccctccagattcatgtcacaggtgaaagtctgcctgtggggagagctttcacattctcctggagttgaaccaaaataaggaaaacatcaacaaacacagttaccaaaagcttccaaggagggatggaggagaaattctgttcattgcagatggggagaaattaaatgacatcaagtgcataatggaactgggtaggattcaaactcaagtcccctggttcaagtccttgactccactctgggcatggctaagtctggcctgtgtctcatcttctcagctctagtggctgtttagtagtgaagatactgatatgcaggcagccatgttgtaaataagaagcaaatatttttatatttctctctcttatgtgtataatatttgagctacaaacaggttaaaacaaaagagagacttcagcttagtagcaggcagggaaggaagaagtgaatgcagcttccttccgcttacatttctaatcaagctaattatttcactagtgatttctcatttgattaccgattttgcttatttatgcttagaactttcaatgacttctcagtgccattaaggtaaaatgcaagccatttctgtgacctgcaatatcatcttttgccactcctcctcacttgctatgtcttagcaagactgagaggctctcagttcttcagacctgctctatctcacctctcattttgttcatattctccacctcttgtgcttgatgaactcctattcacctatcaggtcacaacttaaatattttttcctccaaatctctggactacataggtccaggcccccatcaaatgctcccatagcacattgggcttcctcatcaacatgctcgttatacttttctagaattgctggcttgtcctccttgttatctccctaatgcagagaccattactcatcattgtagcagatatttatccatatcaggtactcagcaaacatttgtggaatgaatctatatgtgaaactatacttctatggcaagtttgtttggttcagaaggcttgcatttcatgtatattgggagactggccaacatttttatattcttcctcctatgctcaaaccataaataattatgttagcaaacactgaactttgtcttttgaaacataaatagaaacatccttagtaacagtactaacagtaatcatttttcagaaataagaattcacaccagtgatacagaatggcctttgaccattatctcagagaactagcagtcgatagacatgctgaagtgataattccaaaaacttcagtttcattcatccctacttaaatataagagaatcaacttctattttatgtctgtattcccattttctaatatactacttgtcacagaggagatgcccaaccagtgtttttcgtaaagtacctgaatagattaataataatgctagtgaaatatatttagtgctgttctaagcactttacatgaattaactcatttaatcctcaccgcaaccataggaagtagattctattatttatccaattttacagatgaaaaaactgaggctggtcacttgacataaattaccagtgctggccaggactttagagaccatttaatccaatgctcttattttacagaggtgcagctgaagcctaaggaggtgatatgatttcctacacattcatgcaccttcgtgcacatccattaaaacttttattaaatggaacccactatccatactccaattagctaggtgccttttttcccccatttagtaatttacaattaattggaggactttttatagttatatttagaggaaaggagcatgttttactctatatcaactttcttttctgcttaaaagcattttgattctttattttaccagtcattttagttcttttaataggtttaatacacagatcaaacaagacttaaatacatttttaacaatgtaacaatttaaaagaaattgcctaaaacctaggtcttctaacttggagcccagtgctttttttattgctccgctgagtcaaaaggtgaatatataaacatgatttcagatagaatgcagaagctgtatttaattaagttggcttttgtcattaaagaaatcagaaagtttggacaactcaggaatggatttccatcctagatggtatttactactatttctggaattaagtttactgtctatattcaggattttgtgcataagagacgtgaccactgaggttgtgtgtcattcttatctctactccaggggtcagcaaactttctctgttaagggtcagatagtagttttttggcttttcagtctctgtttggctctgctataaacaatacataaatgaatgagcatggctatgttccaataaaacttaattgacactgaactttgaatttcatgtacttttcaaatgtcacaaatgttttccttttgatttttttcagaaagccattaaaaaaatccaaagaccattcttagcttgcaggctgcacaaaaacaggaagcaggcggggtttgcttatggactgtggctttcccacccttgttcttagatagggacacaccaatatatcatgattagttgtaaaggatactgccagtaacatattattactggttagttgtaagaatatcaaagttagtgaataatttgcttttaaaataaattattgttgatttatttttataaataaatggcacagggcatctcatgctcttgcattctaatatattttctggaattgatgcaaaagtggtggcagtaaagtacagagccggctaagcagcagttttgtcttaagtaactgtggtgatcatggacaaccattgcgctgaactgctcttcatggtaaggatttcagtgtttcagagtaattcattaacctagagatgttttaaaaagttgtatcggccgggcgcggtggctcaagcctgtaatcccagcacttcgggaggccgaggtgggcggatcacgagatcaggagatcgagaccatcctggctgacacggtgaaaccccatctctactaaaaatacaaaaaaaattagctgggcgtggtggcgggagcctgtagtcccagctactcaggaggctgaggcaagagaatggcgtgaacccgggaggtggagctttcaatgagccgagattgcccctctgcactccagcctgggtaacagagcaagactccgtctaaaaaataaataaataaaataaaataaaataaaataaaagttgtatcaaaatctgctgcaccatgggagtgttttacacatgtgatgtggcatctaccttatgtaccataatggaaaaatgtttgagaaccactgcactaggccaaaggctgggatgtgtatactttgctgccgtgtataattgtatgtccttgttctctaaacggaattggttatgtttagtgaacagttaggtggttctccatgtgtttatatacacagacgatccccgaatttggatggttcaacttaagagttttcaaacttacgatgatatgaaagtgatatacatttgatacattcctacaacttacaatggggttatgtcccataattgttttgacttatgatattttcaacttacaattgatgggtttactgagacataaccctcttgtaacttgaggagcatgtgtatatttgtacatacatgatggtgtgtgtttatacacaaaggcctgaatatacacaccatgagcatttgaaggtctttgtcaaggttgtttctgtttctgatctcttgcctactttaaaacccaagaggtagaacattatgcatattacaggcaaaactatgcttgagtttatagcaatgtagtttgtagaaaggattcctggatgttttactaagcctttcctcctccattcaacattatatgaattgttaagaacatataaagtaccactgttgaatgtgacttttctatactgttagttaagaaaccaagactagtgttagctgagtaactggcatgttgatgcaacctatacaggttttgtatttaattaggttccttattcagttattcaagtatccagttatttagtttcaaggtagatttctttgtttttatatttaataaaagacttgcatataagttcctcttcatgaaaatagtggctaggctagtgtgattttaagtatgtctggcaactcaaaatgtaatggattcatcaagctatttgggatttttaacataaaacacactgctgcttgattaatgtgttcagttttcccctggatatttgctattaggctgatagccatttggttggattcttctggagagtaattgattctctaaggtaatggggtgctgcagtgggtgtagcattcacccaggtcactagaatcctacctgtttcatcacatagaaggccctggccatggggaagagtgaatgcagcttctccggatgccttatttccacagacatgctgatatgctggaacaatctggctccaggagtattaatatacttttttgagactgtctacaaaatactattttgtaaaaactatgcctttacatagacattgataggttatatttgttttataacaattgtgtacctaatgtttgtgattaattttgagatttatgtatatttataagcctatcttatgtaaatttttactctaagatgtgtggcacattactaataaagacgtggatttctatttatgtaaagtaattgtagcaatattcctagatgctacctaaatgattgttctgtccatttgccatcacaaatacttttatctttggatgattatgttagtcagaatatattaattagatttaaactttaaaataagaattacaacatagtttgaaattcttcctgttgatgtaattaaagttagtttataattcctta

SEQ ID NO: 7776 - DNA, 10697 bp, Homo sapiens
  source 1..10697: mol_type = unassigned DNA; mol_type = unassigned DNA
agggggcggcgctcccggcccatcccttagccccgcggcggccgtgtgggccggaggctgcctgcaccgcgtcagggaggccggcctagaaaccctccctcccagaagaaagccgatcccagttcaggtggggtcttcctcggttgcgtacctggctggagccgagctggtgggcggccggcagccggcgtttctggtgatgacagccccgaaatgaaagcagcgcggccgccgcctccgagggctgcagggagatcagcgtccagcaaataagaagcaagtcctggacccggaggaggaggagcggccgagcatctctctctgctccgccgtgtcctttagatgagcactcccggccggagccggaggtggatccgcagagctgcctctgggcgcctgaccccgcgctgacatcacaacctgtgacaggcgcatcacgcccggtacctgctcccggccgctgcccgtcctcccagcctctttgtatgccgcagacatggccagccagcaggattcgggcttctttgagatcagtatcaaatatttactgaaatcctggagtaatacttctcccgttggcaacggttacatcaagcctccggttccacctgcttctggcacgcacagggagaaagggccgccaaccatgctacccatcaatgtggacccagacagtaaaccaggagaatatgtcctcaaaagtttatttgtcaacttcaccactcaggctgaacgcaagattcgtatcattatggcagagcccctggaaaagccattgacaaaatctctgcaacgtggagaagacccccaatttgatcaggtcatcagctcaatgagctccctttctgagtactgcctgccttccattctacgtacattatttgactggtataaaaggcaaaatggcattgaggatgaatcacatgaatacagaccaagaacaagcaataaatcaaaaagcgatgaacaacagcgagattatttaatggaaagacgggacctcgccattgattttattttttctttagtattaatagaagttttgaaacagattccacttcatcctgtaatagacagtttaatacatgatgttattaacttggctttcaagcactttaaatacaaagaagggtaccttggtcccaacactggcaatatgcatattgtggcagacctgtatgcagaagtcattggagtgttggcacaagccaaattccctgctgtaaagaagaaatttatggcggagctaaaagaattacggcacaaagagcagaacccatatgtggttcaaagcattatcagcttaataatgggcatgaaattctttcgaattaagatgtatccagtggaggattttgaggcctctcttcagtttatgcaggaatgtgcacattacttcctcgaggtcaaagacaaagatatcaagcatgccttggctgggctttttgttgaaatacttgttccagttgctgctgctgttaaaaatgaagtaaatgttccctgccttagaaattttgtggaaagcctgtatgacaccacgctggaactttcttctcgaaagaagcattccttggccttgtaccccctggtgacctgtttgctctgtgtcagtcagaagcagctgttcctgaacaggtggcacattttcctcaacaactgcttgtccaaccttaaaaacaaagatcccaagatggctcgagttgcactggaatctctctacagattactttgggtttacatgattcgaattaaatgtgaaagcaacacagctactcagagccgacttataaccatcatcacaacacttttccccaaagggtcccgcggtgtggtaccaagggacatgcctctgaacatctttgtgaaaatcatccagttcattgcccaggaacgtttagattttgcaatgaaagaaatcattttcgattttctttgtgtgggaaaaccagcaaaagcattcagtctcaacccagagagaatgaacattggtttacgggcattcttggtcatagctgatagcttgcagcagaaagatggggaacctcccatgccggttacaggagccgttcttccttcaggaaacacgttaagagtaaagaaaacatatttgagtaaaacactaactgaagaggaagccaaaatgataggcatgtccttatattactctcaagtacgaaaagctgtagacaacattttaaggcaccttgataaagaagtaggaaggtgtatgatgctgactaatgtacagatgttaaacaaagaaccggaagacatgatcacgggtgagagaaagccaaaaatagatcttttcaggacctgtgttgctgctattcctcgactgcttcctgatgggatgtcaaaacttgaacttattgacttactggctaggctctctattcatatggatgatgaattgcgacatattgcacaaaattctcttcagggtttacttgttgacttctcagattggagggaagatgtactatttggctttaccaacttcctgctccgggaagtaaatgatatgcatcacacactccttgattcgtccctgaagttgctgctgcagctgctcacccagtggaaactagtcatccagacacaaggaaaagtctatgaacaagccaacaaaatcagaaattcagagctcatcgcaaatggctccagtcacagaattcagtcggaacgaggtccccactgcagtgtactccacgctgtagaaggttttgctctggttttactctgcagtttccaggtggccacacgcaaactgtccgttttaatactcaaggaaattcgagcgttgtttattgccctggggcagcctgaggatgacgacaggccgatgattgatgtcatggatcagctaagttcttccattctagaaagttttattcatgtagcagtttcggattcagcaacattaccactcacccacaatgtggatctgcagtggttggtggaatggaacgcagtcctggtcaatagccattatgatgtgaaaagcccttcccatgtctggatatttgcacagtctgtcaaagacccctgggtcctctgcctcttcagcttcctccggcaggagaacttacccaagcactgccccacagccctcagctatgcctggccttatgccttcactcggctccagtcggtgatgcctctggtggacccaaatagcccaattaatgccaagaaaaccagcactgccggcagcggagacaactatgttactttgtggagaaattacctaattctttgttttggagttgcaaaacccagtattatgagcccaggacacttaagagcttccactccagaaataatggcgaccacacctgatggtacagtgagctacgataacaaggccataggcaccccatcggtgggagttctgttaaagcagttggtgcctttgatgagactagagagcattgagatcacagagtccttagttttaggatttggaagaacaaattcccttgttttcagagaattggtagaagaacttcatccattaatgaaagaagctctggaaagaagaccagagaacaagaaacgccgagaacggcgagacttgttaaggctacaactacttcgaatttttgaacttttggctgatgctggtgtaataagtgacagcacaaatggagccctagagcgggatactttagccctgggagctttgttcttagaatatgtggacttgacccgcatgctcctagaagctgaaaatgacaaagaagttgaaattcttaaagatatccgggcacattttagtgcaatggtggccaacttgattcagtgtgttccagttcaccaccgaagatttctcttcccccagcaaagtctgaggcaccaccttttcatcttattcagccagtgggcaggacccttcagcattatgttcactcctctggatcgttacagtgacagaaatcatcagattacaagatatcagtattgtgcattaaaagcaatgtcagcagtactgtgctgtggccctgtctttgacaatgtgggcctttccccagatggctacctatataaatggcttgacaacattctggcttgtcaagatttacgagttcatcaacttggctgcgaagttgttgtcttgctactggaacttaatcctgaccaaataaatctttttaactgggcaattgaccgatgctacacaggttcctaccaacttgcatctggctgcttcaaagccatagcaactgtgtgtggaagcaggaactatcccttcgacatagtgacattgttaaaccttgttctattcaaggcctctgacaccaacagagagatttatgaaatctccatgcagctcatgcagatccttgaagcaaagctttttgtatactcaaagaaagtcgctgagcaaagaccgggaagtattctctatggaacacacggcccgctgccacccctctacagcgtgtcacttgccctcttgtcatgtgagctggccaggatgtaccctgagctcacactccccctcttctcagaggtaagccagcgattccccacaacacaccccaacgggcgccagatcatgcttacctacctgctgccctggctgcacaacatcgagctggtggacagcaggctcctcctcccggggtcgagccccagcagcccagaggacgaagtcaaggaccgggaaggtgacgtgactgcttctcacgggctgagaggaaatggctggggctctccagaagccacgtcactggtcctgaacaacctcatgtacatgacggccaagtatggagatgaagttcctgggccagaaatggaaaatgcttggaatgctttagccaacaatgagaaatggagcaacaacctgaggatcaccttgcagttcctgattagcctctgtggggtcagcagcgacacagttctcctaccctatattaaaaaagtggcaatatacttgtgccgtaacaacaccattcaaaccatggaagagcttctctttgagctgcagcagacagagcccgtgaaccccatcgtccagcattgtgacaacccgcccttctaccgcttcacggccagtagcaaggcttccgcagcagcctcaggaaccacctctagcagcaatacagtggttgctggccaggaaaatttcccagatgctgaggagaacaagatattgaaagaatctgatgaaaggtttagtaatgtcatcagagcccacactcgcctcgagtcaagatacagcaatagctctggaggatcctacgatgaagataaaaatgatccaatttctccctacacgggctggttgctgactattacagagaccaagcagccgcagcccttaccgatgccttgtactggaggatgctgggcccccctggttgactatctcccggagaccatcactccccgggggccactccacaggtgcaatattgctgtaatttttatgactgaaatggtggtggatcacagtgtacgagaagactgggcgcttcatctaccattattacttcatgctgtcttcttaggtttagaccactaccggcctgaagtctttgaacacagcaaaaaactgcttcttcacctcttgattgccctctcttgcaacagcaatttccattccattgcttccgtgctcctgcagacccgagagatgggtgaagctaagactctaaccgtgcagccagcctaccaacctgaatatctctatacaggtggctttgacttcctgagagaggaccagtcatccccggtgcctgactcagggcttagttcaagctccacctcctctagcatcagtctgggaggcagcagtggaaacctcccacagatgacccaggaggtagaagatgtggacacagctgctgaaacagatgagaaggcaaacaagctcattgagtttctcacgaccagggcatttggtccactttggtgccatgaagacatcacacctaaaaatcaaaattcaaagagtgctgaacagctcactaattttctacgtcacgttgtatctgtatttaaagattccaaatcaggcttccatctggagcaccagttgagtgaagttgcattgcagacagccctcgcaagctcttcaaggcactatgctggtcggtccttccagatattccgggccctcaagcaacctctgtcagcacatgccttatctgaccttctctcaagattggtggaggtgataggagaacatggagatgagattcagggttatgtaatggaagcgctcctaaccttggaggcggctgtggataacttgtctgactgcttgaagaacagtgacctcctaactgtattgtcccgctcttcctcaccagatttaagctccagcagtaaactaacagcaagcagaaagagcacaggacaactaaacatgaacccgggaaccaccagcggcaacaccgcaactgccgaacggagccggcatcaacgaagcttctctgtgcccaagaagtttggtgtcatcgaccgatcctctgacccacctcgaagtgccacactggacagaattcaggcttgtacccaacaaggcctctcctcaaaaaccagaagctcatcctccttgaaggacagtctcacggacccatcccacataaaccatcccaccaacctgctggccaccatattctgggtcacagtggccttgatggagtctgattttgagtttgaatacttaatggccttaaggctgttgagcagactactggcacatatgccactcgataaggctgagaaccgagaaaagcttgagaaactccaggcacagctgaagtgggccgacttctccgggctgcagcagctgctgctgaaaggattcacatccctcaccaccacagacctgaccctgcagctcttcagtctgctgacaccagtgtccaaaatatccatggtggatgcatcccacgctattgggtttccactgaatgtcttgtgtctcctgcctcagctgattcagcattttgaaaatcccaatcagttctgtaaggatatagccgaaaggattgctcaggtttgtttagaagagaagaaccccaaactttcaaatcttgcacatgtcatgactctttataaaacgcacagctacacgagggactgtgccacgtgggtcaatgtggtctgtcgataccttcatgaagcatatgctgacattaccttgaatatggttacctacctggcagagctgctggagaagggcctccctagtgtgcagcagcccctgctccaggtgatctacagtcttctcagctacatggacctttctgtcgttcctgtcaaacagttcaatgtggaagttctgaagacaattgaaaaatatgtgcaaagtgttcactggagagaagctctgaatatcttgaagctggtagtttctcggtcagccagccttgttttaccttcataccagcacagtgacctctcaaaaatagaaatacatcgagtgtggactagtgcttccaaggaattacctgggaaaaccctggacttccacttcgatatttcggagactccaatcatcgggaggcggtatgatgagctgcagaattcttctgggcgtgatgggaagcccagggccatggccgtcacccggagcacatcttccacttcctcaggctccaactccaacgtccttgttccagtgagctggaaaaggccccagtattctcagaagagaacaaaagagaagttggtacatgtcctttctctgtgtggccaagaagtaggattgagcaaaaatccatcagtgattttttcatcgtgtggggatctggatctgcttgagcaccagacaagcttggtatcttctgaggacggtgcccgagagcaggagaacatggatgacacaaacagcgagcagcagtttagagtcttcagagacttcgacttcctagatgtggagctggaggatggagaggaacttcagggtgagagtatggacaatttcaactggggagtgcgcagacgttctctggacagcctggataagtgtgatatgcagattctggaggagcgccaactgtcaggaagcactcctagcctgaataaaatgcaccatgaggactccgatgaatcatccgaggaggaggacctcacagccagccagatcctggagcactcagacctaatcatgactctctccccctctgaagagacgaatcccatggagctgctcaccacagcctgtgactcgacccctgcagaacctcattcctttaacaccagaatgtccagctttgatgcttccttgcctgatatgaataatctgcagatttctgagggttcaaaggctgaagctgttcgtgaggaggaggacaccaccgtgcatgaggatgatctttctagttccatcaatgaactcccagcagcttttgaatgcagcgacagctttagcctggacatgactgagggggaagaaaaaggcaatcgggcactggaccagtttaccctggcgagctttggagaaggtgacaggggagtctctccccctccctcgcccttcttctcagccatccttgccgcctttcagcccgcagcctgtgacgatgccgaggaggcctggcgcagccacatcaaccagcttatgtgtgactcagatggctcctgtgctgtgtatacatttcatgtgttctcctccttgtttaagaatattcagaaaaggttctgcttcctaacctgtgatgcagccagttaccttggagataacctccggggaatcggatccaaatttgtcagctcttcccagatgctcacctcctgctctgaatgtcctacactttttgtggatgccgagactctcctttcatgtggacttctggacaagctcaagttcagtgtgttagaactgcaagaatatttggatacctacaacaacaggaaagaggccacactctcttggcttgcaaattgtaaggcaacatttgcagggggatcaagagatggagtaattacctgtcaaccaggggactccgaagaaaagcaattggaactgtgtcagagattatataagctacacttccagctgctattgctttttcagtcctactgtaagctcatcggccaggtgcacgaagttagctccatgccagagctgctgaatatgtccagggaactgagtgacctaaagaaacacctgaaggaagccagtgcagtcattgcagctgaccctctctattcagacggcgcgtggtccgagcccaccttcacgtccactgaagcagccatccagtccatgctggagtgcctgaagaacaacgaactcggcaaagctttgcggcagatcagggagtgcagaagtctgtggcccaatgacatctttggaagcagttctgatgatgaggtccagacactactgaatatttatttccgtcaccaaactctgggacagacgggtacttatgccctggtggggtctaaccagagcctgaccgagatctgcaccaagctgatggagctgaacatggagatccgggacatgatccgcagggcccagagttaccgagtcctcactacttttcttccagactccagtgtttctggcactagtctctgacaggagcctcctgtccccactgggttccaaactggcagtgctgccatgctggggcaacgtcattcagtgtcttctcggccttcaaaaggcttggacagactgttctccctcttgttacctgtagggctttttctaaagaggatggcagaacttccaacgtgtagcaatactataagaaccaaggtagcttagaacgtcctggacagactccactcatcatgctgtgtggcacaaatgtgttacatttgaccgagcatatgcaactcgctactgaagaagtgacttccgttgcataccaaagccgactacactgaacagtaccttcctttctagaaacaattttagattggcaaaagtgcaatgttttcttcactcaaaaaattttatattctcaaacatgtatattctttccctgtcttgttccattttcttttcttttttcttttttctttttcctttctttcgtgggctgagaaaggggcaggcaaaatgaagctggccactgaaaactgtaagatggtcaaaagctgacagcctgtgtatgtgaaaagggaattgtaaatggactgcaatgtaatgtacactgtaatttgaatacaattactgtatctaaaaggagctgctatgaagtacctttcttatgttgctaggctactgtttctgaaagccctggatctctttgcaccaaaaatggtccagatagactctttttaaggatcttggctgctttttactagaaggttgcttttatgagcatatttatactgctgaaggatgagtgttaattttaattaactttgccgttttgtagagaaaactattcacaagataaattccaagtcttttcacctgtcaggcatgcatattttaatatctgtttggatagtcagaagtagaatcataaaggtaaaatatgagttgttactttgtttcttcgatgtcatattttatgtgtaatatatatgtaaagggccattcttaagttctctccttaaacttaatgctgtcaagtgttagatgtgtgcatgtgaacttgttgcactgcagaaacatattcagagtttatctatgtaacttattcactctgtaaatacatttaaagtttttgtgatgtaagcttaattgatattctgttcagaactttctttag

SEQ ID NO: 7777 - DNA, 13200 bp, Homo sapiens
  source 1..13200: mol_type = unassigned DNA; mol_type = unassigned DNA
agggggcggcgctcccggcccatcccttagccccgcggcggccgtgtgggccggaggctgcctgcaccgcgtcagggaggccggcctagaaaccctccctcccagaagaaagccgatcccagttcaggtggggtcttcctcggttgcgtacctggctggagccgagctggtgggcggccggcagccggcgtttctggtgatgacagccccgaaatgaaagcagcgcggccgccgcctccgagggctgcagggagatcagcgtccagcaaataagaagcaagtcctggacccggaggaggaggagcggccgagcatctctctctgctccgccgtgtcctttagatgagcactcccggccggagccggaggtggatccgcagagctgcctctgggcgcctgaccccgcgctgacatcacaacctgtgacaggcgcatcacgcccggtacctgctcccggccgctgcccgtcctcccagcctctttgtatgccgcagacatggccagccagcaggattcgggcttctttgagatcagtatcaaatatttactgaaatcctggagtaatacttctcccgttggcaacggttacatcaagcctccggttccacctgcttctggcacgcacagggagaaagggccgccaaccatgctacccatcaatgtggacccagacagtaaaccaggagaatatgtcctcaaaagtttatttgtcaacttcaccactcaggctgaacgcaagattcgtatcattatggcagagcccctggaaaagccattgacaaaatctctgcaacgtggagaagacccccaatttgatcaggtcatcagctcaatgagctccctttctgagtactgcctgccttccattctacgtacattatttgactggtataaaaggcaaaatggcattgaggatgaatcacatgaatacagaccaagaacaagcaataaatcaaaaagcgatgaacaacagcgagattatttaatggaaagacgggacctcgccattgattttattttttctttagtattaatagaagttttgaaacagattccacttcatcctgtaatagacagtttaatacatgatgttattaacttggctttcaagcactttaaatacaaagaagggtaccttggtcccaacactggcaatatgcatattgtggcagacctgtatgcagaagtcattggagtgttggcacaagccaaattccctgctgtaaagaagaaatttatggcggagctaaaagaattacggcacaaagagcagaacccatatgtggttcaaagcattatcagcttaataatgggcatgaaattctttcgaattaagatgtatccagtggaggattttgaggcctctcttcagtttatgcaggaatgtgcacattacttcctcgaggtcaaagacaaagatatcaagcatgccttggctgggctttttgttgaaatacttgttccagttgctgctgctgttaaaaatgaagtaaatgttccctgccttagaaattttgtggaaagcctgtatgacaccacgctggaactttcttctcgaaagaagcattccttggccttgtaccccctggtgacctgtttgctctgtgtcagtcagaagcagctgttcctgaacaggtggcacattttcctcaacaactgcttgtccaaccttaaaaacaaagatcccaagatggctcgagttgcactggaatctctctacagattactttgggtttacatgattcgaattaaatgtgaaagcaacacagctactcagagccgacttataaccatcatcacaacacttttccccaaagggtcccgcggtgtggtaccaagggacatgcctctgaacatctttgtgaaaatcatccagttcattgcccaggaacgtttagattttgcaatgaaagaaatcattttcgattttctttgtgtgggaaaaccagcaaaagcattcagtctcaacccagagagaatgaacattggtttacgggcattcttggtcatagctgatagcttgcagcagaaagatggggaacctcccatgccggttacaggagccgttcttccttcaggaaacacgttaagagtaaagaaaacatatttgagtaaaacactaactgaagaggaagccaaaatgataggcatgtccttatattactctcaagtacgaaaagctgtagacaacattttaaggcaccttgataaagaagtaggaaggtgtatgatgctgactaatgtacagatgttaaacaaagaaccggaagacatgatcacgggtgagagaaagccaaaaatagatcttttcaggacctgtgttgctgctattcctcgactgcttcctgatgggatgtcaaaacttgaacttattgacttactggctaggctctctattcatatggatgatgaattgcgacatattgcacaaaattctcttcagggtttacttgttgacttctcagattggagggaagatgtactatttggctttaccaacttcctgctccgggaagtaaatgatatgcatcacacactccttgattcgtccctgaagttgctgctgcagctgctcacccagtggaaactagtcatccagacacaaggaaaagtctatgaacaagccaacaaaatcagaaattcagagctcatcgcaaatggctccagtcacagaattcagtcggaacgaggtccccactgcagtgtactccacgctgtagaaggttttgctctggttttactctgcagtttccaggtggccacacgcaaactgtccgttttaatactcaaggaaattcgagcgttgtttattgccctggggcagcctgaggatgacgacaggccgatgattgatgtcatggatcagctaagttcttccattctagaaagttttattcatgtagcagtttcggattcagcaacattaccactcacccacaatgtggatctgcagtggttggtggaatggaacgcagtcctggtcaatagccattatgatgtgaaaagcccttcccatgtctggatatttgcacagtctgtcaaagacccctgggtcctctgcctcttcagcttcctccggcaggagaacttacccaagcactgccccacagccctcagctatgcctggccttatgccttcactcggctccagtcggtgatgcctctggtggacccaaatagcccaattaatgccaagaaaaccagcactgccggcagcggagacaactatgttactttgtggagaaattacctaattctttgttttggagttgcaaaacccagtattatgagcccaggacacttaagagcttccactccagaaataatggcgaccacacctgatggtacagtgagctacgataacaaggccataggcaccccatcggtgggagttctgttaaagcagttggtgcctttgatgagactagagagcattgagatcacagagtccttagttttaggatttggaagaacaaattcccttgttttcagagaattggtagaagaacttcatccattaatgaaagaagctctggaaagaagaccagagaacaagaaacgccgagaacggcgagacttgttaaggctacaactacttcgaatttttgaacttttggctgatgctggtgtaataagtgacagcacaaatggagccctagagcgggatactttagccctgggagctttgttcttagaatatgtggacttgacccgcatgctcctagaagctgaaaatgacaaagaagttgaaattcttaaagatatccgggcacattttagtgcaatggtggccaacttgattcagtgtgttccagttcaccaccgaagatttctcttcccccagcaaagtctgaggcaccaccttttcatcttattcagccagtgggcaggacccttcagcattatgttcactcctctggatcgttacagtgacagaaatcatcagattacaagatatcagtattgtgcattaaaagcaatgtcagcagtactgtgctgtggccctgtctttgacaatgtgggcctttccccagatggctacctatataaatggcttgacaacattctggcttgtcaagatttacgagttcatcaacttggctgcgaagttgttgtcttgctactggaacttaatcctgaccaaataaatctttttaactgggcaattgaccgatgctacacaggttcctaccaacttgcatctggctgcttcaaagccatagcaactgtgtgtggaagcaggaactatcccttcgacatagtgacattgttaaaccttgttctattcaaggcctctgacaccaacagagagatttatgaaatctccatgcagctcatgcagatccttgaagcaaagctttttgtatactcaaagaaagtcgctgagcaaagaccgggaagtattctctatggaacacacggcccgctgccacccctctacagcgtgtcacttgccctcttgtcatgtgagctggccaggatgtaccctgagctcacactccccctcttctcagaggtaagccagcgattccccacaacacaccccaacgggcgccagatcatgcttacctacctgctgccctggctgcacaacatcgagctggtggacagcaggctcctcctcccggggtcgagccccagcagcccagaggacgaagtcaaggaccgggaaggtgacgtgactgcttctcacgggctgagaggaaatggctggggctctccagaagccacgtcactggtcctgaacaacctcatgtacatgacggccaagtatggagatgaagttcctgggccagaaatggaaaatgcttggaatgctttagccaacaatgagaaatggagcaacaacctgaggatcaccttgcagttcctgattagcctctgtggggtcagcagcgacacagttctcctaccctatattaaaaaagtggcaatatacttgtgccgtaacaacaccattcaaaccatggaagagcttctctttgagctgcagcagacagagcccgtgaaccccatcgtccagcattgtgacaacccgcccttctaccgcttcacggccagtagcaaggcttccgcagcagcctcaggaaccacctctagcagcaatacagtggttgctggccaggaaaatttcccagatgctgaggagaacaagatattgaaagaatctgatgaaaggtttagtaatgtcatcagagcccacactcgcctcgagtcaagatacagcaatagctctggaggatcctacgatgaagataaaaatgatccaatttctccctacacgggctggttgctgactattacagagaccaagcagccgcagcccttaccgatgccttgtactggaggatgctgggcccccctggttgactatctcccggagaccatcactccccgggggccactccacaggtgcaatattgctgtaatttttatgactgaaatggtggtggatcacagtgtacgagaagactgggcgcttcatctaccattattacttcatgctgtcttcttaggtttagaccactaccggcctgaagtctttgaacacagcaaaaaactgcttcttcacctcttgattgccctctcttgcaacagcaatttccattccattgcttccgtgctcctgcagacccgagagatgggtgaagctaagactctaaccgtgcagccagcctaccaacctgaatatctctatacaggtggctttgacttcctgagagaggaccagtcatccccggtgcctgactcagggcttagttcaagctccacctcctctagcatcagtctgggaggcagcagtggaaacctcccacagatgacccaggaggtagaagatgtggacacagctgctgaaacagatgagaaggcaaacaagctcattgagtttctcacgaccagggcatttggtccactttggtgccatgaagacatcacacctaaaaatcaaaattcaaagagtgctgaacagctcactaattttctacgtcacgttgtatctgtatttaaagattccaaatcaggcttccatctggagcaccagttgagtgaagttgcattgcagacagccctcgcaagctcttcaaggcactatgctggtcggtccttccagatattccgggccctcaagcaacctctgtcagcacatgccttatctgaccttctctcaagattggtggaggtgataggagaacatggagatgagattcagggttatgtaatggaagcgctcctaaccttggaggcggctgtggataacttgtctgactgcttgaagaacagtgacctcctaactgtattgtcccgctcttcctcaccagatttaagctccagcagtaaactaacagcaagcagaaagagcacaggacaactaaacatgaacccgggaaccaccagcggcaacaccgcaactgccgaacggagccggcatcaacgaagcttctctgtgcccaagaagtttggtgtcatcgaccgatcctctgacccacctcgaagtgccacactggacagaattcaggcttgtacccaacaaggcctctcctcaaaaaccagaagctcatcctccttgaaggacagtctcacggacccatcccacataaaccatcccaccaacctgctggccaccatattctgggtcacagtggccttgatggagtctgattttgagtttgaatacttaatggccttaaggctgttgagcagactactggcacatatgccactcgataaggctgagaaccgagaaaagcttgagaaactccaggcacagctgaagtgggccgacttctccgggctgcagcagctgctgctgaaaggattcacatccctcaccaccacagacctgaccctgcagctcttcagtctgctgacaccagtgtccaaaatatccatggtggatgcatcccacgctattgggtttccactgaatgtcttgtgtctcctgcctcagctgattcagcattttgaaaatcccaatcagttctgtaaggatatagccgaaaggattgctcaggtttgtttagaagagaagaaccccaaactttcaaatcttgcacatgtcatgactctttataaaacgcacagctacacgagggactgtgccacgtgggtcaatgtggtctgtcgataccttcatgaagcatatgctgacattaccttgaatatggttacctacctggcagagctgctggagaagggcctccctagtgtgcagcagcccctgctccaggtgatctacagtcttctcagctacatggacctttctgtcgttcctgtcaaacagttcaatgtggaagttctgaagacaattgaaaaatatgtgcaaagtgttcactggagagaagctctgaatatcttgaagctggtagtttctcggtcagccagccttgttttaccttcataccagcacagtgacctctcaaaaatagaaatacatcgagtgtggactagtgcttccaaggaattacctgggaaaaccctggacttccacttcgatatttcggagactccaatcatcgggaggcggtatgatgagctgcagaattcttctgggcgtgatgggaagcccagggccatggccgtcacccggagcacatcttccacttcctcaggctccaactccaacgtccttgttccagtgagctggaaaaggccccagtattctcagaagagaacaaaagagaagttggtacatgtcctttctctgtgtggccaagaagtaggattgagcaaaaatccatcagtgattttttcatcgtgtggggatctggatctgcttgagcaccagacaagcttggtatcttctgaggacggtgcccgagagcaggagaacatggatgacacaaacagcgagcagcagtttagagtcttcagagacttcgacttcctagatgtggagctggaggatggagagggtgagagtatggacaatttcaactggggagtgcgcagacgttctctggacagcctggataagtgtgatatgcagattctggaggagcgccaactgtcaggaagcactcctagcctgaataaaatgcaccatgaggactccgatgaatcatccgaggaggaggacctcacagccagccagatcctggagcactcagacctaatcatgactctctccccctctgaagagacgaatcccatggagctgctcaccacagcctgtgactcgacccctgcagaacctcattcctttaacaccagaatgtccagctttgatgcttccttgcctgatatgaataatctgcagatttctgagggttcaaaggctgaagctgttcgtgaggaggaggacaccaccgtgcatgaggatgatctttctagttccatcaatgaactcccagcagcttttgaatgcagcgacagctttagcctggacatgactgagggggaagaaaaaggcaatcgggcactggaccagtttaccctggcgagctttggagaaggtgacaggggagtctctccccctccctcgcccttcttctcagccatccttgccgcctttcagcccgcagcctgtgacgatgccgaggaggcctggcgcagccacatcaaccagcttatgtgtgactcagatggctcctgtgctgtgtatacatttcatgtgttctcctccttgtttaagaatattcagaaaaggttctgcttcctaacctgtgatgcagccagttaccttggagataacctccggggaatcggatccaaatttgtcagctcttcccagatgctcacctcctgctctgaatgtcctacactttttgtggatgccgagactctcctttcatgtggacttctggacaagctcaagttcagtgtgttagaactgcaagaatatttggatacctacaacaacaggaaagaggccacactctcttggcttgcaaattgtaaggcaacatttgcagggggatcaagagatggagtaattacctgtcaaccaggggactccgaagaaaagcaattggaactgtgtcagagattatataagctacacttccagctgctattgctttttcagtcctactgtaagctcatcggccaggtgcacgaagttagctccatgccagagctgctgaatatgtccagggaactgagtgacctaaagaaacacctgaaggaagccagtgcagtcattgcagctgaccctctctattcagacggcgcgtggtccgagcccaccttcacgtccactgaagcagccatccagtccatgctggagtgcctgaagaacaacgaactcggcaaagctttgcggcagatcagggagtgcagaagtctgtggcccaatgacatctttggaagcagttctgatgatgaggtccagacactactgaatatttatttccgtcaccaaactctgggacagacgggtacttatgccctggtggggtctaaccagagcctgaccgagatctgcaccaagctgatggagctgaacatggagatccgggacatgatccgcagggcccagagttaccgagtcctcactacttttcttccagactccagtgtttctggcactagtctctgacaggagcctcctgtccccactgggttccaaactggcagtgctgccatgctggggcaacgtcattcagtgtcttctcggccttcaaaaggcttggacagactgttctccctcttgttacctgtagggctttttctaaagaggatggcagaacttccaacgtgtagcaatactataagaaccaaggtagcttagaacgtcctggacagactccactcatcatgctgtgtggcacaaatgtgttacatttgaccgagcatatgcaactcgctactgaagaagtgacttccgttgcataccaaagccgactacactgaacagtaccttcctttctagaaacaattttagattggcaaaagtgcaatgttttcttcactcaaaaaattttatattctcaaacatgtatattctttccctgtcttgttccattttcttttcttttttcttttttctttttcctttctttcgtgggctgagaaaggggcaggcaaaatgaagctggccactgaaaactgtaagatggtcaaaagctgacagcctgtgtatgtgaaaagggaattgtaaatggactgcaatgtaatgtacactgtaatttgaatacaattactgtatctaaaaggagctgctatgaagtacctttcttatgttgctaggctactgtttctgaaagccctggatctctttgcaccaaaaatggtccagatagactctttttaaggatcttggctgctttttactagaaggttgcttttatgagcatatttatactgctgaaggatgagtgttaattttaattaactttgccgttttgtagagaaaactattcacaagataaattccaagtcttttcacctgtcaggcatgcatattttaatatctgtttggatagtcagaagtagaatcataaaggtaaaatatgagttgttactttgtttcttcgatgtcatattttatgtgtaatatatatgtaaagggccattcttaagttctctccttaaacttaatgctgtcaagtgttagatgtgtgcatgtgaacttgttgcactgcagaaacatattcagagtttatctatgtaacttattcactctgtaaatacatttaaagtttttgtgatgtaagcttaattgatattctgttcagaactttctttagactaaaaaaaaaaaaaaagacaaaatacacgttgaccatggactttatttctggttaatgaaaatgtttgtcctgggcacacatgaagttttgcatgtgggttgccaaagtaataaccccaaggggcacccctcgcatgtatgatctgaatggcacccgtgggggtcatgccatgcatggccctgtgaagctggaggtaagtattatctctttggaagttggcatcaaaactgtgagcttcaaccaattctctgtaatcaaccaaagagaaaaatcagaaaaaagtgagagctctaattctccataacctataattaggttgtcatccttcaaatttggaagttaattctatagtgagcaggaaaaagtagtagagttgtaattctgtcaccaacacctatcccccaggaacacagggagaaacatgtaacaatctcatttatgccgtctttctactcatattttacatggaccaacaaatatagcttgctttactagcatatggctactgaatcattggcagtaatattctaggagtattctatagaagagagcctaacctaggattttttttaaatcctagtagttgctacagatgcaactactagattttaataattttctggactgctgaaaacatatttttctgatgatttatttttttcaacttgcctgaaagatgatttgctatgatttgtagaaacaactgaatcatgatctctctgaaaaatatcataaaataaaggtttctgtggctaaccacagtagacaactttcagagagttttgttgggagccacagtagaaagaacagattcgtcatgaactgagttttctaccatggcttcttacccagcagagaaccaccgtgatggtttactcttaaaaagggaaggaaaaaaaaaaaggatttcaacagtacattacaatccaagatattaacataggaagcagtggtctgtgtttttctcaattttatttttaaaaggagatgtattaatgtgaaaggtttcttctacttttcctctatctcttcacctcctctactttaagtggagatgggaaaaattgtgtaggatgcagccccacgccagcagagcccagcaataactttagatctaccagtcaaatcttgtcggctattgctctgtgcctctgttacagaagcattaatgttaattgccttccccagggatacaaagaagtagaagtaccaaaggaaagggtagatatttaacagatgcctcagtgataagaaagatgcctccttgtgtctcactgttttctagcactgaaacatgatacactttgtatccacctgcagaataaagcaatccagacaggcgctctgtaacttagacatcacttgattaaaattatagtctccaaatatagtgttttagaaaaggcactgcacatttttagaggcacgtgaatgtcattcccacctctaacccatctaacatcggtgagatgttaagaaaatgtgccgatgttactgtgaaataaagatgcctgtaattaattgtaggcatcacacacatgcgtgaacatccagagttaggtctcaaggctcttctggttctaagtcctaacaaacaatgatcttttcagtgaactgtagaattctggaaagaataagcgtacctccaggctgcttacatcaatagcttacacgtgcttcctgatgcctgccttaacaacaaaaaattcgtgtccataggtgagtattagggtatgttcattgtatctcaatgaaactagtttttaaagttttcaatgcatttgtttgagatcaattaatatttggatacctatcatgacccaggatatttctttgttcagcaaatatttattgcatgcccactctgggctaggcactgttttagaggacaccgcagctatcaaggcagatgtggtccctgttcccatgaggctcctacatttgagtggaggaagatgtacttgtctacgttgggtgatgattagtgccatgaagaacaaaacggatacagtgagtaatgtggacagggctatcttagctatcactctaataaggtgatatctgaggagagatctgaatgaagtgaggatacaatggatatccaaggaaaagagcattccagcaaaggaaaaaacacatgcagagaccctgaaggagaagcagggtcactttgtcaaagggacagcaaggaagccaatgaccgggtgaaatgagtgaagagagcgttcagagaggacagccaaaagctctgtgggccacggcaggactttgtcccttgctgagcaagatgggaagccactgaatgtttgcgggcagggtagtgacatgctgtgacttatgtttaaaaggattactccttcatagcgatgaagaaaagctctataacaaaagttccgttgtggtggttatacagcattgtgaatgtacttaatgccaatgaattgtgtactttaaaatggtaaattttatgttatatatgttttaccacaataaaaataatttttttaaa

SEQ ID NO: 7778 - DNA, 502 bp, Homo sapiens
  source 1..502: mol_type = unassigned DNA; mol_type = unassigned DNA
tcagcgtccagcaaataagaagcaagtcctggacccggaggaggaggagcggccgagcatctctctctgctccgccgtgtcctttagatgagcactcccggccggagccggaggtggatccgcagagctgcctctgggcgcctgaccccgcgctgacatcacaacctgtgacaggcgcatcacgcccggtacctgctcccggccgctgcccgtcctcccagcctctttgtatgccgcagacatggccagccagcaggattcgggcttctttgagatcagtatcaaatatttactgaaatcctggagtaatatgcggtgccttctggaaaccatccaccatttgcacactaccccagtgcagaagatttagcaagtaaccagttcctggaaacgcgaatggcatttgtggaacaagataagacacaacttaacctcattttctttcatactaatgtctttcatttgatagatgccattcatcatattccttttaacattgctc

SEQ ID NO: 7779 - DNA, 691 bp, Homo sapiens
  source 1..691: mol_type = unassigned DNA; mol_type = unassigned DNA
tggtatgaacagtctgccctggacggaaggcctgttttagtttgtcttctactgtaggtctttagcacctgactaaaaatacacctggggccaaaaatataagggccctgcattgtggctgagacacttatggtggcagtgagcaacaggaccatggagcccatcattatgtgttttggctttggaacatggtctgtgtagctgttccagactgttagtttgggtttcttttcaggctcatggagattacaactgcttgttggagacgatcctgtgtgatcagcttcataaaagggcttgcttctcccgttggcaacggttacatcaagcctccggttccacctgcttctggcacgcacagggagaaagggccgccaaccatgctacccatcaatgtggacccagacagtaaaccaggagaatatgtcctcaaaagtttatttgtcaacttcaccactcaggctgaacgcaagattcgtatcattatggcagagcccctggaaaagccattgacaaaatctctgcaacgtggagaagacccccaatttgatcaggtcatcagctcaatgagctccctttctgagtactgcctgccttccattctacgtacattatttgactggtataaaaggcaaaatggcattgaggatgaatcacatgaatacagaccaagaacaagcaataaatcaaa

SEQ ID NO: 7780 - DNA, 601 bp, Homo sapiens
  source 1..601: mol_type = unassigned DNA; mol_type = unassigned DNA
gagccaattacaatttttcgtagcacaaacaaccaaagggagaacggtttctcaggagaggactcttgattcgcaggtgattttttcatcgtgtggggatctggatctgcttgagcaccagacaagcttggtatcttctgaggacggtgcccgagagcaggagaacatggatgacacaaacagcgagcagcagtttagagtcttcagagacttcgacttcctagatgtggagctggaggatggagagggtgagagtatggacaatttcaactggggagtgcgcagacgttctctggacagcctggataagtgtgatatgcagattctggaggagcgccaactgtcaggaagcactcctagcctgaataaaatgcaccatgaggactccgatgaatcatccgaggaggaggacctcacagccagccagatcctggagcactcagacctaatcatgactctctccccctctgaagagacgaatcccatggagctgctcaccacagcctgtgactcgacccctgcagaacctcattcctttaacaccagaatgtccagctttgatgcttccttgcctgatatgaataatctgcagatttctgag

SEQ ID NO: 7781 - DNA, 711 bp, Homo sapiens
  source 1..711: mol_type = unassigned DNA; mol_type = unassigned DNA
gaacctcattcctttaacaccagaatgtccagctttgatgcttccttgcctgatatgaataatctgcagatttctgagggttcaaaggctgaagctgttcgtgaggaggaggacaccaccgtgcatgaggatgatctttctagttccatcaatgaactcccagcagcttttgaatgcagcgacagctttagcctggacatgactgagggggaagaaaaaggcaatcgggcactggaccagtttaccctggcgagcccgcagcctgtgacgatgccgaggaggcctggcgcagccacatcaaccagcttatgtgtgactcagatggctcctgtgctgtgtatacatttcatgtgttctcctccttgtttaagaatattcagaaaaggttctgcttcctaacctgtgatgcagccagttaccttggagataacctccggggaatcggatccaaatttgtcagctcttcccagatgctcacctcctgctctgaatgtcctacactttttgtggatgccgagactctcctttcatgtggacttctggacaagctcaagttcagtgtgttagaactgcaagaatatttggatacctacaacaacaggaaagaggccacactctcttggcttgcaaattgtaaggcaacatttgcagggggatcaagagatggagtaattacctgtcaaccaggggactccgaagaaaagcaattgg

SEQ ID NO: 7782 - DNA, 650 bp, Homo sapiens
  source 1..650: mol_type = unassigned DNA; mol_type = unassigned DNA
catgcttgctgtgtagcaaatggaatctcttgcacaattggaactgtgtcagagattatataagctacacttccagctgctattgctttttcagtcctactgtaagctcatcggccaggtgcacgaagttagctccatgccagagctgctgaatatgtccagggaactgagtgacctaaagaaacacctgaaggaagccagtgcagtcattgcagctgaccctctctattcagacggcgcgtggtccgagcccaccttcacgtccactgaagcagccatccagtccatgctggagtgcctgaagaacaacgaactcggcaaagctttgcggcagatcagggagtgcagaagtctgtggcccaatgacatctttggaagcagttctgatgatgaggtccagacactactgaatatttatttccgtcaccaaactctgggacagacgggtacttatgccctggtggggtctaaccagagcctgaccgagatctgcaccaagctgatggagctgaacatggagatccgggacatgatccgcagggcccagagttaccgagtcctcactacttttcttccagactccagtgtttctggcactagtctctgacaggagcctcctgtccccactgggttccaaactggcagtgctg

SEQ ID NO: 7783 - DNA, 437 bp, Homo sapiens
  source 1..437: mol_type = unassigned DNA; mol_type = unassigned DNA
gcgtgaacatccagagttaggtctcaaggctcttctggttctaagtcctaacaaacaatgatcttttcagtgaactgtagaattctggaaagaataagcgtacctccaggctgcttacatcaatagcttacacgtgcttcctgatgcctgccttaacaacaaaaaattcgtgtccatagcaaatatttattgcatgcccactctgggctaggcactgttttagaggacaccgcagctatcaaggcagatgtggtccctgttcccatgaggctcctacatttgagtggaggaagatgtacttgtctacgttgggtgatgattagtgccatgaagaacaaaacggatacagtgagtaatgtggacagggctatcttagctatcactctaataaggtgatatctgaggagagatctgaatgaagtgaggatacaatggat

SEQ ID NO: 7784 - DNA, 10688 bp, Homo sapiens
  source 1..10688: mol_type = unassigned DNA; mol_type = unassigned DNA
agggggcggcgctcccggcccatcccttagccccgcggcggccgtgtgggccggaggctgcctgcaccgcgtcagggaggccggcctagaaaccctccctcccagaagaaagccgatcccagttcaggtggggtcttcctcggttgcgtacctggctggagccgagctggtgggcggccggcagccggcgtttctggtgatgacagccccgaaatgaaagcagcgcggccgccgcctccgagggctgcagggagatcagcgtccagcaaataagaagcaagtcctggacccggaggaggaggagcggccgagcatctctctctgctccgccgtgtcctttagatgagcactcccggccggagccggaggtggatccgcagagctgcctctgggcgcctgaccccgcgctgacatcacaacctgtgacaggcgcatcacgcccggtacctgctcccggccgctgcccgtcctcccagcctctttgtatgccgcagacatggccagccagcaggattcgggcttctttgagatcagtatcaaatatttactgaaatcctggagtaatacttctcccgttggcaacggttacatcaagcctccggttccacctgcttctggcacgcacagggagaaagggccgccaaccatgctacccatcaatgtggacccagacagtaaaccaggagaatatgtcctcaaaagtttatttgtcaacttcaccactcaggctgaacgcaagattcgtatcattatggcagagcccctggaaaagccattgacaaaatctctgcaacgtggagaagacccccaatttgatcaggtcatcagctcaatgagctccctttctgagtactgcctgccttccattctacgtacattatttgactggtataaaaggcaaaatggcattgaggatgaatcacatgaatacagaccaagaacaagcaataaatcaaaaagcgatgaacaacagcgagattatttaatggaaagacgggacctcgccattgattttattttttctttagtattaatagaagttttgaaacagattccacttcatcctgtaatagacagtttaatacatgatgttattaacttggctttcaagcactttaaatacaaagaagggtaccttggtcccaacactggcaatatgcatattgtggcagacctgtatgcagaagtcattggagtgttggcacaagccaaattccctgctgtaaagaagaaatttatggcggagctaaaagaattacggcacaaagagcagaacccatatgtggttcaaagcattatcagcttaataatgggcatgaaattctttcgaattaagatgtatccagtggaggattttgaggcctctcttcagtttatgcaggaatgtgcacattacttcctcgaggtcaaagacaaagatatcaagcatgccttggctgggctttttgttgaaatacttgttccagttgctgctgctgttaaaaatgaagtaaatgttccctgccttagaaattttgtggaaagcctgtatgacaccacgctggaactttcttctcgaaagaagcattccttggccttgtaccccctggtgacctgtttgctctgtgtcagtcagaagcagctgttcctgaacaggtggcacattttcctcaacaactgcttgtccaaccttaaaaacaaagatcccaagatggctcgagttgcactggaatctctctacagattactttgggtttacatgattcgaattaaatgtgaaagcaacacagctactcagagccgacttataaccatcatcacaacacttttccccaaagggtcccgcggtgtggtaccaagggacatgcctctgaacatctttgtgaaaatcatccagttcattgcccaggaacgtttagattttgcaatgaaagaaatcattttcgattttctttgtgtgggaaaaccagcaaaagcattcagtctcaacccagagagaatgaacattggtttacgggcattcttggtcatagctgatagcttgcagcagaaagatggggaacctcccatgccggttacaggagccgttcttccttcaggaaacacgttaagagtaaagaaaacatatttgagtaaaacactaactgaagaggaagccaaaatgataggcatgtccttatattactctcaagtacgaaaagctgtagacaacattttaaggcaccttgataaagaagtaggaaggtgtatgatgctgactaatgtacagatgttaaacaaagaaccggaagacatgatcacgggtgagagaaagccaaaaatagatcttttcaggacctgtgttgctgctattcctcgactgcttcctgatgggatgtcaaaacttgaacttattgacttactggctaggctctctattcatatggatgatgaattgcgacatattgcacaaaattctcttcagggtttacttgttgacttctcagattggagggaagatgtactatttggctttaccaacttcctgctccgggaagtaaatgatatgcatcacacactccttgattcgtccctgaagttgctgctgcagctgctcacccagtggaaactagtcatccagacacaaggaaaagtctatgaacaagccaacaaaatcagaaattcagagctcatcgcaaatggctccagtcacagaattcagtcggaacgaggtccccactgcagtgtactccacgctgtagaaggttttgctctggttttactctgcagtttccaggtggccacacgcaaactgtccgttttaatactcaaggaaattcgagcgttgtttattgccctggggcagcctgaggatgacgacaggccgatgattgatgtcatggatcagctaagttcttccattctagaaagttttattcatgtagcagtttcggattcagcaacattaccactcacccacaatgtggatctgcagtggttggtggaatggaacgcagtcctggtcaatagccattatgatgtgaaaagcccttcccatgtctggatatttgcacagtctgtcaaagacccctgggtcctctgcctcttcagcttcctccggcaggagaacttacccaagcactgccccacagccctcagctatgcctggccttatgccttcactcggctccagtcggtgatgcctctggtggacccaaatagcccaattaatgccaagaaaaccagcactgccggcagcggagacaactatgttactttgtggagaaattacctaattctttgttttggagttgcaaaacccagtattatgagcccaggacacttaagagcttccactccagaaataatggcgaccacacctgatggtacagtgagctacgataacaaggccataggcaccccatcggtgggagttctgttaaagcagttggtgcctttgatgagactagagagcattgagatcacagagtccttagttttaggatttggaagaacaaattcccttgttttcagagaattggtagaagaacttcatccattaatgaaagaagctctggaaagaagaccagagaacaagaaacgccgagaacggcgagacttgttaaggctacaactacttcgaatttttgaacttttggctgatgctggtgtaataagtgacagcacaaatggagccctagagcgggatactttagccctgggagctttgttcttagaatatgtggacttgacccgcatgctcctagaagctgaaaatgacaaagaagttgaaattcttaaagatatccgggcacattttagtgcaatggtggccaacttgattcagtgtgttccagttcaccaccgaagatttctcttcccccagcaaagtctgaggcaccaccttttcatcttattcagccagtgggcaggacccttcagcattatgttcactcctctggatcgttacagtgacagaaatcatcagattacaagatatcagtattgtgcattaaaagcaatgtcagcagtactgtgctgtggccctgtctttgacaatgtgggcctttccccagatggctacctatataaatggcttgacaacattctggcttgtcaagatttacgagttcatcaacttggctgcgaagttgttgtcttgctactggaacttaatcctgaccaaataaatctttttaactgggcaattgaccgatgctacacaggttcctaccaacttgcatctggctgcttcaaagccatagcaactgtgtgtggaagcaggaactatcccttcgacatagtgacattgttaaaccttgttctattcaaggcctctgacaccaacagagagatttatgaaatctccatgcagctcatgcagatccttgaagcaaagctttttgtatactcaaagaaagtcgctgagcaaagaccgggaagtattctctatggaacacacggcccgctgccacccctctacagcgtgtcacttgccctcttgtcatgtgagctggccaggatgtaccctgagctcacactccccctcttctcaggtaagccagcgattccccacaacacaccccaacgggcgccagatcatgcttacctacctgctgccctggctgcacaacatcgagctggtggacagcaggctcctcctcccgggtcgagccccagcagcccagaggacgaagtcaaggaccgggaaggtgacgtgactgcttctcacgggctgagaggaaatggctggggctctccagaagccacgtcactggtcctgaacaacctcatgtacatgacggccaagtatggagatgaagttcctgggccagaaatggaaaatgcttggaatgctttagccaacaatgagaaatggagcaacaacctgaggatcaccttgcagttcctgattagcctctgtggggtcagcagcgacacagttctcctaccctatattaaaaaagtggcaatatacttgtgccgtaacaacaccattcaaaccatggaagagcttctctttgagctgcagcagacagagcccgtgaaccccatcgtccagcattgtgacaacccgcccttctaccgcttcacggccagtagcaaggcttccgcagcagcctcaggaaccacctctagcagcaatacagtggttgctggccaggaaaatttcccagatgctgaggagaacaagatattgaaagaatctgatgaaaggtttagtaatgtcatcagagcccacactcgcctcgagtcaagatacagcaatagctctggaggatcctacgatgaagataaaaatgatccaatttctccctacacgggctggttgctgactattacagagaccaagcagccgcagcccttaccgatgccttgtactggaggatgctgggcccccctggttgactatctcccggagaccatcactccccgggggccactccacaggtgcaatattgctgtaatttttatgactgaaatggtggtggatcacagtgtacgagaagactgggcgcttcatctaccattattacttcatgctgtcttcttaggtttagaccactaccggcctgaagtctttgaacacagcaaaaaactgcttcttcacctcttgattgccctctcttgcaacagcaatttccattccattgcttccgtgctcctgcagacccgagagatgggtgaagctaagactctaaccgtgcagccagcctaccaacctgaatatctctatacaggtggctttgacttcctgagagaggaccagtcatccccggtgcctgactcagggcttagttcaagctccacctcctctagcatcagtctgggaggcagcagtggaaacctcccacagatgacccaggaggtagaagatgtggacacagctgctgaaacagatgagaaggcaaacaagctcattgagtttctcacgaccagggcatttggtccactttggtgccatgaagacatcacacctaaaaatcaaaattcaaagagtgctgaacagctcactaattttctacgtcacgttgtatctgtatttaaagattccaaatcaggcttccatctggagcaccagttgagtgaagttgcattgcagacagccctcgcaagctcttcaaggcactatgctggtcggtccttccagatattccgggccctcaagcaacctctgtcagcacatgccttatctgaccttctctcaagattggtggaggtgataggagaacatggagatgagattcagggttatgtaatggaagcgctcctaaccttggaggcggctgtggataacttgtctgactgcttgaagaacagtgacctcctaactgtattgtcccgctcttcctcaccagatttaagctccagcagtaaactaacagcaagcagaaagagcacaggacaactaaacatgaacccgggaaccaccagcggcaacaccgcaactgccgaacggagccggcatcaacgaagcttctctgtgcccaagaagtttggtgtcatcgaccgatcctctgacccacctcgaagtgccacactggacagaattcaggcttgtacccaacaaggcctctcctcaaaaaccagaagctcatcctccttgaaggacagtctcacggacccatcccacataaaccatcccaccaacctgctggccaccatattctgggtcacagtggccttgatggagtctgattttgagtttgaatacttaatggccttaaggctgttgagcagactactggcacatatgccactcgataaggctgagaaccgagaaaagcttgagaaactccaggcacagctgaagtgggccgacttctccgggctgcagcagctgctgctgaaaggattcacatccctcaccaccacagacctgaccctgcagctcttcagtctgctgacaccagtgtccaaaatatccatggtggatgcatcccacgctattgggtttccactgaatgtcttgtgtctcctgcctcagctgattcagcattttgaaaatcccaatcagttctgtaaggatatagccgaaaggattgctcaggtttgtttagaagagaagaaccccaaactttcaaatcttgcacatgtcatgactctttataaaacgcacagctacacgagggactgtgccacgtgggtcaatgtggtctgtcgataccttcatgaagcatatgctgacattaccttgaatatggttacctacctggcagagctgctggagaagggcctccctagtgtgcagcagcccctgctccaggtgatctacagtcttctcagctacatggacctttctgtcgttcctgtcaaacagttcaatgtggaagttctgaagacaattgaaaaatatgtgcaaagtgttcactggagagaagctctgaatatcttgaagctggtagtttctcggtcagccagccttgttttaccttcataccagcacagtgacctctcaaaaatagaaatacatcgagtgtggactagtgcttccaaggaattacctgggaaaaccctggacttccacttcgatatttcggagactccaatcatcgggaggcggtatgatgagctgcagaattcttctgggcgtgatgggaagcccagggccatggccgtcacccggagcacatcttccacttcctcaggctccaactccaacgtccttgttccagtgagctggaaaaggccccagtattctcagaagagaacaaaagagaagttggtacatgtcctttctctgtgtggccaagaagtaggattgagcaaaaatccatcagtgattttttcatcgtgtggggatctggatctgcttgagcaccagacaagcttggtatcttctgaggacggtgcccgagagcaggagaacatggatgacacaaacagcgagcagcagtttagagtcttcagagacttcgacttcctagatgtggagctggaggatggagagggtgagagtatggacaatttcaactggggagtgcgcagacgttctctggacagcctggataagtgtgatatgcagattctggaggagcgccaactgtcaggaagcactcctagcctgaataaaatgcaccatgaggactccgatgaatcatccgaggaggaggacctcacagccagccagatcctggagcactcagacctaatcatgactctctccccctctgaagagacgaatcccatggagctgctcaccacagcctgtgactcgacccctgcagaacctcattcctttaacaccagaatgtccagctttgatgcttccttgcctgatatgaataatctgcagatttctgagggttcaaaggctgaagctgttcgtgaggaggaggacaccaccgtgcatgaggatgatctttctagttccatcaatgaactcccagcagcttttgaatgcagcgacagctttagcctggacatgactgagggggaagaaaaaggcaatcgggcactggaccagtttaccctggcgagctttggagaaggtgacaggggagtctctccccctccctcgcccttcttctcagccatccttgccgcctttcagcccgcagcctgtgacgatgccgaggaggcctggcgcagccacatcaaccagcttatgtgtgactcagatggctcctgtgctgtgtatacatttcatgtgttctcctccttgtttaagaatattcagaaaaggttctgcttcctaacctgtgatgcagccagttaccttggagataacctccggggaatcggatccaaatttgtcagctcttcccagatgctcacctcctgctctgaatgtcctacactttttgtggatgccgagactctcctttcatgtggacttctggacaagctcaagttcagtgtgttagaactgcaagaatatttggatacctacaacaacaggaaagaggccacactctcttggcttgcaaattgtaaggcaacatttgcagggggatcaagagatggagtaattacctgtcaaccaggggactccgaagaaaagcaattggaactgtgtcagagattatataagctacacttccagctgctattgctttttcagtcctactgtaagctcatcggccaggtgcacgaagttagctccatgccagagctgctgaatatgtccagggaactgagtgacctaaagaaacacctgaaggaagccagtgcagtcattgcagctgaccctctctattcagacggcgcgtggtccgagcccaccttcacgtccactgaagcagccatccagtccatgctggagtgcctgaagaacaacgaactcggcaaagctttgcggcagatcagggagtgcagaagtctgtggcccaatgacatctttggaagcagttctgatgatgaggtccagacactactgaatatttatttccgtcaccaaactctgggacagacgggtacttatgccctggtggggtctaaccagagcctgaccgagatctgcaccaagctgatggagctgaacatggagatccgggacatgatccgcagggcccagagttaccgagtcctcactacttttcttccagactccagtgtttctggcactagtctctgacaggagcctcctgtccccactgggttccaaactggcagtgctgccatgctggggcaacgtcattcagtgtcttctcggccttcaaaaggcttggacagactgttctccctcttgttacctgtagggctttttctaaagaggatggcagaacttccaacgtgtagcaatactataagaaccaaggtagcttagaacgtcctggacagactccactcatcatgctgtgtggcacaaatgtgttacatttgaccgagcatatgcaactcgctactgaagaagtgacttccgttgcataccaaagccgactacactgaacagtaccttcctttctagaaacaattttagattggcaaaagtgcaatgttttcttcactcaaaaaattttatattctcaaacatgtatattctttccctgtcttgttccattttcttttcttttttcttttttctttttcctttctttcgtgggctgagaaaggggcaggcaaaatgaagctggccactgaaaactgtaagatggtcaaaagctgacagcctgtgtatgtgaaaagggaattgtaaatggactgcaatgtaatgtacactgtaatttgaatacaattactgtatctaaaaggagctgctatgaagtacctttcttatgttgctaggctactgtttctgaaagccctggatctctttgcaccaaaaatggtccagatagactctttttaaggatcttggctgctttttactagaaggttgcttttatgagcatatttatactgctgaaggatgagtgttaattttaattaactttgccgttttgtagagaaaactattcacaagataaattccaagtcttttcacctgtcaggcatgcatattttaatatctgtttggatagtcagaagtagaatcataaaggtaaaatatgagttgttactttgtttcttcgatgtcatattttatgtgtaatatatatgtaaagggccattcttaagttctctccttaaacttaatgctgtcaagtgttagatgtgtgcatgtgaacttgttgcactgcagaaacatattcagagtttatctatgtaacttattcactctgtaaatacatttaaagtttttgtgatgtaagcttaattgatattctgttcagaactttctttagact

SEQ ID NO: 7785 - DNA, 6418 bp, Homo sapiens
  source 1..6418: mol_type = unassigned DNA; mol_type = unassigned DNA
atgcagaggtcactaggaaggaaagcctgctgaacacagattcaattttctagcagaactccaggtcctctgagttaaaggaagcatttatggacgcttagcagggcccagatattcactattaagtgtccaggaaggatctttcttatataaaggtgcttctgaggacttccagagttacaatggaggaggaatcgggggaggaactggggctggacaggtctactcccaaggatttccacttttaccacatggacctgtatgactctgaagacagactgcacctctttccagaagagaacactaggatgaggaaagtagtccaagctgaaatggccaatgagtcaagaggagcaggggatggtaaggctcaaagagaccttcaagaggaagtggatgaacttgtccacttatatggacttgaagatgatcatgaattaggggatgagtttgttgatgaaaacatacccagaacaggggtttcagaatatcctccttatatgatgaagaggagagacccagccagggagcagagagactggagacttagtggagaggcagcggaggccgaggacctgggcttcggagggtggggctcagcaggccagtgccaggacttgcgggaagcctataggtacacacacggccgtgccagcgaggagtatgaatgctatgtcatccccgaggaagaggatgaagaagaagctgctgatgtcttctgtgtcacttgtaagactccaataagagcttttcagaaggtttttgatgaacataaggagcatgaagtgatcccactcaatgaagcactggaaagtgccaaggatgaaattcacaaaaacatgtacaaattggaaaagcagataattgagatggaaaactttgcaaatcatttggaggaggttttcatcactgtggaggagaattttggaaaacaagaacaaaactttgagtcacattacaacgagatcttggaaacacttgctcaaaaatatgaggaaaaaatacaagctctaggggagaaaaagaaagagaagctggaagccttatatggacaactggtcagctgtggagaaaacctagatacttgcaaagaactgatggaaacaatagaggagatgtgtcacgaggagaaggtggatttcataaaggatgcagtggctatggctgacagactcgggaaattcctgaaaacaaaaacagacgtggaaatctctgcacagcctgagtttgaagaccagaccttggatttctctgatgtggagcagctgatgggctccattaacaccattccagctccttctgctccagtcataaatccacaggtccctaactcagccacaggttcctcagtccgagtgtgctggagcttatactccgacgacactgtggagagctatcagctgtcctaccggccagtgcaggacagctcacctgggacggaccaagcagagtttacagtgactgtcaaagaaacatattgctcagtgacaaaccttgtgccaaatacccagtatgaattttgggtcacagctcacaacagggctggccccagcccctctagcgagcgtgcagtgtacatgacagcaccttctccccccattattaaaaccaaagagataaggagctgtgaagaggctgtgctgatttgctgggagtctgggaacctgaatcctgtggactcgtacactgtggagctgacccaggctgaaagtccagaagcctcgggtgtaactgagtctgttgtgggcatcccgacctgcgagtccgtggtgcagctgcagccggggcggagctacattatctatgtgcgagccctcaatatggggggccccagcgtgaggagcgagccagctacagtccacaccataggaagctactttcgcctaaacaaggacacttgccatccctggctgaccatttctgaagacggacttacggctgtacgaagtgaaaggagaacccccgccagggagctgtcacccagcgacactcacttcaccaggtgtgttgctgtcatgggaaatctaattccagtccgagggcaccattactgggaggtggaggtggatgagcatttggactacagagttggtgtggcctttgcagatgtccgtaaacaggaggatctgggagcaaattgcctctcctggtgcatgaggcacacatttgcatcatcaaggcataagtatgaatttctgcacaacagaacaactccagatataagaataacagttccaccaaagaagattggcattctattagactatgaacattcaaagttgtcatttttcaatgtggacctttctcagcatctatatacatttagttgtcagcttcacgaatttgtgcatccctgtttttctttggaaaagcctgggtgtctaaaggtacataatggcatttcaatgccaaaacatgtcactttctattagaacattctgatgtccagtttcctgtcttccatgcctacccctctcgcagctgctcacgccttagctggctgaacctggcacttaagcaccatgtgcccagcacaatttatggctcatgctattatctgactggtgtgctagcgctcatttcacccaacctggattctagtcctgtgtgctgctacctgtgtgctgctaggatagtcattaccaggcccagctgtaaaataaaggctcagactaaacgaactcaaaagtctttgaagctgtcaaactatattcgtgtatatgcaaaatatcttgagtttccaagacctagagagcttgggagaggacgagggtagtcttaatggctccagcagcaccagtacacccatgcatttcatgagtcagccaagaatacacttgagaaggcgagaggctgtctgtagagaaccagggaagctgtgtgcccttctcaatgtcttctaccctcgttttcccaatagtgagcagcactgtggtgaggtcccttccactgtgtactctgcatacagggtattccctgttccactcctacacagtatgcaccactctctaattttgaaattacctctataatgcctaattccatgaagggagggacagtgcctgttttgttcattgctagatcaccaagggctaacacataacagctgtcaccaagtatttgttgaataaattagtatcttcttcagccactgctctttggcctcttactgctctccatgtgaaggatggcagggctctttcaaaactacagcaaaggacctatggccaagaaatgggaaaaaacctagaatggaggcagcgtgaaagaacagaagggcatctgtggcatattagcaaatgcacaacaattttttaaaagaaattaacagcccaccaaagggcaaagctgagcacgggaaggaagactgatctctagctaggcagctttcaggcatcctgcctcactgcccccaggccattctgtgagctcaatgcccaactccatcagctacattcctggttctcctgttcaagtttccagttgccacttaagctctgcacacacagcattttcaaagcttgtgagtgaagctgcagaataattccatttgtgaagcaattacaattcagtatcatgtcccacagatgcctctaaacccagatatgccctaatctcatcatttaaggttttgtgtttaaaaaaaaaaagtccacttttcttttttctggcgaaaccccgtctctactaaaaatacaaaaaattagccgggcatggtggtgggcgcctgtaatcccagctactcaggaggctgaggcaggagaattgcttgaacccgggggcagaggctgcagtgagccgagattgtgccactgcactccagccttggcaacaagagcgcaactctgtctcaaaaacaaacaaacaaacaaacaaaaaacctctgatgttttccagcacctgcaaagtctgacaaactgaaagactctcatctcctactaaactctgcctactcgtataaatggcagctcagattcctgaattaacaattcacactgacaatttaataactcgttatacacacacacacctatcctgccaagctggactgtctactctgaaacaagggacagcagatgtaagcacagaaatagttccagttataaacaattaaaagatacatatcatgtatatttaaaaatgttctcggccgggcgcggtggctcacgcctgtaatcccagcactttggggggccaaggtggatggatcacaaggtcaggagatcgagaccatcctggctaatacggtgaaaccccgtctctactaaaaatacaaaaaaattagccgggactggtggcgggcgcctgtagtcccagctactcgggaggctgaggcaggagaatggcgtgaacccgggaggtggagcttgcagtgagccgagatggctcacagatcaagactccatctcaaaaaaaaaaaaaaaaaaagttctcagctactgaaatagaaactaccaagtaagaaacaggatatcacagagaaggcaagtttgaattcagggttctaataggctttatggaatactacacgttagtatgaacacggataaatggattaaaaactcaacacgtataaagttttaattaaatttttatttgaccaagaaaaaactgtctagaattgcctgacatttaaaatccacttaaagcagattagcaacttcaagcatcacaattattcagcataaagagcctttgttgaaacatctttctcatttatttagaagaaaacatctagaacagaaccaagcaaaacttttgtatttttgtaaaaaatctcaattcctgaaactactataaacaatctactgaaactgtattcagcaagggacagatttacctcaaggccatgttcacctgcaacctgctgataagtctgttaaaaaacaaagcaaaaaaaagagtttttaaaaattagaccactgtagccacaatccctaacactggacagttaaaacaaaagttatcaaaatctgttcttttcttagctttacctgtatcactttataactcctgagaaagtcattcacataagctgtggcctccccaccttaacaaaggggaaaaagaatatgtaaaaccaccacagaatcttggcgtaaactaacatgggtttagtaatacagagtacagtattcaggatttaaggcacccttacaagtcagaattggaaagttggtttgagacttgcaatctaaaatgacactgatttctgataaaattaaatgacttttatttagaaaagtgtgtttaataaattacttcctgctggttcaaatgacacacaatcactttgtatacatccaataagatatttctgaagtgtatacttggtcaaaagtaaaaagcagagcaaatgcatggacagtggggccttcttcttaatacttctcatcctccaaaatctgttaaaatcatcatcttccacaactcacacactggaagctgtccacagcacaattcactgtgatgtggcattctgtaaataagactacattggtcttgatgcaaggcggttcagctaccagactgcactataagaaaagtcctctcctcaacttaccaagaaaacttcgccaatttctagtcaccttcctatcaattagtagagcaagattctcacatgttcactatgtctttctccagttttctcatctataagtgtactactcctattttctataggaagacaatggaaagcgtgtaattgctgttggtagataagtaggtcttgaatttattttgcaaacaagacctgttctatctaccttttcatttaggaggctaaaagcagagtcagcttgatttcaaggactctattttcttagtctccagaagaacataaccaaatccagcttttaaaacactgtcctttaacaagtcaagatactcaaataaagatcatgtataacttcaagctataggagattaactctgtacatatgcttgtttcactgtaaccaatggttaattaatctaaatgcaagagaaaagttatttggaaagaagaccccagctggtcagcatcttttctgtcatcaggaagtctcctggaaggagtatgactatgacctgggcacaacaactgcccctaagttagtacttattttagagttgctactgaacaggtggtggttcttgtcaagtatatcatgtctgactactttactgcttgttttctgctatcaccagttccagaaaaaaaaaaaaaaaaaattaagcccaactcactaattgattgctttttcattttcccagactgtgacagaatcatggtttttagctctattttcaccttactcaaatcctggaggaattaaactatcatttatttgaaatgttacaaattagcctgcagttgattcaaacaacatgtagtcactcagacatagcaaataaaaatgttttggtatatgaa

SEQ ID NO: 7786 - DNA, 2356 bp, Homo sapiens
  source 1..2356: mol_type = unassigned DNA; mol_type = unassigned DNA
ggaaggaaagcctgctgaacacagattcaattttctagcagaactccaggtcctctgagttaaaggaagcatttatggacgcttagcagggcccagatattcactattaagtgtccaggaaggatctttcttatataaaggtgcttctgaggacttccagagttacaatggaggaggaatcgggggaggaactggggctggacaggtctactcccaaggatttccacttttaccacatggacctgtatgactctgaagacagactgcacctctttccagaagagaacactaggatgaggaaagtagtccaagctgaaatggccaatgagtcaagaggagcaggggatggtaaggctcaaagagaccttcaagaggaagtggatgaacttgtccacttatatggacttgaagatgatcatgaattaggggatgagtttgttgatgaaaacatacccagaacaggggtttcagaatatcctccttatatgatgaagaggagagacccagccagggagcagagagactggagacttagtggagaggcagcggaggccgaggacctgggcttcggagggtggggctcagcaggccagtgccaggacttgcgggaagcctataggtacacacacggccgtgccagcgaggagtatgaatgctatgtcatccccgaggaagaggatgaagaagaagctgctgatgtcttctgtgtcacttgtaagactccaataagagcttttcagaaggtttttgatgaacataaggagcatgaagtgatcccactcaatgaagcactggaaagtgccaaggatgaaattcacaaaaacatgtacaaattggaaaagcagataattgagatggaaaactttgcaaatcatttggaggaggttttcatcactgtggaggagaattttggaaaacaagaacaaaactttgagtcacattacaacgagatcttggaaacacttgctcaaaaatatgaggaaaaaatacaagctctaggggagaaaaagaaagagaagctggaagccttatatggacaactggtcagctgtggagaaaacctagatacttgcaaagaactgatggaaacaatagaggagatgtgtcacgaggagaaggtggatttcataaaggatgcagtggctatggctgacagactcgggaaattcctgaaaacaaaaacagacgtggaaatctctgcacagcctgagtttgaagaccagaccttggatttctctgatgtggagcagctgatgggctccattaacaccattccagctccttctgctccagtcataaatccacaggtccctaactcagccacaggttcctcagtccgagtgtgctggagcttatactccgacgacactgtggagagctatcagctgtcctaccggccagtgcaggacagctcacctgggacggaccaagcagcaccttctccccccattattaaaaccaaagagataaggagctgtgaagaggctgtgctgatttgctgggagtctgggaacctgaatcctgtggactcgtacactgtggagctgacccaggctgaaagtccagaagcctcgggtgtaactgagtctgttgtgggcatcccgacctgcgagtccgtggtgcagctgcagccggggcggagctacattatctatgtgcgagccctcaatatggggggccccagcgtgaggagcgagccagctacagtccacaccataggaagctactttcgcctaaacaaggacacttgccatccctggctgaccatttctgaagacggacttacggctgtacgaagtgaaaggagaacccccgccagggagctgtcacccagcgacactcacttcaccaggtgtgttgctgtcatgggaaatctaattccagtccgagggcaccattactgggaggtggaggtggatgagcatttggactacagagttggtgtggcctttgcagatgtccgtaaacaggaggatctgggagcaaattgcctctcctggtgcatgaggcacacatttgcatcatcaaggcataagtatgaatttctgcacaacagaacaactccagatataagaataacagttccaccaaagaagattggcattctattagactatgaacattcaaagttgtcatttttcaatgtggacctttctcagcatctatatacatttagttgtcagcttcacgaatttgtgcatccctgtttttctttggaaaagcctgggtgtctaaaggtacataatggcatttcaatgccaaaacatgtcactttctattagaacattctgatgtccagtttcctgtcttccatgcctacccctctcgcagctgctcacgccttagctggctgaac

SEQ ID NO: 7787 - DNA, 603 bp, Homo sapiens
  source 1..603: mol_type = unassigned DNA; mol_type = unassigned DNA
catgcagaggtcactaggaaggaaagcctgctgaacacagattcaattttctagcagaactccaggtcctctgagttaaaggaagcatttatggacgcttagcagccactggggaccagctctggccaggacaattccgtttgccatgatgtgggttgaaatcacaacttctcccgggcgcagtggctcacgcctctaatcccagcactttgggaggccaagggcccagatattcactattaagtgtccaggaaggatctttcttatataaaggtgcttctgaggacttccagagttacaatggaggaggaatcgggggaggaactggggctggacaggtctactcccaaggatttccacttttaccacatggacctgtatgactctgaagacagactgcacctctttccagaagagaacactaggatgaggaaagtagtccaagctgaaatggccaatgagtcaagaggagcaggggatggtaaggctcaaagagaccttcaagaggaagtggatgaacttgtccacttatatggacttgaagatgatcatgaattaggggatgagtttgttgatgaaaacatacccagaacaggggtttca

SEQ ID NO: 7788 - DNA, 20788 bp, Homo sapiens
  source 1..20788: mol_type = unassigned DNA; mol_type = unassigned DNA
atggagctgtacctcggcgcctgctccaagcctgccaaagtcgccgtcaccaagacggtcgccagcgtcctggccgcggacacccagcagtgcagagacggcgtgcacaaaacccactttgcaggggttggaccggctcagctactggacctacctctcggggtcaagctgcctgtgatcccaggaagcaatgctgtattctatactacgaatttcggtgaaaagctttttcgaccttcttatggttttaacctgactgatccctattgtcgacttttggaaaaccaatataaaagcctccatgatccacatttaaaagcatactataagcgcaaagatattttgaagagattaaagaaaggtggctacatcaccagcaataataaagttgtatgtaccttgagagaattgaataagtacaggcaatatcttaccagtttaaaattagactttgagagaaactatataaaagaacaaagaatacttgcaaaacaactacataacataccggaaaacaatcaaatccctcaacattgtgatgttgcacaagtccaaaactggttgttaaaggagggcactgaatctattaaggaccaggagcggctgatgaggcatagatatttggatatgataagtagaaaactagaacaacttgaacgcacagcagaagaacaacgcctattcctaatggatagagaagaaagacgacagcgggaacacacaagaagaaaacttactcttcgtagaaaaatagaagaggaatggaagacaaaagagatgttacttctgacaaggatggcagaagatgttaaaagagaagagaggatagaagaacaacagcatagaaacagagaagagagtgacaggaagaaacaagatcttctagagaaaaaaatggcttatcatttacaaaaaatgcaagatactggctttaacggagaagatataggaaaaaatacatttaaatacagaggtcaagatggaacacatgcttctccaaagaataaaaagaagacttctgaagatataatgttagtttatcctgctggagaccagaatacatataaagaaacacatggacatacagcaaatgctgctcatcagcgtcaaaatagttcaaataattttacgaaaaaaaactcagcttctgttgtttatcaggcagatgtacaggataatggtataaatcaaaagagagatgggatggtatctaaaaactcaagtattttcgatgatagaggaggtataaatatttcaggccaaggttcaattatttcagcgcaggtatcacccacgagaaatttttccagagtttcacaggcatttttggatccttcaaaagaagagaaggagacaaatgctgattgggatggaagaccaaccaagagatcaagctatctctgcgaatcaggacctcaggctcatgctacagacccgggtatattttcttctcctgtttacacaaatatgcaacagaacttgctgcaaaattgcttgcaagaaaaagtaacttctgaagaactgaatattataattcagaatgtaatgacctgggttgtggctacagtgaccagtatattgtacccagccatcacaaagtatgaaaaaagattgcaaaataatacatacccagtatctgatgactccatcctctcttcagatagttcaagtttctgtagcacgtgcagtgaagactttacatatagaagctacacatctgcaacaactaaaacatttcaggcagaaccctgtgcatttgtagttgacacgtcagtaaggagaccaaccacacctataaaacctcctcctgcacatgtggaaaaaacagttgtggggaaaacatgtcacataaaaggacaatctataatctctaaacataaatataataaaaccaacttgctatattcataccctaagctcagaagttgtaaatcagatagtcaccttttagcatcatttgaaacaggcacaaaaaaatctaaggatgctaccactgaaacagatagcttagggagttcattgcattgtgataaaacagcaaaagccatggatgaaatgaagaatttaaaaaatgtttttgttaactttaaatgttacttgaaaggggaaactgaagtgattttagaaagcattttgcgagaaataatgtctgatttaacccaggccattccctctctctcttctgttactgctgaagtttttgttgaacaatgtgaacgtgaaaaagaaatcttgctttccaatgctcatattccctcagttgcttctgagattgtggaaaatatgcttgagaagttagagtctgcagttgagaaaaaatgtgttgagatgttttcacaagatttgtcagtcgacattaaaccaagtttagcagccagtgatgaacttctcacatcatctaatggaaaacctttgaaaaattcaatgcctcatactttggacccaatgtgtgatattgcagaggacatggtgcatgccattttagaaaagctaatgactcttgtttcttttaagcaaaatgaatttcttcatcttaaagacacaaataagctttcctgccagcaacataagacagacccaatatgtatgttccttcaaagagctggcaaaaataaatctagtcttgaatctgatgaagctagtttaattgtcaatgaagaagtacaaaatttaatatcaaatattttttcccagtcttctttggttgcttatatagaggaagcaatcaatgctatactaggttatatacaaactgaactaaataatgagagaattattgcatctgaagaaaccgtagtactccttcagctacttgaggacatcctttttcagctccatcaggaaccagtaaatgaaagttttcaaaaaagtaggcaacctagaataagtagtccttctgacaccaaagaaaagtacagactcactggcactagattatcaaatagtcctaggtctggaagaccatttccacctataaatgttccaggcatggttctttattctgatgatgaaaatgaggaaatagacaatattgtaaaaaatgtgcttgattcaactttcaaagatgaaaaagtaaaatcacaagaacagattcctaatcattggtttacaaagggaaacacttgttttgaatgcaaaagaaatatcaaaccacctacaaagcctggttctagaagcaaagctgcatttcatgattgggaattaaagactgagccaccatctactaatcatgaagatattttaaagaaaaaactttcttcgaataaagacatttcaactttcagccaagatcaaaagcatcaaatagaaaaggcttcagaaaacatagtcacaagtattttaaaggaaatgctcaaggacatatcttccgttccttttggtcacttagacagcaaaactggcagtgaagcttcagttcttgtttcagaaaagcctcaaggactgtcacatcaagaatggatagaccagatgttttctgtttcagaaatcagtacagtggctcaagaaataacagattctgtgttaaacatacttcataaggcatcaaactacatttccaataccactaaaagttccatttcatcatcagttcatcagatttccttacataattctgacactgaacacatagtcaaagaagcaccaaataaatacccattaaaaacatggtttgacagtgaaaagaaaatgaaatatttatctttatttgacgttgatcctgaaaagcctccctggttaaaatctggaaaaagtgaacctaaacctgtagatgacattaatgataagatcattcgtacaatttttaaaagactgaagtcatttatttgtccaaaattgcatatgggcttcaaatcttcattacgatctcaacttagtaagtacacagctaaaatagtaaacattgttttatgtgctatccagaatgaactggaacttcacaaggaaaacctaaatcttagggagattgaccataccaaatcccttacagataaaggattttttgctaatactgataaaaaattagaatctcttgtcacgagtattgatgatgacattttggcgagtccattattaacctgtatttatgatatgttgttatcaagtgaaaatgcacatcaaagaagcatttcactctcttctcgtaagccaaagtctgcaactgacagtgttgatgtacaaagcattttgccaaataggcaagataaaaaatcttttcacaaatatttggctactccttgtactcaccacagtgtcaatggtggaaaccatattaaagagaatgcaaaattgcaagtgttagaaagaattggggaaacactacatgaaatgttaagcaagctcctggggacccatcttcattctcagctatcttgtagtcaacaaagcagagagatgaccaataagaatcagaaaatggctgctgcattgcagtctaatattcagttaatttctaaagcaattttggattatatccttgcaaaattatgtggtgttgacatggataccagttttgcaagttgtggattaaaagctatctcagagtctcttgacattgacaacccatcatttgcttcaattattgagaaaatggccaaatccaccaaaataatctccagcatagtttccagaagggttcaggaggacaataaagaagagactaaaagcaaggcaaaacctgttgctcctgtgtcttccaaaacaccaagcacaaaagaaatgcatccaaataaactaaaagctgtagcttcagatattcttaatatggtttttgctaaactggaagggtttgccaacggacatttagaaattttgggtgctattaatgatggaaataagaaaagcaataagataggctgggaatatgaaagcaccaatatttccagagacacacatgaagcatcatttctgtctgctttatatatgcatgcaaagaaggtatcaagtgctattttgaaggttattcaaacagaattaaatgtgacctcatcagatttgaagacaagtgtagaaaacccaccacctgagactcaaatacttaagtatgtagtcaagttaattttagatgcagtatcttccgatatgtttaatgaaatggaatctgaagggggaggcattgaaacttatcgatacaggccaacatatggaagtcttcctggaggagctgaatcagattcatttctagaagatgatgcatatacagcgaaaaaaattattgatgagagatccccacaaagagaagaagtgaaaacacgttctcttaaacaatgggctctcgaaaaaaccttaaacaaaattgaagtaaaactcaaagaaccacatatatctccaattgctcccattataagaaatattttgaatgaaatttttcaaagtactttaatcaatcaattaaatgtcctttctctctcccactctaattttaatggcatgcctcacaatgttgatgagccaactccccaaacatctgttcaatttatggataaaatgatggatcctttactttcggaagcagatataaccatagtaacagataatattgttaggactgtatttcacaaactttattcagctgccatgacagaaagaaatgtaagggaaaataggtataaaactatcactttttcagcaaatgtttcttctcatgaacacacctataaaggaaagtcctctgtcacggctttggatgaaaatccatgtacttttcagtctagattcagcgttgctgacaaggagacaaaggtaaatctagctgaagatattgtacaggcaatattaacaaatttagaaacttttgctacttccaaagtaaaatctctcttttattctcaagtcaactttacagttccagtggctttacctattcagcaagatcacagtacattgagcaaagcattatcagccaaagattcatattctgatgagcaattttcctgttgctcagtagatcataccaagtcaggaaagaccaacttgtgccaactgtctttgtctaaattaaatacttatgcactacaagtggctagaagaaatttacaaggaatcaaacaggaattagataaagaaagggaaaatccttttttaactcatgacattgggatttctgaaagtattgcaagtcaaattgttaacgcattgttagacattatatcacgtaaaggcaaatgtgacaaaaacagttctgacaaagagatcgatttagatcagcaaaaaggtgttattgaaaagctgctcaatgagaccaaatatcgaaaagtacttcaacttcaaatacaagataccattgaaggtatcctatgtgatatttatgaaaaaaccctgtttcagaataatctctcatttgccacacccactctgaaatgtagcatagctgataaacattcagaagaaaattctgaaatgttcatggagggtgcaaataagattattcctaagctttcagttcctaaatcagatgtcattttgatatccaatgatatagtgaatattgttcttcataatctcagttctgctgccacgcttgtcataaatgcaaagaatcctacttctgcaagattgcccctgacattttgtgatacgtttccaaaaatagactgtcaacagcctcttaaggggtcaaaaactgaaagaaaaacagagcgtttttcatattcaagaaatcagaaatcagcttatgctgatgataatcagataactgtagtagagaaagaagacactcagaaatctgctactgactcatgtgaggaaaatgctaacttcattactaaaactatttttaaacgtttggaatcttttgccacagaaagaatagattcattaattacccttgctttccaaagtaaagaaaagtcatttgttatcccagaattggaaaattgtaaacaaaatgacagcatcttttatgattcaagccaagtggaatcagatgtaaatgtcctgaaaatatcagcaactgaaaccattctcagccaagagcttacagatttcacttttgttggtcgcagagaaaaacttggatccacaattcacctatcgcaagctaggcttaagacatatgctgacgtcattgccagtgccattttgaagcttattaaaaatgacttagacttagaaattcaaaagatatatccatatcaaaacaatattttgttccaagaaaacatcattgtgagtgaaattgttgacagtatgttaaagatgttagatgataaaagatctgtaaaggaaatttgttttaattcaaaagaaaattctaacttttcacaattagctttatcaaatgaaatattgctgggtcacaaagagaaggaaagaagtaccaaacaatctctatttacaaagtatccattagagcaaaaccaaatgatattggaaaacaaaaggcagataattgttttggaagaaatatttatgagaaatggagaatcaaaaaacaaagaaaaaggtgaactgctcattgcagtggaagaacttttgaataagttgtatcaaagagtaagggaagtcacaggccatttgcctccacttaatgaaactgccaactttatatctaattctaagattaaaacatcagacacaacacagaaaaacagttttcaatcacatattaacagtgtagcaaatgacatagttgaaagtgttttggggaaaatgtacttggtagttgtgacatcattatatgaaaataataaaagtaggacagaagttgaaatatctgaccacaatgattccttactaatgaaaccattaaggtttagagaaactaaacaagcaggaaaaataagtaattcccctagatatgcgatatcacaggcttattcttatgtcgacagtcaaaatatctctgtgatggaaaacactcttttgccatatttaccattgcaagtgaagaaagacttaattcaaatggttctcaataagatcacaaattttgtctcacttcctttaaaggtgagccctaaggacaaccctaagccatgctttaaagcacatttaaaaacaagatcaaaaattaccactttgcctaaatttacaaaaaaaacacacttaggactgagtgctgctaaggccaaaagcaaaaccaagttaggtcctggagagaagaccctaaaagacagcagatccaagactgccattgggttgtcacacatcatgtcagctggagatgccaaaaatttactggacacaaaattgcccacttcagaactaaaaatatatgccaaggatataataattaacatcctagaaacaattgtgaaggaatttggaaaggtaaagcaaaccaaagctttaccatctgatcaaatcatagcagcaggtaaaatagttaatacagttttgcaagaattatatgttaccaataactgcaatttggcttacccgatgaaatcctcacatctcagactttcacaggggaatataggcacaggatcccttcctaaacaacaagcatgtttttacttggagaatgtttcttcacagctagagcacatttttcctagagaaggtatatttaaaaaattgtttgacaagtggcaaacagaatcaaatgacaaggaaaatgaaaaatgtaagctattgatgatagctgaaaatgttttgactgaaatttcaataaaagcaaaagaattagaatattctctttcacttttaaatttgccccctcttgagaattgtgaaagcaggttttataatcattttaaaggagcttctactagagccgaggatactaaagcacaaattaatatgtttggaagggaaattgttgaaatgctacttgaaaaactacagctatgctttctgtcccaaattcccactccagatagtgaagaaactctatcaaacagtaaagaacacattactgctaaaagtaaatatggttttccaaacaagcatagcctcagcagtttaccaatctataacacaaagacaaaagaccaaatttctgtgggctccagcaaccaaattgttcaagagattgtagaaacggttttaaacatgttagagtcatttgtggacttgcagtttaaacatatctccaaatatgagttttctgaaattgtgaaaatgcctatagaaaacctttcttctatccaacagaaactgttaaacaaaaaaatgttgccaaaattacaaccactgaaaatgttttctgataaatccgagtcaaatactattaatttcaaggaaaacatacagaatatccttctacgggttcattcattccattcacaattacttacatatgctgttaatatcatcagtgacatgcttgctgtaattaagaacaagctagacaacgaaataagccaaatggaaccatcttcaattagcatattgaaagagaacattgtagcaagtgagatcattggcacactaatggaccagtgtacttatttcaatgagtctttgatacaaaacctttcaagagaaagtttgttccaaggagctgaaaatgcctacactgttaatcaggttgaattagcaactaatatgaaaatgttcacatcaaagttaaaggaaggtagtttggggattaatccttcacaagtgagtaaaactgggtttgtgttttgttcagatgaagatatgaaagaaaagtacagggtttcatcagatttacccacctctgtcagatcctctgtagaagacacagttaaaaactcagagccaacgaaaaggcctgattcagaaactatgccatcgtgttctactagaaacaaagtacaagaccacagaccaagggaatctaactttggtagttttgatcagaccatgaaaggaaatagctacctccctgaaggcagtttcttacaaaagctgcttaggaaagcaagtgactccacagaagcagcattaaagcaagtcttgtcattcatagaaatgggaaaaggtgaaaatctaagagtgtttcattatgagaacctaaaaccagttgttgaaccaaaccaaattcagacaaccatttcccctctcaaaatatgtttagctgcagaaaatattgtcaatactgtgctatccagctgtggctttccaagtcaaccacacactaatgagaacagggaaataatgaaaccatttttcatatcaaaacaaagctctttatctgaagtatctggagggcaaaaggataacgaaaaaagtttgcttagaatgcaggataaaaaaatcaactatatacctgaggaagaaaatgaaaaccttgaagccagccgggaagattcttcttttttgcaaaaattgaaaaaaaaggagtacccaaagatagagactgtgaaggaagttgaagcctttacttttgctgatcatgaaatgggttccaatgaagttcatctgatagcaagacatgtcaccacatctgtggtcacatatttgaagaactttgaaactacagtttttagtgaggaaaagatgtctgtttctacatggtcaaggaaaaaatatgaatcaaaacagttcctaagaaacatatacgatgattcttcaatttatcaatgttgtgaacatctcactgagtcagtactttaccatttaacttcgagcatttctgatggcaccaaaaagggtagagaaaaagagaaagcatgggaaattcaagaagcaacatttagcaagattatttcaattcattctcaagtgtttgagagcaggtcaatttccattggagaacttgctttatgtatttctgaaatcattattaaaattctttttaataataaaattatacaggctgacattgcacagaaaatggttgccatacctacaaaatacacttactgtccaggaatagtttctggtggctttgatgacctctttcaggatctcttagtaggagtgattcatgtactgtccaaagaaatagaagtagattatcactttgaaagcaatgtaagaaacaaatcattttctatgcatagaaataatagtgtacccctttgcaacaaaatcaatagacaggcaagccccagagactggcaattttctactcaacaaattggtcaactttttcaaaaaaataagttaagttatcttgcatgtaagttaaacagcctggttggtaacctaaaaacaagtgaatccaaagaagtagtcaataaagtttttaatattgtttcagatttattttcaccagatgaatgcctagatacgggtatggattctggtaaaatacaaagaacatatttctactcctcgaataatgagcaacctaatagcatacttaccaataacctacagctctcctcaaaatcagtttttcttctcaatgttgtatgtgagaaacttatcagaatacttttggaagaatgcacaagcactgcttttcctgataaagggtctgtttcagaggaaacatcagcagaagaatgtcaacttttaaaaatgcttcaaagtgtagaagatggaaaatctgattatcgtaagggaggaatggactgtgaatgccttcaagtagattacatgtcagaccttttggagaatgtggcagaaattgatcaagacttattgacatcagactctatgcttactattatttcccacagcttggttaaatcattgatggacaaattatctcacagcatacaacaagctccggaaagtctaccttttgcaaataagcatttgaactacagaacaagagaaatacagtctagtttcataaaagcaagaaagtcagaattaatagaattaggacagagtaaaagttctttagaactcaggagctatgatagtaattctttgacagtatccctgaataatcccagtgtggttagctccaaaatacaagcaccatttaacaagcattgtgcagtaaaatcctcttctgtgtcaccttttgaaagacagagaacaaaggaaatggataaggtagccattcataataagctacatcaggaaggtatatatgctggtgtttattcagccacatttttggaaggaataatttcagaattgttttttaatctctctatgtcattgtggggcaaaaataaaaacatcactgtgtcctggctcaatgagatgaatacattatttgtcaacaatgtagtgaatgaatttaataatgctcaagtcactgttctacggaatgctgaagaaaggctgtgttttccaccagttcatacagaaactgttagcaaaattgttgactcagtttattatgatgttttacagcagtatgaattaaaagtggcctgtggtaataatccggtatacgacaatgcctcaatagcagaacaaataacaaatggcatattgttagagattttagactacaaactgccatcttgcttcaaggaacatctcataccccattcatattaccctctcaaacctgaaattatattgcaaaagcttcaaagtaacctaacagaatttacttctctacccaggtcttcatcagactatagtaccatgttatcacattcatttttagaagatgtcataagaaggcttttatctcagctaattcctccacccattacatgttcctctttaggaaaaaaatatttaatgagttctgattttaatgaaatgtccacttgtataataaataaggttatgtcagccatttcaaaacataaaatctggttcactatatatgataatcaatatctatatactggaaaaaacctccaaaagatggtggattctgtatattgtaatattttgcaaatgtctgactctcttgtttcaatacaaaaaagtatagtaagccgaagcccaattatgattgaccaaatagccagctttatcatccaagagattatcgaaaatcatcttcaaccatttttgagtggagaggttttatgtcatccaaggactccactggatccagtgtctactattgttacacaggttctgagtgaagtgatagagtcacacagacctcagaagcaatcacctttagatattcaccttgattcatttgtaagggagattgttgccagacttttgtcaaagattttcagcccaaagcataacactgaaattgagttgaaaaacatgacccaaagaatagtaaactccataaataggcatttcaataaagctaaaattcacattctctatgatgacaaagaacaggctttcttttctttcaatacagatattgtggatgaacttgccacctcagtttatagaaatgctttaaagcagcatgggctagaccttgctgttgataaagagtctgaagacagtggcatttttgtggaaaatattaccaatttaattgtagcagctatttcagattaccttcttcatccactgttttctggggatttttcagcttctacctattctaattcagtggctgagaatattgttcaggacatccttagtaacatcagtaaatctactgagccaagccagagtgtacctctatataacaccttgctgccatacacatttttagaagatatgatcagagtactattatctaaattattttcttctgcatctagcctggttctaaacagagacacccaaaaagatatatcaagagtgaatttcaatgacattgcttcaaacctagttagtgatattaggatgaaagtttcccaacatgaaattcgattttcaaaagaggaagaagaaaccaagtttatttattcagaagatgatattcagcaccttgttgattcagtatttgcaaatgttgtgcaaacctctggttctcaagaatcagctgtgcaaaatatcacaagcagtaatgacattcttatagatagaatagcaggtttcatcattaaacatatctgtcaaaaacatcttcagccatttgtgagtggaaaatcattatcttcatcagacacatattttgatgatgagagaaggcagttattttataccagtgtttactcttcaacattcttggaagatgtaatctctggggttttaagaaaaatattccacagggtagtaggcattgtacaaacaaaatccataagagattcagaagatgaactgtttgagaaagctgaagaactcatacatttgattacaggggaattctcaaaagcccaagttagcattatagataatactgaggaaagactgtgtttacctccagtggagagggatgtagtcaaaacaattgttgacatggtgtacagcaaagttttgcaagaatatgaaatggaagtcgtgcccaataaagattttctaaatgacacaaagacattggctgcaagaataactaatatcatcctggctgaaatttttgatttccaaattcatccagatcttatagcaaatctgccttttaaatcacattccaaactcagtgcaaatgttttaatacaaagagttcaatatgatataagtaaatcaagattccaaagacaagcttcaacaatgtataccactatgttatcacatagtcatttggaaaaaatagttactcagcttacatctcagataagtccattgaacaccagtgcagagcagtcagatactactaaatcagacttaagtaatacagtgataaaactgataaatgaaattatgtcaataatttcaaaacatgaaatatgtattattaaatatgggaataaaaaacagagtatgatttcagcaaaagatatccagtctatggttgattccatttatgctgatctttctcattcaaatatataccagtccattacaaaagataaaaagagcataagtgacatacctgtttcaaaaatagcgagttttataataaaagaaatctttaaccatcatattcaatcatttttatctgaagataaaactctccttttggcagcagttgatcaaacttataaattgaaagcaatagatcctaaacaaagagaattatcttttattgtgaactcatctgtctttttggaggaagtaatttctgagctcttatgcaaaattctttatgcattttcacataacatgttggttactgaaaatccagatagagtgaaactgaaacttaccaggattgttacaacattggtaaattcaattgttctggagttcaccacatcagagattttagttgcagataactttgataaaaatttgtgtttctcagaaagatacaaagaaatggttcaaaaaatagtcaactcagtatatggaaaagtattagatcaatataaatctctgattcaaatacatagggttatacaaagtgacacaatatgttttggtaggaaaatatattatttgctattggaagaaatatatgattatcaagtgcagtcattagtttcaggagaattagagtcttcttcttattcgtatccccaagctgataatatcatcagaaatgtgcttaacataatcacaaaggatagccatgccttgccaccatatattactgtgttgcctcattctcttttagaagatatggtttacaggcttctagggcatgtcttcccttcaactcacactgaaaatgaactaaaagagaaaaagtttccaccggatgatgaatttgtggaggcagcttcaaaattgactgatgaaattataaaagaaatttctgaacatgagattcgactttccatggcagaggataatgcagaaagtatgcagttagaacctattgaaaatttggtcgactccatatgtaataatattttgaaaacatctgaattccaagctgaagtacaaaaagatgcagacaaaaaaggatgctcattcctcagtaaattagctggttttattatgaaagaaatcatgtatcatcatttacagccatttttacatggtgaagaatcatctttcagtgacttatctgattatgaccatgtctctgaacttgctaaatctggtaaagaaaagacacagccttctctctattcagctacatttttggaagacataatcattgaccttgttcacaaattttgttctctcctcattattactgaagattctaagaaaaatgaaatggcagagctagatattatgggcttggctctaaaacttgcaaattctctgataagggaatttaagaaaagtgatattaaagttttaccaaatgctgaaaaaatgttttcttttccaccaattgataaagagacagttgataaaatatccaattttgtatatgaacagttcatagaaaaatgcacatctcatgatattcaaaaaggtgatgaaagtaacattgctatagggatgattgctgctctaacccagaaggcaatatctgcattcaggattcaaccacttttttcaggagactggtcttccaccttcttttcatttctaaatccagataatatcacccaaagggttcaacacctaccacaaaacacctttacacaaataagcagatgtgcaaaagagaaccaactttctttaccagatcaatcatataaagatacttcttccaccccagattgcaaaaacatgatgagcactttggaaataaatagaggtacaatgaatagaaagaaaagttttaaaaccaaggacacatcagtgaaaaaaggtgacatccaaaatccagtacttagctctataaatgcaattatgaaaagcggcatgattaacctaacatcagggttggctacaggtgtgacaaataaaaaggaagtggatgaaaataaagtgggaatttgtactcaaaaacatagtgagaatgtatcaaaagttacttcaactaccactgtgaaaagtaaagatactcaggagccaaatttgagtgaaacatttaataataatgaaattgagaagaaaagaaatttaattccaacagataaaaaagggaaagatgatgagatatacacacatttttcattaataattgatgatacagaatatgagaaggaagtacttggatcagattctgaaataggctataaaaagaagattgacaatgcaagggaaagctcatttaaaaaagatgacaagctctttcagttatcctccttgaagtccaagagaaatctagggactacaacagatactttggaaataagaattcgaacatcaagcaatgaggggagaagagactctccaacacaaacgtgtagggatgaggaacaccactcagattatgaacatgttcaaaatgtcattgaaaatatttttgaagatgttttagaactatcttcttctccagaaccagcatattattcgaaactcagttatgaccaaagccccccaggtgataatgtattaaatgtaattcaagagattagcagggattcggcacagtctgttacaacaaaaaaagtatcctcctcaactaacaaaaatatctctgccaaagaaaaagaagaggaagagagagaaaaagagaaagtaagagaggagattaaaagtgaacccagtaaaccagatgatcctcaaaaccaacgagaaagtaaacctggaatttttcccgctaagtttttagaagatgttattactgagatggttaaacaattgatcttttcttctataccagaaacacaaatacaagatagatgtcaaaatgttagtgataagcaaaatcaagccaaactctatgacactgctatgaaactcatcaattcactgttaaaggagttctcagatgctcaaattaaggttttcaggccagataagggaaatcagttccctgggggtaaagtgtcttcagttcctaaagtacctccaaggtataaagagccaactacagatgaagcaccatccagcattaagataaaatctgcagataaaatgccacctatgcataaaatgatgagaaaaccttcttcagataagataccatcaattgacaaaacattggtcaataaagttgttcactcctctgtttgtaatattttaaatgactatggatctcaagactctatttggaagaatataaacagtaatggagaaaatttagcaagaagactaactagtgcagtgataaatgaaattttccaacgtcaggttaacttgatattttgtgatgaggtttcagtttcagcatgtttgcctctggaatctaaggatgttgttaaaaaggtccaaaagttggcccaaacagccagcaaagaatgtcaaacttcatcaccatatacaataatattacctcataaatttttggagaatgtgatttctgctcttttctccaaaattttctcaacaatatccagcacaaaaacaaaagaacctgaggacaatttgtccacagaactgaatttccttcaaatgaagttagtaagtgcagttgcaacagagatctcccaagataaatatatgactatacagtatgtagaaaccttacaatctgatgatgatgaaattattcaattagtggttcagtctgtttataataatctcttgccacagtttggatcacaagagattatacaaaattgtgtaaccagtggatgcaaaatcctttcagaaaacatagttgacttggttctacgagaagtggctagcaatcagctgcagagctatttttgtggagagctaactccacatcagtgtgtggaagttgaaaacatcgttgaaaagatccttaaagatgttttccaaactactgatgtgcccctacctaaaccttcacatgctgataagctgtcttataacataatagaagaaattgctgtgaaatttttatcaaagcttttatctatatttccaaaagtacataaagaaagaacaaaatctctagagactgatatgcaaaaaataacttcaaaagtactaaattcagtccaagaatttatctccaaaagtaagattaaacttgtaccacccaccaaggaatcacctactgtgcctgtagctgataatgcaactattgaaaacatagttaattctatttataccagtgttttaaagcactctggctcttatacttctgtatttaaagatttaatgggtaaaagcaatgtcctctctgatacaataggctttttaatggtgaatgcaatttcgaattctgaatttcaacctcaagtagaggaagaagtatcaaattcagaattagttctggaagctgtcaaaattatggaaaaagtgatcaaaattattgatgaacttaagtctaaggaaaagtcttcatccagaaaaggtttgacattagatgccaaacttttagaagaggtgttggccttgttcttggctaaactaataaggttgccaagttcctcaagcaaagatgaaaaaaacttatcaaagactgagttaaataaaattgcatctcaactgtcaaaattggtaacagctgaaatttccagaagtagcattagtctaatagcttctgatcctgaagagcactgtttaaatccagaaaatacagaaaggatttatcaggttgtcgattccgtttatagtaacatactgcaacaatcaggaaccaacaaagaattttattatgatataaaagatacaaatacagcctttcctaaaaaagtggctagtttaattattgatggagtttcaagttttccattagatacaattaactcaacaatttcaaatgctgatctctctggagagctagacgttaatagaattgttcaaaaggcccaagaacatgcttttaatgtgattcctgaattagagcaagaaaagttagatcaaaatttatctgaagaggaatctccaattaaaatagttccacatgttggaaaaaaaccagtcaaaatagatccaaaaattatttcagaacacttagcagttatttctataaaaactcaacctcttgagaaacttaagcaggagtgtttgaaaagaactggacatagcatagcagaactgagaagagcatcaataagtgggagaaattactccttaggatcacctgatttagaaaagagaaagacagaaagacgtacctcattggataagactggaagactggatgtaaaacccctagaggccgttgctagaaattcatttcagaatataagaaagcctgatattacaaaggtggagctcttaaaagatgttcaaagtaaaaatgatcttattgttcgattagtagctcatgatattgatcaagtgtatttggaaaattacataaaagaggaacgagattctgatgaagatgaagttgttttaacacagacttttgcaaaagaagaaggcatcaaagtatttgaagatcaagtgaaagaagtcaagaagccaatacaaagcaaactttctcctaagtcaacactaagcacgagcagcctgaaaaaatttttgtcactaagtaaatgttgtcagaccacagccagtgcaaatattgaaagtactgaagcaatctcaaatcaggtaatagaatccaaggagacacatgttaaaagagctgttgctgagcttgacatggccacaccaaagacgatgcctgaaacagcctcttcatcttgggaggaaaagccccagtgtaagaaagaagaaaagaatcttgttactgaaccaacacattacttcatacacagaattatgagttcatcttcatacaaccaagaagatctcatttcatctactggtgaggctgaagattgtcactcagacccaagtgctaaaatattagaagaaagttctcaggaacaaaagccagagcatggaaacagtgttaagtttatcaccatctttgaaagatccaaggatgttcttggcagtgcaaatccctcaaaggaagtcatttcagaaactcccaagcccgatgtctccaaacaaggatctaaaatgctgacaaaaatgtcttcaactttgtcaaaggtgttttctcaatgtaacaccaatatttccagatcttcctcaccagctcaccaggatgaacactgaagcttttgtacctgatataagtatgcttacttcttttagaaaataaaatggtttttaaagcata

SEQ ID NO: 7789 - DNA, 348 bp, Homo sapiens
  source 1..348: mol_type = unassigned DNA; mol_type = unassigned DNA
tctaaactaaactaatactgcctaaaaggaaagacaaaactctccaattgtgtctgacagggcgtgcacaaaacccactttgcaggggttggaccggctcagctactggacctacctctcggggtcaagctgcctgtgatcccaggaagcaatgctgtattctatactacgaatttcggtgaaaagctttttcgaccttcttatggttttaacctgactgatccctattgtcgacttttggaaaaccaatataaaagcctccatgatccacatttaaaagcatactataagcgcaaagatattttgaagagattaaagaaaggtggctacatcaccagcaataataaa

SEQ ID NO: 7790 - DNA, 858 bp, Homo sapiens
  source 1..858: mol_type = unassigned DNA; mol_type = unassigned DNA
tttggaaaaccaatataaaagcctccatgatccacatttaaaagcatactataagcgcaaagatattttgaagagattaaagaaaggtggctacatcaccagcaataataaagttgtatgtaccttgagagaattgaataagtacaggcaatatcttaccagtttaaaattagactttgagagaaactatataaaagaacaagtaagttaaatacttaaatttggtttatttacatagagtttggaagaaatgcttgattatatgtagagtgttcttctaataatattttgatcctttattattgacaaagtaattgaatattttttccaagtgaaaatttacagtaggaataaacaatattttaattttgctatagttggccaagaatgggaaagggactgggttatctatcaacacaccagtggtagctggcataattcaataactaaattgctagtcagatgtgttgtttccccctgagctaatgccaataacaaacatctcttgtggcagaaagattcttaaattgaaacctaaaacagtttgagccataggaaaagaacaataattatctgtagtgttctacagtgattcaagaatatgtacactctgtgtttgtactcatacacgtgcacctgtaaaaatgttgttcttgaatgtgaacaaaatgttgttcttgaatgtgaagtagaatgattgggtgtagagtgaatggttatggatagtgacttccttttgatttttgacttaaaggtgtgtgtgtgtggggtgtgtgtgtgtgtgtgtgtttgtgtgaattcagattttagggtcaagaggtttggatcaaagtgagaaaggtatatttacatgagtgt

SEQ ID NO: 7791 - DNA, 2726 bp, Homo sapiens
  source 1..2726: mol_type = unassigned DNA; mol_type = unassigned DNA
aaggaccaggagcggctgatgaggcatagatatttggatatgataagtagaaaactagaacaacttgaacgcacagcagaagaacaacgcctattcctaatggatagagaagaaagacgacagcgggaacacacaagaagaaaacttactcttcgtagaaaaatagaagaggaatggaagacaaaagagatgttacttctgacaaggatggcagaagatgttaaaagagaagagaggatagaagaacaacagcatagaaacagagaagagagtgacaggaagaaacaagatcttctagagaaaaaaatggcttatcatttacaaaaaatgcaagatactggctttaacggagaagatataggaaaaaatacatttaaatacagaggtcaagatggaacacatggtgaatgacatacagcaaatgctgctcatcagcgtcaaaatagttcaaataattttacgaaaaaaaactcagcttctgttgtttatcaggcagatgtacaggataatggtataaatcaaaagagagatgggatggtatctaaaaactcaagtattttcgatgatagaggaggtataaatatttcaggccaaggttcaattatttcagcgcaggtatcacccacgagaaatttttccagagtttcacaggcatttttggatccttcaaaagaagagaaggagacaaatgctgattgggatggaagaccaaccaagagatcaagctatctctgcgaatcaggtaaatatcagcagtaattattgagtaaatcttgcattctatttattctttcaactgacatttactgagtttttgcttcatgttagatatggtgctaagttttaatcattcaaggaaaaatggcacaatttttgctcagggttcttacagtatacttggaaagatagtcatggcccaatatgataagagcaataaaggaagtgggtatgtgtaaaagctgggaaagttatgggaaagagaatgcatagacctatctagggtcatcatagaagcctttataatttagaaagagactgcgttgagacatgaaggatcagaaggaatttcctattttctttttgttatttttattgtttgtactaatgttgacaaccaaaatttgcaaaaaaattaaagtttttgtactcatatccttatacttactgttttctgcttttacagcagcttctctcccacaccacaactttattaaggtatagtggataatttaaaactgtatatattgacggtacagatggtccccaacttgtaatgattcaatttagggtttttcaactttactgtcggtttattggggtattaaatgcattctcagcttacaatatttttgacttacaattggctaatcaagatgtaacaccatcataagacaaggagaatcatatacaacttgatatgtgtatatacagtaaagtgttcaccacaagcaagccaattaacatatcctcacttcatgtagttactatttgtgtgtggtggcagaagaacacttaagagctactctctttctacatatggctagccagttttcccagcaccatttattaaatagggaatcctttccccattgcttgtttttctcaggtttgtcaaagatcagatagttgtagatatgcggcgttatttctgagggctctgttctgttccattgatctatatctttgttttggtaccagtaccatgctgttttggttactgtagccttgtagtatagtttgaagtcaggtagtgtgatgcctccagctttgttcttttggcttaggattgaattggtgatgcgggctcttttttggttccatatgaactttaaagtagttttttccaattctgtgaagaaagtcatcggtagcttgatggggatggcattgaatctataaattaccttgggcagtatggccattttcacgatattgattcttcctacccatgagcatggaatgttcttctatttgtttgtatcctcttttatttccttgagcagcggtttgtagttctccttgaagaggtccttcacatcccttgtaagttggattcctaggtattttattctctttgaagcaattgtgaatgggagttcactcatgatttggctctctgtttgtctgttgttggtgtataagaatgcttgtgatttttgtacattgattttgtatcctgagactttgctgaagttgcttatcagcttaaggagattttgggctgagacaatggggttttctagatatacagtcatgtcgtctgcaaacagggacaatttgacttcctcttttcctaattgaataacctggatcccttccttacaccttatacaaaaatcaattcaagatggattaaagacttaaacgttagacctaaaaccataaaaaccctagaagaaaacctaggcattaccattcgggacataggcatgggcaaggacttcatgtctaaaacaccaaaagcaatggcaacaaaagccaaaattgacaaatgggatctaattaaactaaagagcttctgcacagcaaaagaaactaccatcagagtgaacaggcaacctacaaaatgggagaaaattttcgcaacctactcatctgacaaagggctaataaccagaatctacaatgaactcaaacaaatttacaagaaaaaaacaaacaaccccatcaaaaagtgggtgaaggacatgaacagacacttctcaaaagaagacatttatgcagcc

SEQ ID NO: 7792 - DNA, 3869 bp, Homo sapiens
  source 1..3869: mol_type = unassigned DNA; mol_type = unassigned DNA
gtatcaaagagtaagggaagtcacaggccatttgcctccacttaatgaaactgccaactttatatctaattctaagattaaaacatcagacacaacacagaaaaacagttttcaatcacatattaacagtgtagcaaatgacatagttgaaagtgttttggggaaaatgtacttggtagttgtgacatcattatatgaaaataataaaagtaggacagaagttgaaatatctgaccacaatgattccttactaatgaaaccattaaggtttagagaaactaaacaagcaggaaaaataagtaattcccctagatatgcgatatcacaggcttattcttatgtcgacagtcaaaatatctctgtgatggaaaacactcttttgccatatttaccattgcaagtgaagaaagacttaattcaaatggttctcaataagatcacaaattttgtctcacttcctttaaaggtgagccctaaggacaaccctaagccatgctttaaagcacatttaaaaacaagatcaaaaattaccactttgcctaaatttacaaaaaaaacacacttaggactgagtgctgctaaggccaaaagcaaaaccaagttaggtcctggagagaagaccctaaaagacagcagatccaagactgccattgggttgtcacacatcatgtcagctggagatgccaaaaatttactggacacaaaattgcccacttcagaactaaaaatatatgccaaggatataataattaacatcctagaaacaattgtgaaggaatttggaaaggtaaagcaaaccaaagctttaccatctgatcaaatcatagcagcaggtaaaatagttaatacagttttgcaagaattatatgttaccaataactgcaatttggcttacccgatgaaatcctcacatctcagactttcacaggggaatataggcacaggatcccttcctaaacaacaagcatgtttttacttggagaatgtttcttcacagctagagcacatttttcctagagaaggtatatttaaaaaattgtttgacaagtggcaaacagaatcaaatgacaaggaaaatgaaaaatgtaagctattgatgatagctgaaaatgttttgactgaaatttcaataaaagcaaaagaattagaatattctctttcacttttaaatttgccccctcttgagaattgtgaaagcaggttttataatcattttaaaggagcttctactagagccgaggatactaaagcacaaattaatatgtttggaagggaaattgttgaaatgctacttgaaaaactacagctatgctttctgtcccaaattcccactccagatagtgaagaaactctatcaaacagtaaagaacacattactgctaaaagtaaatatggttttccaaacaagcatagcctcagcagtttaccaatctataacacaaagacaaaagaccaaatttctgtgggctccagcaaccaaattgttcaagagattgtagaaacggttttaaacatgttagagtcatttgtggacttgcagtttaaacatatctccaaatatgagttttctgaaattgtgaaaatgcctatagaaaacctttcttctatccaacagaaactgttaaacaaaaaaatgttgccaaaattacaaccactgaaaatgttttctgataaatccgagtcaaatactattaatttcaaggaaaacatacagaatatccttctacgggttcattcattccattcacaattacttacatatgctgttaatatcatcagtgacatgcttgctgtaattaagaacaagctagacaacgaaataagccaaatggaaccatcttcaattagcatattgaaagagaacattgtagcaagtgagatcattggcacactaatggaccagtgtacttatttcaatgagtctttgatacaaaacctttcaagagaaagtttgttccaaggagctgaaaatgcctacactgttaatcaggttgaattagcaactaatatgaaaatgttcacatcaaagttaaaggaaggtagtttggggattaatccttcacaagtgagtaaaactgggtttgtgttttgttcagatgaagatatgaaagaaaagtacagggtttcatcagatttacccacctctgtcagatcctctgtagaagacacagttaaaaactcagagccaacgaaaaggcctgattcagaaactatgccatcgtgttctactagaaacaaagtacaagaccacagaccaagggaatctaactttggtagttttgatcagaccatgaaaggaaatagctacctccctgaaggcagtttcttacaaaagctgcttaggaaagcaagtgactccacagaagcagcattaaagcaagtcttgtcattcatagaaatgggaaaaggtgaaaatctaagagtgtttcattatgagaacctaaaaccagttgttgaaccaaaccaaattcagacaaccatttcccctctcaaaatatgtttagctgcagaaaatattgtcaatactgtgctatccagctgtggctttccaagtcaaccacacactaatgagaacagggaaataatgaaaccatttttcatatcaaaacaaagctctttatctgaagtatctggagggcaaaaggataacgaaaaaagtttgcttagaatgcaggataaaaaaatcaactatatacctgaggaagaaaatgaaaaccttgaagccagccgggaagattcttcttttttgcaaaaattgaaaaaaaaggagtacccaaagatagagactgtgaaggaagttgaagcctttacttttgctgatcatgaaatgggttccaatgaagttcatctgatagcaagacatgtcaccacatctgtggtcacatatttgaagaactttgaaactacaggccgttgctagaaattcatttcagaatataagaaagcctgatattacaaaggtggagctcttaaaagatgttcaaagtaaaaatgatcttattgttcgattagtagctcatgatattgatcaagtgtatttggaaaattacataaaagaggaacgagattctgatgaagatgaagttgttttaacacagacttttgcaaaagaagaaggcatcaaagtatttgaagatcaagtgaaagaagtcaagaagccaatacaaagcaaactttctcctaagtcaacactaagcacgagcagcctgaaaaaatttttgtcactaagtaaatgttgtcagaccacagccagtgcaaatattgaaagtactgaagcaatctcaaatcaggtaatagaatccaaggagacacatgttaaaagagctgttgctgagcttgacatggccacaccaaagacgatgcctgaaacagcctcttcatcttgggaggaaaagccccagtgtaagaaagaagaaaagaatcttgttactgaaccaacacattacttcatacacagaattatgagttcatcttcatacaaccaagaagatctcatttcatctactggtgaggctgaagattgtcactcagacccaagtgctaaaatattagaagaaagttctcaggaacaaaagccagagcatggaaacagtgttaagtttatcaccatctttgaaagatccaaggatgttcttggcagtgcaaatccctcaaaggaagtcatttcagaaactcccaagcccgatgtctccaaacaaggatctaaaatgctgacaaaaatgtcttcaactttgtcaaaggtgttttctcaatgtaacaccaatatttccagatcttcctcaccagctcaccaggatgaacactgaagcttttgtacctgatataagtatgcttacttcttttagaaaataaaatggtttttaaagcat

SEQ ID NO: 7793 - DNA, 3882 bp, Homo sapiens
  source 1..3882: mol_type = unassigned DNA; mol_type = unassigned DNA
tacagaatatgagaaggaagtacttggatcagattctgaaataggctataaaaagaagattgacaatgcaagggaaagctcatttaaaaaagatgacaagctctttcagttatcctccttgaagtccaagagaaatctagggactacaacagatactttggaaataagaattcgaacatcaagcaatgaggggagaagagactctccaacacaaacgtgtagggatgaggaacaccactcagattatgaacatgttcaaaatgtcattgaaaatatttttgaagatgttttagaactatcttcttctccagaaccagcatattattcgaaactcagttatgaccaaagccccccaggtgataatgtattaaatgtaattcaagagattagcagggattcggcacagtctgttacaacaaaaaaagtatcctcctcaactaacaaaaatatctctgccaaagaaaaagaagaggaagagagagaaaaagagaaagtaagagaggagattaaaagtgaacccagtaaaccagatgatcctcaaaaccaacgagaaagtaaacctggaatttttcccgctaagtttttagaagatgttattactgagatggttaaacaattgatcttttcttctataccagaaacacaaatacaagatagatgtcaaaatgttagtgataagcaaaatcaagccaaactctatgacactgctatgaaactcatcaattcactgttaaaggagttctcagatgctcaaattaaggttttcaggccagataagggaaatcagttccctgggggtaaagtgtcttcagttcctaaagtacctccaaggtataaagagccaactacagatgaagcaccatccagcattaagataaaatctgcagataaaatgccacctatgcataaaatgatgagaaaaccttcttcagataagataccatcaattgacaaaacattggtcaataaagttgttcactcctctgtttgtaatattttaaatgactatggatctcaagactctatttggaagaatataaacagtaatggagaaaatttagcaagaagactaactagtgcagtgataaatgaaattttccaacgtcaggttaacttgatattttgtgatgaggtttcagtttcagcatgtttgcctctggaatctaaggatgttgttaaaaaggtccaaaagttggcccaaacagccagcaaagaatgtcaaacttcatcaccatatacaataatattacctcataaatttttggagaatgtgatttctgctcttttctccaaaattttctcaacaatatccagcacaaaaacaaaagaacctgaggacaatttgtccacagaactgaatttccttcaaatgaagttagtaagtgcagttgcaacagagatctcccaagataaatatatgactatacagtatgtagaaaccttacaatctgatgatgatgaaattattcaattagtggttcagtctgtttataataatctcttgccacagtttggatcacaagagattatacaaaattgtgtaaccagtggatgcaaaatcctttcagaaaacatagttgacttggttctacctaaaccttcacatgctgataagctgtcttataacataatagaagaaattgctgtgaaatttttatcaaagcttttatctatatttccaaaagtacataaagaaagaacaaaatctctagagactgatatgcaaaaaataacttcaaaagtactaaattcagtccaagaatttatctccaaaagtaagattaaacttgtaccacccaccaaggaatcacctactgtgcctgtagctgataatgcaactattgaaaacatagttaattctatttataccagtgttttaaagcactctggctcttatacttctgtatttaaagatttaatgggtaaaagcaatgtcctctctgatacaataggctttttaatggtgaatgcaatttcgaattctgaatttcaacctcaagtagaggaagaagtatcaaattcagaattagttctggaagctgtcaaaattatggaaaaagtgatcaaaattattgatgaacttaagtctaaggaaaagtcttcatccagaaaaggtttgacattagatgccaaacttttagaagaggtgttggccttgttcttggctaaactaataaggttgccaagttcctcaagcaaagatgaaaaaaacttatcaaagactgagttaaataaaattgcatctcaactgtcaaaattggtaacagctgaaatttccagaagtagcattagtctaatagcttctgatcctgaagagcactgtttaaatccagaaaatacagaaaggatttatcaggttgtcgattccgtttatagtaacatactgcaacaatcaggaaccaacaaagaattttattatgatataaaagatacaaatacagcctttcctaaaaaagtggctagtttaattattgatggagtttcaagttttccattaatacaattaactcaacaatttcaaatgctgatctctctggagagctagacgttaatagaattgttcaaaaggcccaagaacatgcttttaatgtgattcctgaattagagcaagaaaagttagatcaaaatttatctgaagaggaatctccaattaaaatagttccacatgttggaaaaaaaccagtcaaaatagatccaaaaattatttcagaacacttagcagttatttctataaaaactcaacctcttgagaaacttaagcaggagtgtttgaaaagaactggacatagcatagcagaactgagaagagcatcaataagtgggagaaattactccttaggatcacctgatttagaaaagagaaagacagaaagacgtacctcattggataagactggaagactggatgtaaaacccctagaggccgttgctagaaattcatttcagaatataagaaagcctgatattacaaaggtggagctcttaaaagatgttcaaagtaaaaatgatcttattgttcgattagtagctcatgatattgatcaagtgtatttggaaaattacataaaagaggaacgagattctgatgaagatgaagttgttttaacacagacttttgcaaaagaagaaggcatcaaagtatttgaagatcaagtgaaagaagtcaagaagccaatacaaagcaaactttctcctaagtcaacactaagcacgagcagcctgaaaaaatttttgtcactaagtaaatgttgtcagaccacagccagtgcaaatattgaaagtactgaagcaatctcaaatcaggtaatagaatccaaggagacacatgttaaaagagctgttgctgagcttgacatggccacaccaaagacgatgcctgaaacagcctcttcatcttgggaggaaaagccccagtgtaagaaagaagaaaagaatcttgttactgaaccaacacattacttcatacacagaattatgagttcatcttcatacaaccaagaagatctcatttcatctactggtgaggctgaagattgtcactcagacccaagtgctaaaatattagaagaaagttctcaggaacaaaagccagagcatggaaacagtgttaagtttatcaccatctttgaaagatccaaggatgttcttggcagtgcaaatccctcaaaggaagtcatttcagaaactcccaagcccgatgtctccaaacaaggatctaaaatgctgacaaaaatgtcttcaactttgtcaaaggtgttttctcaatgtaacaccaatatttccagatcttcctcaccagctcaccaggatgaacactgaagcttttgtacctgatataagtatgcttacttcttttagaaaataaaatggtttttaaagcat

SEQ ID NO: 7794 - DNA, 5419 bp, Homo sapiens
  source 1..5419: mol_type = unassigned DNA; mol_type = unassigned DNA
tcacgggctccggtcccggcggcagaaatagggcagccgcggcggcggtggcacagcagcgggcagcggcggctcagggagctggagcctcaacagcctccagcgagcccgggacccgccgacagcccgagaaaccagccgaaggacgcggggcggggtcgccgccgccgccacggggtgctccctccctcccgcccaagtccggccacctggtcttcccctcggccccggccgtctcagactcatcaaaatgaaaccaggaggcttttggctgcatctcacactgctcggagcctccctgccggctgcgctgggatggatggacccaggaaccagcagaggcccggatgtgggtgtgggggagtcacaggcagaggagcccagaagctttgaagtcacaagaagagaagggctttccagccacaacgagctgctggcctcctgcgggaagaagttctgcagccgagggagccggtgcgtgctcagcaggaagacaggggagcccgaatgccagtgcctggaggcatgcaggcccagctacgtgcctgtgtgcggctctgatgggaggttttatgaaaaccactgtaagctccaccgtgctgcttgcctcctgggaaagaggatcaccgtcatccacagcaaggactgtttcctcaaaggtgacacgtgcaccatggccggctacgcccgcttgaagaatgtccttctggcactccagacccgtctgcagccactccaagaaggagacagcagacaagaccctgcctcccagaagcgcctcctggtggaatctctgttcagggacttagatgcagatggcaatggccacctcagcagctccgaactggctcagcatgtgctgaagaagcaggacctggatgaagacttacttggttgctcaccaggtgacctcctccgatttgacgattacaacagtgacagctccctgaccctccgcgagttctacatggccttccaagtggttcagctcagcctcgcccccgaggacagggtcagtgtgaccacagtgaccgtggggctgagcacagtgctgacctgcgccgtccatggagacctgaggccaccaatcatctggaagcgcaacgggctcaccctgaacttcctggacttggaagacatcaatgactttggagaggatgattccctgtacatcaccaaggtgaccaccatccacatgggcaattacacctgccatgcttccggccacgagcagctgttccagacccacgtcctgcaggtgaatgtgccgccagtcatccgtgtctatccagagagccaggcacaggagcctggagtggcagccagcctaagatgccatgctgagggcattcccatgcccagaatcacttggctgaaaaacggcgtggatgtctcaactcagatgtccaaacagctctcccttttagccaatgggagcgaactccacatcagcagtgttcggtatgaagacacaggggcatacacctgcattgccaaaaatgaagtgggtgtggatgaagatatctcctcgctcttcattgaagactcagctagaaagacccttgcaaacatcctgtggcgagaggaaggcctcagcgtgggaaacatgttctatgtcttctccgacgacggtatcatcgtcatccatcctgtggactgtgagatccagaggcacctcaaacccacggaaaagattttcatgagctatgaagaaatctgtcctcaaagagaaaaaaatgcaacccagccctgccagtgggtatctgcagtcaatgtccggaaccggtacatctatgtggcccagccagcactgagcagagtccttgtggtcgacatccaagcccagaaagtcctacagtccataggtgtggaccctctgccggctaagctgtcctatgacaagtcacatgaccaagtgtgggtcctgagctggggggacgtgcacaagtcccgaccaagtctccaggtgatcacagaagccagcaccggccagagccagcacctcatccgcacaccctttgcaggagtggatgatttcttcattcccccaacaaacctcatcatcaaccacatcaggtttggcttcatcttcaacaagtctgatcctgcagtccacaaggtggacctggaaacaatgatgcccctcaagaccatcggcctgcaccaccatggctgcgtgccccaggccatggcacacacccacctgggcggctacttcttcatccagtgccgacaggacagccccgcctctgctgcccgacagctgctcgttgacagtgtcacagactctgtgcttggccccaatggtgatgtaacaggcaccccacacacatcccccgacgggcgcttcatagtcagtgctgcagctgacagcccctggctgcacgtgcaggagatcacagtgcggggcgagatccagaccctgtatgacctgcaaataaactcgggcatctcagacttggccttccagcgctccttcactgaaagcaatcaatacaacatctacgcggctctgcacacggagccggacctgctgttcctggagctgtccacggggaaggtgggcatgctgaagaacttaaaggagccacccgcagggccagctcagccctgggggggtacccacagaatcatgagggacagtgggctgtttggacagtacctcctcacaccagcccgagagtcactgttcctcatcaatgggagacaaaacacgctgcggtgtgaggtgtcaggtataaagggggggaccacagtggtgtgggtgggtgaggtatgaagggcccagagcagagccctgggccaaggaacaccccctagtcctgacactgcagcctcaagcaggtacgctgtacatttttacagacaaaagcaaaaacctgtactcgctttgtggttcaacactggtctccttgcaagtttcctagtataaggtatgcgctgctaccaagattggggttttttcgttaggaagtatgatttatgccttgagctacgatgagaacatatgctgctgtgtaaagggatcatttctgtgccaagctgcacaccgagtgacctggggacatcatggaaccaagggatcctgctctccaagcagacacctctgtcagttgccttcacatagtcattgtcccttactgccagacccagccagactttgccctgacggagtggcccggaagcagaggccgaccaggagcaggggcctccctcccgaactgaaagcccatccgtcctcgcgtgggaccgcatcttctccctcgcagctgcttcttgcttttctttccatttgacttgctgtaagcctgagggagagccaacaagacttactgcatcttgggggatggggaaatcactcactttattttggaaatttttgattaaaaaaaaattttataatctcaaatgctagtaagcagaaagatgctctccgaggtccaactatatccttccctgccttaggccgagtctcgggggtggtcacaaccccacatcccacagccagaaagaacaatggtcatctgagaatactggccctgtcgactattgccaccctgcttctccaagagcagaccaggccacctcatccgtaaggactcggttctgtgttgggaccccaaaaaaccagaacaagttctgtgtgcctcctttcagcacagaagggagacatctcattagtcaggtctggtaccccagattcagggcagactgggcttgcctggcaaggtatgggtggcctccaggctcaatgcagaaaccccaaggacacgagtggggccaggtgagttcctgaagctataccttttcaaaacagattttgttttcctacctgtggcccatccactcctctctggtaccccatccccgcatcagcactgcagagagaacacatttcggcgagggttttcttacccacattccccaatcaatacacacacactgcagaacccagaacagaaggccacaggctggcactactgcattctccttatgtgtctcaggctgtggtgactctcacatgggcatcgaagaagtacaacccacatagccctctggagaccgcctagatcagagactcagcaaaaacaggctcgccttccctctcccacatatgagtggaacttacatgtgtcctggtttgaatgatcattttgcaagccacacgggttgggagaggtggtctcaccacagacgtctttgctaatttggccaccttcacctactgacatgaccaggattttcctttgccattaaggaatgaactctttcaaggagaggaaaccctagactctgtgtcactctcaacacacacagctcctttcactcctgcctgactgccaagccacctgcatcccccgccccagatctcatgagatcaatcacttgtatgtctcacgcaacttggtccaccaaacgcctgtcccctgtaactcctaggggtgcgcctagacaggtacgtctgttttttattttaaaagatatgctatgtagatataagttgaggaagctcacctcaaaagcctagaatgcagtttcacagtagctgggatgcatggatgacccatctcacccctttttttttcctgcctcaatatcttgatatgttatgtttactcccaatctcccatttttaccactaaaattctccaactttcataaacttttttttggaaaaatttccattgtatcagcccctgacagaaaaaggatctctgagcctaaaggaggaaaagtcccaccaactaccagaccagaacacgagcccctctgggcagcaggattcctaagtcaaagaccagtttgacccaaactggccttttaaaataatcaggagtgacagagtcaacttctgcagcacctgcttctcccccactgtcccttccatcttggaatgtgtctaaaaaagcatagctgccctttgctgtcctcagagtgcatttcctggagacggcaggcttaggtctcactgacagcatgccagacacaactgaatcgaagcaggcctgaagcctaggtcagggtttcaggagtccagccccaggaggcaaagtcaccaatgcagggaggtaaatgccttttggcaggaaaaccaatagagttggttgggtggggagtcaggggtgggaggagaaggaggaagaggaggaaggccagactggcctgccctttctcccatacttcaccccagcagaggttcatgggacacagttggaaagccactgggaggaaatgcctcactacaggggggcctcctgtagcaagcccagccggtaatcctcctaatgaacccacaaggtcaattcacaactgatatcttagctattaaagaagtactgactttaccaaaagaatcatcaagaaagctatttatataaaccccctcagtcattttgaaataaaattaattttacaaaaa

SEQ ID NO: 7795 - DNA, 2374 bp, Homo sapiens
  source 1..2374: mol_type = unassigned DNA; mol_type = unassigned DNA
acctacttgggttcaccccctctggagcagggtctcaggttgggccacaggcccaagtccaggtcagggccgtctctttctcaccagcactgactctcacccacagtgccgccagtcatccgtgtctatccagagagccaggcacaggagcctggagtggcagccagcctaagatgccatgctgagggcattcccatgcccagaatcacttggctgaaaaacggcgtggatgtctcaactcagatgtccaaacagctctcccttttagccaatgggagcgaactccacatcagcagtgttcggtatgaagacacaggggcatacacctgcattgccaaaaatgaagtgggtgtggatgaagatatctcctcgctcttcattgaagactcagctagaaagacccttgcaaacatcctgtggcgagaggaaggaattgcatctcgtgcctgcaccagatgcatccacgtggccggtttcttgtgtgttcaatgctgcgtgtgaccctgcccaggggccgactgcttggagggcatgcccattccatttgctcctcccaggcctcagcgtgggaaacatgttctatgtcttctccgacgacggtatcatcgtcatccatcctgtggactgtgagatccagaggcacctcaaacccacggaaaagattttcatgagctatgaagaaatctgtcctcaaagagaaaaaaatgcaacccagccctgccagtgggtatctgcagtcaatgtccggaaccggtacatctatgtggcccagccagcactgagcagagtccttgtggtcgacatccaagcccagaaagtcctacagtccataggtgtggaccctctgccggctaagctgtcctatgacaagtcacatgaccaagtgtgggtcctgagctggggggacgtgcacaagtcccgaccaagtctccaggtgatcacagaagccagcaccggccagagccagcacctcatccgcacaccctttgcaggagtggatgatttcttcattcccccaacaaacctcatcatcaaccacatcaggtttggcttcatcttcaacaagtctgatcctgcagtccacaaggtggacctggaaacaatgatgcccctcaagaccatcggcctgcaccaccatggctgcgtgccccaggccatggcacacacccacctgggcggctacttcttcatccagtgccgacaggacagccccgcctctgctgcccgacagctgctcgttgacagtgtcacagactctgtgcttggccccaatggtgatgtaacaggcaccccacacacatcccccgacgggcgcttcatagtcagtgctgcagctgacagcccctggctgcacgtgcaggagatcacagtgcggggcgagatccagaccctgtatgacctgcaaataaactcgggcatctcagacttggccttccagcgctccttcactgaaagcaatcaatacaacatctacgcggctctgcacacggagccggacctgctgttcctggagctgtccacggggaaggtgggcatgctgaagaacttaaaggagccacccgcagggccagctcagccctgggggggtacccacagaatcatgagggacagtgggctgtttggacagtacctcctcacaccagcccgagagtcactgttcctcatcaatgggagacaaaacacgctgcggtgtgaggtgtcaggtataaagggggggaccacagtggtgtgggtgggtgaggtatgaagggcccagagcagagccctgggccaaggaacaccccctagtcctgacactgcagcctcaagcaggtacgctgtacatttttacagacaaaagcaaaaacctgtactcgctttgtggttcaacactggtctccttgcaagtttcctagtataaggtatgcgctgctaccaagattggggttttttcgttaggaagtatgatttatgccttgagctacgatgagaacatatgctgctgtgtaaagggatcatttctgtgccaagctgcacaccgagtgacctggggacatcatggaaccaagggatcctgctctccaagcagacacctctgtcagttgccttcacatagtcattgtcccttactgccagacccagccagactttgccctgacggagtggcccggaagcagaggccgaccaggagcaggggcctccctcccgaactgaaagcccatccgtcctcgcgtgggaccgcatcttctccctcgcagctgcttcttgcttttctttccatttgacttgctgtaagcctgagggagagccaacaagacttactgcatcttgggggatggggaaatcactcactttattttggaaatttttgattaaaaaaaaattttataatctc

SEQ ID NO: 7796 - DNA, 571 bp, Homo sapiens
  source 1..571: mol_type = unassigned DNA; mol_type = unassigned DNA
aacagaatgaggctctggggtccagaagggaggctgaagaatagtgtcaaagcaagcagcagatgttagccaatgaagaaggagaagcagcagcaattatatctcaagtctcctgtgtgagaccaggacctcttcccagcattctaaatgcaagacatctcaacagcccagcatgtcagagtggcatcccgtaggatgtctgctttctctcatcagtcctggagtcgcacctcagagaatgcctgtgagcagcatccgacagagactaccaacaaactggcccaggcatctggcaccagagaaaaatgaactcccagtagacagttccaccacgtgacattttcatgattgacagccctctcccactttccctagcctggcttacatgttgagaaggtgatcacagaagccagcaccggccagagccagcacctcatccgcacaccctttgcaggagtggatgatttcttcattcccccaacaaacctcatcatcaaccacatcaggtttggcttcatcttcaacaagtctgatcctgcagtccacaaggtggacctggaaacaatgatgc

SEQ ID NO: 7797 - DNA, 817 bp, Homo sapiens
  source 1..817: mol_type = unassigned DNA; mol_type = unassigned DNA
gatcagacgtgcagggaaaatctgattccttttgtaactaacctgactttacaagcctcaccccaatgggagaaaagcacaactaaatgctcaatccattgtaaagattagcacgagctgacgattttaacagtccacaagtggttcagctcagcctcgcccccgaggacagggtcagtgtgaccacagtgaccgtggggctgagcacagtgctgacctgcgccgtccatggagacctgaggccaccaatcatctggaagcgcaacgggctcaccctgaacttcctggacttggaagacatcaatgactttggagaggatgattccctgtacatcaccaaggtgaccaccatccacatgggcaattacacctgccatgcttccggccacgagcagctgttccagacccacgtcctgcaggtgaatgtgccgccagtcatccgtgtctatccagagagccaggcacaggagcctggagtggcagccagcctaagatgccatgctgagggcattcccatgcccagaatcacttggctgaaaaacggcgtggatgtctcaactcagatgtccaaacagctctcccttttagccaatgggagcgaactccacatcagcagtgttcggtatgaagacacaggggcatacacctgcattgccaaaaatgaagtgggtgtggatgaagatatctcctcgctcttcattgaagactcagctagaaagacccgcctcagcgtgggaaacatgttctatgtcttctccgacgacggtatcatcgtcatccatcctgtggactgtgagatccagaggcacctcaaacc

SEQ ID NO: 7798 - DNA, 488 bp, Homo sapiens
  source 1..488: mol_type = unassigned DNA; mol_type = unassigned DNA
cagaaaacaaagatctcctgttggcactcaggcttcctcctgctctaggtgacacgtgcaccatggccggctacgcccgcttgaagaatgtccttctggcactccagacccgtctgcagccactccaagaaggagacagcagacaagaccctgcctcccagaagcgcctcctggtggaatctctgttcagggacttagatgcagatggcaatggccacctcagcagctccgaactggctcagcatgtgctgaagaagcaggacctggatgaagacttacttggttgctcaccaggtgacctcctccgatttgacgattacaacagtgacagctccctgaccctccgcgagttctacatggccttccaggaaagctggtgaatttgttctgcaacaagcctgagctttaagaaaagactaaacggagagtggatggggccagagagggcttgccctgttcctttttaataaagatttttctcgctcttt

SEQ ID NO: 7799 - DNA, 716 bp, Homo sapiens
  source 1..716: mol_type = unassigned DNA; mol_type = unassigned DNA
ccctctgagccaggtgtgggatatagtctcgtggtgcgccgtttcttaagccggtctgaaaagcgcaatattcgggtgggagtgacccgattttccaggtgcgtccgtcacccctttctttgactcggaaagggaactccctggccccttgcgcttcccaggtgaggcaatgcctcgccctgcttcggctcgcgcacggtgcgcacacactggcctgcgcccactgtctggcactccctagtgagatgaacccggtacctcagatggaaatgcagaaatcacccgtcttctgcgtcgctcacgctgggagctgtagaccggagctgttcctattcggccatcttggctcctcctggggccttgatcttaaggaggaggagcccagaagctttgaagtcacaagaagagaagggctttccagccacaacgagctgctggcctcctgcgggaagaagttctgcagccgagggagccggtgcgtgctcagcaggaagacaggggagcccgaatgccagtgcctggaggcatgcaggcccagctacgtgcctgtgtgcggctctgatgggaggttttatgaaaaccactgtaagctccaccgtgctgcttgcctcctgggaaagaggatcaccgtcatccacagcaaggactgtttcctcaaaggtgacacgtgcaccatggccggctacgcccgcttgaagaatgtccttctggcactc

SEQ ID NO: 7800 - DNA, 2660 bp, Homo sapiens
  source 1..2660: mol_type = unassigned DNA; mol_type = unassigned DNA
gactcatcaaaatgaaaccaggaggcttttggctgcatctcacactgctcggagcctccctgccggctgcgctgggatggatggacccaggaaccagcagaggcccggatgtgggtgtgggggagtcacaggcagaggagcccagaagctttgaagtcacaagaagagaagggctttccagccacaacgagctgctggcctcctgcgggaagaagttctgcagccgagggagccggtgcgtgctcagcctcgcccccgaggacagggtcagtgtgaccacagtgaccgtggggctgagcacagtgctgacctgcgccgtccatggagacctgaggccaccaatcatctggaagcgcaacgggctcaccctgaacttcctggacttggaagacatcaatgactttggagaggatgattccctgtacatcaccaaggtgaccaccatccacatgggcaattacacctgccatgcttccggccacgagcagctgttccagacccacgtcctgcaggtgaatgtgccgccagtcatccgtgtctatccagagagccaggcacaggagcctggagtggcagccagcctaagatgccatgctgagggcattcccatgcccagaatcacttggctgaaaaacggcgtggatgtctcaactcagatgtccaaacagctctcccttttagccaatgggagcgaactccacatcagcagtgttcggtatgaagacacaggggcatacacctgcattgccaaaaatgaagtgggtgtggatgaagatatctcctcgctcttcattgaagactcagctagaaagacccttgcaaacatcctgtggcgagaggaaggcctcagcgtgggaaacatgttctatgtcttctccgacgacggtatcatcgtcatccatcctgtggactgtgagatccagaggcacctcaaacccacggaaaagattttcatgagctatgaagaaatctgtcctcaaagagaaaaaaatgcaacccagccctgccagtgggtatctgcagtcaatgtccggaaccggtacatctatgtggcccagccagcactgagcagagtccttgtggtcgacatccaagcccagaaagtcctacagtccataggtgtggaccctctgccggctaagctgtcctatgacaagtcacatgaccaagtgtgggtcctgagctggggggacgtgcacaagtcccgaccaagtctccaggtgatcacagaagccagcaccggccagagccagcacctcatccgcacaccctttgcaggagtggatgatttcttcattcccccaacaaacctcatcatcaaccacatcaggtttggcttcatcttcaacaagtctgatcctgcagtccacaaggtggacctggaaacaatgatgcccctcaagaccatcggcctgcaccaccatggctgcgtgccccaggccatggcacacacccacctgggcggctacttcttcatccagtgccgacaggacagccccgcctctgctgcccgacagctgctcgttgacagtgtcacagactctgtgcttggccccaatggtgatgtaacaggcaccccacacacatcccccgacgggcgcttcatagtcagtgctgcagctgacagcccctggctgcacgtgcaggagatcacagtgcggggcgagatccagaccctgtatgacctgcaaataaactcgggcatctcagacttggccttccagcgctccttcactgaaagcaatcaatacaacatctacgcggctctgcacacggagccggacctgctgttcctggagctgtccacggggaaggtgggcatgctgaagaacttaaaggagccacccgcagggccagctcagccctgggggggtacccacagaatcatgagggacagtgggctgtttggacagtacctcctcacaccagcccgagagtcactgttcctcatcaatgggagacaaaacacgctgcggtgtgaggtgtcaggtataaagggggggaccacagtggtgtgggtgggtgaggtatgaagggcccagagcagagccctgggccaaggaacaccccctagtcctgacactgcagcctcaagcaggtacgctgtacatttttacagacaaaagcaaaaacctgtactcgctttgtggttcaacactggtctccttgcaagtttcctagtataaggtatgcgctgctaccaagattggggttttttcgttaggaagtatgatttatgccttgagctacgatgagaacatatgctgctgtgtaaagggatcatttctgtgccaagctgcacaccgagtgacctggggacatcatggaaccaagggatcctgctctccaagcagacacctctgtcagttgccttcacatagtcattgtcccttactgccagacccagccagactttgccctgacggagtggcccggaagcagaggccgaccaggagcaggggcctccctcccgaactgaaagcccatccgtcctcgcgtgggaccgcatcttctccctcgcagctgcttcttgcttttctttccatttgacttgctgtaagcctgagggagagccaacaagacttactgcatcttgggggatggggaaatcactcactttattttggaaatttttgattaaaaaaaaattttataatctc

SEQ ID NO: 7801 - DNA, 4757 bp, Homo sapiens
  source 1..4757: mol_type = unassigned DNA; mol_type = unassigned DNA
gtactgtccactgtgctgtcggtgctgaacctgagacgcgagcggaccagttgctccagcacctgaaggcaacgccctcttgcaccctctgtgccctgtgggacccgcttcaccaacaggacccatatcaacttgacaaaggagtgtggtatcggacgtgggagagagtcctctgtttgccacctgggcgctcattcaggcgtgactttggagatttctatagttttagaccaaactatttttttttccccagctaagacgatcttttgagagttttttttttttattgtgatttatatttccacagcgtttaggaatctttctgggggacttttgtgactgttaaaataaggtgaaaagcaataaggatgtttaagtgctggtcagttgtcttggttctcggattcatttttctggagtcggaaggaaggccaaccaaagaaggaggatatggccttaaatcctatcagcctctaatgagattgcgacataaggaaaaaaatcaagaaagttcaagagtcaaaggatttatgattcaggatggcccttttggatcttgtgaaaataagtactgtggtttgggaagacactgtgttaccagcagagagacagggcaagcagaatgtgcctgtatggacctttgcaaacgtcactacaaacctgtgtgtggatctgacggagaattctatgaaaaccactgtgaagtgcacagagctgcttgcctgaaaaaacaaaagattaccattgttcacaatgaagactgcttctttaaaggagataagtgcaagactactgaatacagcaagatgaaaaatatgctattagatttacaaaatcaaaaatatattatgcaagaaaatgaaaatcctaatggcgacgacatatctcggaagaagctattggtggatcaaatgtttaaatattttgatgcagacagtaatggacttgtagatattaatgaactaactcaggtgataaaacaggaagaacttggcaaggatctctttgattgtactttgtatgttctattgaaatatgatgattttaatgctgacaagcacctggctcttgaagaattttatagagcattccaagtgatccagttgagtctgccagaagatcagaaactaagcatcactgcagcaactgtgggacaaagtgctgttctgagctgtgccattcaaggaaccctgagacctcccattatctggaaaaggaacaatattattctaaataatttagatttggaagacatcaatgactttggagatgatgggtccttgtatattactaaggttaccacaactcacgttggcaattacacctgctatgcagatggctatgaacaagtctatcagactcacatcttccaagtgaatgttcctccagtcatccgggtgtatccagagagtcaggctagagagcctggggtaactgccagtcttaggtgccatgcagagggcataccaaagcctcagcttggctggttgaagaatggaattgatattacaccaaagctttccaaacaactcacgcttcaagcaaatggcagtgaggttcacataagcaatgtgcgctatgaagatactggagcatacacttgtatcgcaaagaatgaagcaggagtggatgaagacatctcttctctttttgtggaagactctgctagaaagaccctagctaacatattatggagagaagaaggtctgggaattgggaacatgttctatgttttttatgaagatggaatcaaagtgatacaacccatagaatgtgaatttcagaggcacattaagcctagtgaaaagctccttggatttcaggatgaagtctgtcccaaagctgagggagatgaagttcagaggtgtgtgtgggcatcagctgttaatgtcaaagacaagttcatttatgttgcacagccaactttggacagagtccttattgttgatgtgcagtcccaaaaagttgttcaggcagtgagcacagaccctgtcccagttaaattacactatgacaaatcacatgatcaggtctgggtgctaagctggggtaccttggagaagacatcaccaacactacaggtaattaccctggccagtgggaatgtgcctcaccacacgatccacacccaaccagtgggaaagcaatttgacagagtggatgattttttcattcccaccacaacactcattatcacccatatgaggtttggatttattcttcataaagatgaagctgcactacaaaaaattgatcttgaaaccatgtcatacatcaagacaattaacttgaaggactataagtgcgttcctcagtcattggcatatacacacttgggaggctactacttcattggctgcaaacctgacagcaccggagcagtttccccacaggtcatggtggacggtgtaactgactcagtcattgggttcaatagtgatgtgacgggcactccatatgtctctccagatggccactaccttgtcagcattaatgatgtgaaaggtcttgtaagggttcagtacattaccatcagaggagaaatacaggaggcttttgatatttacacaaatctgcacatatctgatctggcatttcaaccatcctttactgaagcccaccaatataacatctacggtagttcaagcacacaaactgatgtgctctttgtggagctctcttctgggaaggtcaagatgataaagagtctcaaggaaccactcaaggcagaagaatggccttggaaccggaaaaacaggcaaatccaggacagtggcttgtttggtcaatacctgatgacaccttccaaggactctctcttcatcctagatggacgactcaataaattaaactgtgagatcactgaagttgaaaaaggaaatacagtcatttgggttggagatgcctaaaaaccctacgatacaattattgaatgaagcgttttacaatacattgcacttaatccattgtttaaatttacaacttaactttccaagtttatatcctagtcaaacaaaatttacttggttggtccaaataaaataaattgtttttgactaagtgactaagacatacacaattaattatattggttaattagaaatactcagcacaatatttaatgagaaatcacatcagtcacaagaatcaaatatgtaaattatgctttaaacaataaagtaggatttaaatcatttaaaaaactaaactgcagggaatttcagatgacataaagcattatttcattttgagggtagtttattttttttctctgtccttttggtatgattaaacaagaaataaaaggtgttgtggaaacttaaaattcttaattcaaaatattcggtcctgtccactgtttataatattttgtgccttgaagggaatgtcacaggaggaaaaggaagactaaagcctgcatactaaatgctctcataactataaatctcttgttgttaaaaaacatctcttgcaccaaatcctgtcttcagtcttttgtttaaccctcaatgaactaccaattgaaggcataagttggtcttaggttgtatacaggtgtcaaactccacttgacatttactgtataatctgcagcatgctatagaaagtggggaggaagggaggaaaaataattacagtcaaaatatttgcaatctatctactcattttgctttcaatcactagagtgcattatgtttttaatgcaagtttgtctgggatgtcaactgcctacagatgtttattactagcagaatagattatttattaatagattgtttcttttcatatagtccaatgtttcatcatcaggaactttcggttttaaaaaagaaacattacttttgtctgctaaagtaaaccatatatagggaaattaacacctaggaaaagaaaactggcaagagaattgatgaggtattagtggcttagaagaattagtaatataagttgggaataaaggggtagcccgacagtggtaagtaaaaatgtagtactccattgtttttgctatttaaatataatgtatcaaaaacctttattctaaaatttccacaaatgattccttttatccatcttcttgtaatcctaaaagcatcttctcactatgtgctgtagtttgaaacctaacgaatcctcctacttgagacactgtagaaaagtaaaaattgttgcttctgttttgttttaagaggaaatgagaaggccagcagaagtagattaaaactagagagctggtttattaaaataagcagataattatccaggcttaaagtaatagcttacatgttttgaaaatccttgtacttatttttgtttttattgttgcaaaaaaatgttaatgggctgttgaaatgacctccatttacttaaggtaatccaataaggtcttttttaaatatacaaattttactcaagtttaaattgtataaaactgcttagaaacctgaaattttatagtgtgtaatatcttatgtgtatatagcatcctgagctgtgtgatacagtagatttcttcttagcagaaacatgcgaggtagatttaataaacaacaaaaatcagcttatgtttctacttattgaatctgctttactttttagcaattttcttccttgtgaacatgaaccatataaagtgtctgtgacttaatgatttcatgtaagtctgtcgcatacatccttcttttgtagcttacaccatgtggatgctctgtctgtagacactgcttgataaaaggagaataaacctcttacatttt

SEQ ID NO: 7802 - DNA, 2920 bp, Homo sapiens
  source 1..2920: mol_type = unassigned DNA; mol_type = unassigned DNA
gttcagtgactgagacaaactggaggtgaaaggagctggtactgtccactgtgctgtcggtgctgaacctgagacgcgagcggaccagttgctccagcacctgaaggcaacgccctcttgcaccctctgtgccctgtgggacccgcttcaccaacaggacccatatcaacttgacaaaggagtgtggtatcggacgtgggagagagtcctctgtttgccacctgggcgctcattcaggcgtgactttggagatttctatagttttagaccaaactatttttttttccccagctaagacgatcttttgagagttttttttttttattgtgatttatatttccacagcgtttaggaatctttctgggggacttttgtgactgttaaaataaggtgaaaagcaataaggatgtttaagtgctggtcagttgtcttggttctcggattcatttttctggagtcggaaggaaggccaaccaaagaaggaggatatggccttaaatcctatcagcctctaatgagattgcgacataaggaaaaaaatcaagaaagttcaagagtcaaaggatttatgattcaggatggcccttttggatcttgtgaaaataagtactgtggtttgggaagacactgtgttaccagcagagagacagggcaagcagaatgtgcctgtatggacctttgcaaacgtcactacaaacctgtgtgtggatctgacggagaattctatgaaaaccactgtgaagtgcacagagctgcttgcctgaaaaaacaaaagattaccattgttcacaatgaagactgcttctttaaaggagataagtgcaagactactgaatacagcaagatgaaaaatatgctattagatttacaaaatcaaaaatatattatgcaagaaaatgaaaatcctaatggcgacgacatatctcggaagaagctattggtggatcaaatgtttaaatattttgatgcagacagtaatggacttgtagatattaatgaactaactcaggtgataaaacaggaagaacttggcaaggatctctttgattgtactttgtatgttctattgaaatatgatgattttaatgctgacaagcacctggctcttgaagaattttatagagcattccaagtgatccagttgagtctgccagaagatcagaaactaagcatcactgcagcaactgtgggacaaagtgctgttctgagctgtgccattcaaggaaccctgagacctcccattatctggaaaaggaacaatattattctaaataatttagatttggaagacatcaatgactttggagatgatgggtccttgtatattactaaggttaccacaactcacgttggcaattacacctgctatgcagatggctatgaacaagtctatcagactcacatcttccaagtgaatgttcctccagtcatccgggtgtatccagagagtcaggctagagagcctggggtaactgccagtcttaggtgccatgcagagggcataccaaagcctcagcttggctggttgaagaatggaattgatattacaccaaagctttccaaacaactcacgcttcaagcaaatggcagtgaggttcacataagcaatgtgcgctatgaagatactggagcatacacttgtatcgcaaagaatgaagcaggagtggatgaagacatctcttctctttttgtggaagactctgctagaaagacccgtctgggaattgggaacatgttctatgttttttatgaagatggaatcaaagtgatacaacccatagaatgtgaatttcagaggcacattaagcctagtgaaaagctccttggatttcaggatgaagtctgtcccaaagctgagggagatgaagttcagaggtgtgtgtgggcatcagctgttaatgtcaaagacaagttcatttatgttgcacagccaactttggacagagtccttattgttgatgtgcagtcccaaaaagttgttcaggcagtgagcacagaccctgtcccagttaaattacactatgacaaatcacatgatcaggtctgggtgctaagctggggtaccttggagaagacatcaccaacactacaggtaattaccctggccagtgggaatgtgcctcaccacacgatccacacccaaccagtgggaaagcaatttgacagagtggatgattttttcattcccaccacaacactcattatcacccatatgaggtttggatttattcttcataaagatgaagctgcactacaaaaaattgatcttgaaaccatgtcatacatcaagacaattaacttgaaggactataagtgcgttcctcagtcattggcatatacacacttgggaggctactacttcattggctgcaaacctgacagcaccggagcagtttccccacaggtcatggtggacggtgtaactgactcagtcattgggttcaatagtgatgtgacgggcactccatatgtctctccagatggccactaccttgtcagcattaatgatgtgaaaggtcttgtaagggttcagtacattaccatcagaggagaaatacaggaggcttttgatatttacacaaatctgcacatatctgatctggcatttcaaccatcctttactgaagcccaccaatataacatctacggtagttcaagcacacaaactgatgtgctctttgtggagctctcttctgggaaggtcaagatgataaagagtctcaaggaaccactcaaggcagaagaatggccttggaaccggaaaaacaggcaaatccaggacagtggcttgtttggtcaatacctgatgacaccttccaaggactctctcttcatcctagatggacgactcaataaattaaactgtgagatcactgaagttgaaaaaggaaatacagtcatttgggttggagatgcctaa

SEQ ID NO: 7803 - DNA, 404 bp, Homo sapiens
  source 1..404: mol_type = unassigned DNA; mol_type = unassigned DNA
ccatagaatgtgaatttcagaggcacattaagcctagtgaaaagctccttggatttcagttgtacacatgatttcatcttgtcacctggagtatgaacttcaagcaaatagaattctatttcagacttatggattcagaagtcaaactgaaaaggagtttggaaaaatgtttaaaattacaggctcaaaaacaagctttcccaagattaccaactttgtcactcttctggttttctactactgttccatccttatctatcactcttttattctttgatacttttacattcagccaccttctttgcttgttatagatctagctgctgcttttcacatatgccatggtattacttattatttaatgggtcctaaaataactttaaagaaaaccacgtgtcttatta

SEQ ID NO: 7804 - DNA, 558 bp, Homo sapiens
  source 1..558: mol_type = unassigned DNA; mol_type = unassigned DNA
cttcttcctcattttctcttgcgctgccatgtaagaactgcctttcacctcccacaatgattctgaggcctccccagacatgtggaattaagtgatccagttgagtctgccagaagatcagaaactaagcatcactgcagcaactgtgggacaaagtgctgttctgagctgtgccattcaaggaaccctgagacctcccattatctggaaaaggaacaatattattctaaataatttagatttggaagacatcaatgactttggagatgatgggtccttgtatattactaaggttaccacaactcacgttggcaattacacctgctatgcagatggctatgaacaagtctatcagactcacatcttccaagtgaatgtacatcaataaagtagaagtagcttggaatgcaggaggaaattgaacatctcatctaaaaagttttcctttggggagtatcagtgaccatttcctccagtcatccgggtgtatccagagagtcaggctagagagcctggggtaactgccagtcttaggtgccatgcagagggcataccaaa

SEQ ID NO: 7805 - DNA, 4831 bp, Homo sapiens
  source 1..4831: mol_type = unassigned DNA; mol_type = unassigned DNA
tgcctagggaggaggagcgagaatcagcctggttcagtgactgagacaaactggaggtgaaaggagctggtactgtccactgtgctgtcggtgctgaacctgagacgcgagcggaccagttgctccagcacctgaaggcaacgccctcttgcaccctctgtgccctgtgggacccgcttcaccaacaggacccatatcaacttgacaaaggagtgtggtatcggacgtgggagagagtcctctgtttgccacctgggcgctcattcaggcgtgactttggagatttctatagttttagaccaaactatttttttttccccagctaagacgatcttttgagagttttttttttttattgtgatttatatttccacagcgtttaggaatctttctgggggacttttgtgactgttaaaataaggtgaaaagcaataaggatgtttaagtgctggtcagttgtcttggttctcggattcatttttctggagtcggaaggaaggccaaccaaagaaggaggatatggccttaaatcctatcagcctctaatgagattgcgacataagcaggaaaaaaatcaagaaagttcaagagtcaaaggatttatgattcaggatggcccttttggatcttgtgaaaataagtactgtggtttgggaagacactgtgttaccagcagagagacagggcaagcagaatgtgcctgtatggacctttgcaaacgtcactacaaacctgtgtgtggatctgacggagaattctatgaaaaccactgtgaagtgcacagagctgcttgcctgaaaaaacaaaagattaccattgttcacaatgaagactgcttctttaaaggagataagtgcaagactactgaatacagcaagatgaaaaatatgctattagatttacaaaatcaaaaatatattatgcaagaaaatgaaaatcctaatggcgacgacatatctcggaagaagctattggtggatcaaatgtttaaatattttgatgcagacagtaatggacttgtagatattaatgaactaactcaggtgataaaacaggaagaacttggcaaggatctctttgattgtactttgtatgttctattgaaatatgatgattttaatgctgacaagcacctggctcttgaagaattttatagagcattccaagtgatccagttgagtctgccagaagatcagaaactaagcatcactgcagcaactgtgggacaaagtgctgttctgagctgtgccattcaaggaaccctgagacctcccattatctggaaaaggaacaatattattctaaataatttagatttggaagacatcaatgactttggagatgatgggtccttgtatattactaaggttaccacaactcacgttggcaattacacctgctatgcagatggctatgaacaagtctatcagactcacatcttccaagtgaatgttcctccagtcatccgggtgtatccagagagtcaggctagagagcctggggtaactgccagtcttaggtgccatgcagagggcataccaaagcctcagcttggctggttgaagaatggaattgatattacaccaaagctttccaaacaactcacgcttcaagcaaatggcagtgaggttcacataagcaatgtgcgctatgaagatactggagcatacacttgtatcgcaaagaatgaagcaggagtggatgaagacatctcttctctttttgtggaagactctgctagaaagaccctagctaacatattatggagagaagaaggtctgggaattgggaacatgttctatgttttttatgaagatggaatcaaagtgatacaacccatagaatgtgaatttcagaggcacattaagcctagtgaaaagctccttggatttcaggatgaagtctgtcccaaagctgagggagatgaagttcagaggtgtgtgtgggcatcagctgttaatgtcaaagacaagttcatttatgttgcacagccaactttggacagagtccttattgttgatgtgcagtcccaaaaagttgttcaggcagtgagcacagaccctgtcccagttaaattacactatgacaaatcacatgatcaggtctgggtgctaagctggggtaccttggagaagacatcaccaacactacaggtaattaccctggccagtgggaatgtgcctcaccacacgatccacacccaaccagtgggaaagcaatttgacagagtggatgattttttcattcccaccacaacactcattatcacccatatgaggtttggatttattcttcataaagatgaagctgcactacaaaaaattgatcttgaaaccatgtcatacatcaagacaattaacttgaaggactataagtgcgttcctcagtcattggcatatacacacttgggaggctactacttcattggctgcaaacctgacagcaccggagcagtttccccacaggtcatggtggacggtgtaactgactcagtcattgggttcaatagtgatgtgacgggcactccatatgtctctccagatggccactaccttgtcagcattaatgatgtgaaaggtcttgtaagggttcagtacattaccatcagaggagaaatacaggaggcttttgatatttacacaaatctgcacatatctgatctggcatttcaaccatcctttactgaagcccaccaatataacatctacggtagttcaagcacacaaactgatgtgctctttgtggagctctcttctgggaaggtcaagatgataaagagtctcaaggaaccactcaaggcagaagaatggccttggaaccggaaaaacaggcaaatccaggacagtggcttgtttggtcaatacctgatgacaccttccaaggactctctcttcatcctagatggacgactcaataaattaaactgtgagatcactgaagttgaaaaaggaaatacagtcatttgggttggagatgcctaaaaaccctacgatacaattattgaatgaagcgttttacaatacattgcacttaatccattgtttaaatttacaacttaactttccaagtttatatcctagtcaaacaaaatttacttggttggtccaaataaaataaattgtttttgactaagtgactaagacatacacaattaattatattggttaattagaaatactcagcacaatatttaatgagaaatcacatcagtcacaagaatcaaatatgtaaattatgctttaaacaataaagtaggatttaaatcatttaaaaaactaaactgcagggaatttcagatgacataaagcattatttcattttgagggtagtttattttttttctctgtccttttggtatgattaaacaagaaataaaaggtgttgtggaaacttaaaattcttaattcaaaatattcggtcctgtccactgtttataatattttgtgccttgaagggaatgtcacaggaggaaaaggaagactaaagcctgcatactaaatgctctcataactataaatctcttgttgttaaaaaacatctcttgcaccaaatcctgtcttcagtcttttgtttaaccctcaatgaactaccaattgaaggcataagttggtcttaggttgtatacaggtgtcaaactccacttgacatttactgtataatctgcagcatgctatagaaagtggggaggaagggaggaaaaataattacagtcaaaatatttgcaatctatctactcattttgctttcaatcactagagtgcattatgtttttaatgcaagtttgtctgggatgtcaactgcctacagatgtttattactagcagaatagattatttattaatagattgtttcttttcatatagtccaatgtttcatcatcaggaactttcggttttaaaaaagaaacattacttttgtctgctaaagtaaaccatatatagggaaattaacacctaggaaaagaaaactggcaagagaattgatgaggtattagtggcttagaagaattagtaatataagttgggaataaaggggtagcccgacagtggtaagtaaaaatgtagtactccattgtttttgctatttaaatataatgtatcaaaaacctttattctaaaatttccacaaatgattccttttatccatcttcttgtaatcctaaaagcatcttctcactatgtgctgtagtttgaaacctaacgaatcctcctacttgagacactgtagaaaagtaaaaattgttgcttctgttttgttttaagaggaaatgagaaggccagcagaagtagattaaaactagagagctggtttattaaaataagcagataattatccaggcttaaagtaatagcttacatgttttgaaaatccttgtacttatttttgtttttattgttgcaaaaaaatgttaatgggctgttgaaatgacctccatttacttaaggtaatccaataaggtcttttttaaatatacaaattttactcaagtttaaattgtataaaactgcttagaaacctgaaattttatagtgtgtaatatcttatgtgtatatagcatcctgagctgtgtgatacagtagatttcttcttagcagaaacatgcgaggtagatttaataaacaacaaaaatcagcttatgtttctacttattgaatctgctttactttttagcaattttcttccttgtgaacatgaaccatataaagtgtctgtgacttaatgatttcatgtaagtctgtcgcatacatccttcttttgtagcttacaccatgtggatgctctgtctgtagacactgcttgataaaaggagaataaacctcttacattttaa

SEQ ID NO: 7806 - DNA, 530 bp, Homo sapiens
  source 1..530: mol_type = unassigned DNA; mol_type = unassigned DNA
agacgttcttcgccgagagtcgtcggggtttcctgcttcaacagtgcttggacggaacccggcgctcgttccccaccccggccggccgcccatagccagccctccgtcacctcttcaccgcaccctcggactgccccaaggcccccgccgccgctccagcgccgcgcagccaccgccgccgccgccgcctctccttagtcgccgccatgacgaccgcgtccacctcgcaggtgcgccagaactaccaccaggactcagaggccgccatcaaccgccagatcaacctggagctctacgcctcctacgtttacctgtccatggtcctggtgcatctcatccacagccaacagggacacctggtcaccagggacagaagaagtcccacagaaagatcatcccaggcaggaccttgtatgtgcctgatgacttggaggaatctctccctctctctggacctcagtttccctgcctgtgaaatggggagatgggtgcctgcctgcagcctcaaagattgaggtgagaatcctgtg

SEQ ID NO: 7807 - DNA, 507 bp, Homo sapiens
  source 1..507: mol_type = unassigned DNA; mol_type = unassigned DNA
agacgttcttcgccgagagtcgtcggggtttcctgcttcaacagtgcttggacggaacccggcgctcgttccccaccccggccggccgcccatagccagccctccgtcacctcttcaccgcaccctcggactgccccaaggcccccgccgccgctccagcgccgcgcagccaccgccgccgccgccgcctctccttagtcgccgccatgacgaccgcgtccacctcgcaggtgcgccagaactaccaccaggactcagaggccgccatcaaccgccagatcaacctggagctctacgcctcctacgtttacctgtccatgccaacagggacacctggtcaccagggacagaagaagtcccacagaaagatcatcccaggcaggaccttgtatgtgcctgatgacttggaggaatctctccctctctctggacctcagtttccctgcctgtgaaatggggagatgggtgcctgcctgcagcctcaaagattgaggtgagaatcctgtg

SEQ ID NO: 7808 - DNA, 550 bp, Homo sapiens
  source 1..550: mol_type = unassigned DNA; mol_type = unassigned DNA
agacgttcttcgccgagagtcgtcggggtttcctgcttcaacagtgcttggacggaacccggcgctcgttccccaccccggccggccgcccatagccagccctccgtcacctcttcaccgcaccctcggactgccccaaggcccccgccgccgctccagcgccgcgcagccaccgccgccgccgccgcctctccttagtcgccgccatgacgaccgcgtccacctcgcaggtgcgccagaactaccaccaggactcagaggccgccatcaaccgccagatcaacctggagctctacgcctcctacgtttacctgtccatgtcttactactttgaccgcgatgatgtggctttgaagaactttgccaaatactttcttcaccaatctcatgaggagagggaacatgctgagaaactgatgaagctgcagaaccaacgaggtggccgaatcttccttcaggatatcaagccaacagggacacctggtcaccagggacagaagaagtcccacagaaagatcatcccaggcaggaccttgtatgtgcctgatga

SEQ ID NO: 7809 - DNA, 1229 bp, Homo sapiens
  source 1..1229: mol_type = unassigned DNA; mol_type = unassigned DNA
ataagagaccacaagcgacccgcagggccagacgttcttcgccgagagtcgtcggggtttcctgcttcaacagtgcttggacggaacccggcgctcgttccccaccccggccggccgcccatagccagccctccgtcacctcttcaccgcaccctcggactgccccaaggcccccgccgccgctccagcgccgcgcagccaccgccgccgccgccgcctctccttagtcgccgccatgacgaccgcgtccacctcgcaggtgcgccagaactaccaccaggactcagaggccgccatcaaccgccagatcaacctggagctctacgcctcctacgtttacctgtccatgtcttactactttgaccgcgatgatgtggctttgaagaactttgccaaatactttcttcaccaatctcatgaggagagggaacatgctgagaaactgatgaagctgcagaaccaacgaggtggccgaatcttccttcaggatatcaagaaaccagactgtgatgactgggagagcgggctgaatgcaatggagtgtgcattacatttggaaaaaaatgtgaatcagtcactactggaactgcacaaactggccactgacaaaaatgacccccatttgtgtgacttcattgagacacattacctgaatgagcaggtgaaagccatcaaagaattgggtgaccacgtgaccaacttgcgcaagatgggagcgcccgaatctggcttggcggaatatctctttgacaagcacaccctgggagacagtgataatgaaagctaagcctcgggctaatttccccatagccgtggggtgacttccctggtcaccaaggcagtgcatgcatgttggggtttcctttaccttttctataagttgtaccaaaacatccacttaagttctttgatttgtaccattccttcaaataaagaaatttggtacccaggtgttgtctttgaggtcttgggatgaatcagaaatctatccaggctatcttccagattccttaagtgccgttgttcagttctaatcacactaatcaaaaagaaacgagtatttgtatttattaaactcattagtttgggcagtatactaaggtgtggctgtcttggattcagatagaactaagggttcccgactctgaatccagagtctgagttaaatgtttccaatggttcagtctagctttcacagtttttatgaataaaaggcattaaaggctgaa

SEQ ID NO: 7810 - DNA, 912 bp, Homo sapiens
  source 1..912: mol_type = unassigned DNA; mol_type = unassigned DNA
agacgttcttcgccgagagtcgtcggggtttcctgcttcaacagtgcttggacggaacccggcgctcgttccccaccccggccggccgcccatagccagccctccgtcacctcttcaccgcaccctcggactgccccaaggcccccgccgccgctccagcgccgcgcagccaccgccgccgccgccgcctctccttagtcgccgccatgacgaccgcgtccacctcgcaggtgcgccagaactaccaccaggactcagaggccgccatcaaccgccagatcaacctggagctctacgcctcctacgtttacctgtccatgtcttactactttgaccgcgatgatgtggctttgaagaactttgccaaatactttcttcaccaatctcatgaggagagggaacatgctgagaaactgatgaagctgcagaaccaacgaggtggccgaatcttccttcaggatatcaagactgtgatgactgggagagcgggctgaatgcaatggagtgtgcattacatttggaaaaaaatgtgaatcagtcactactggaactgcacaaactggccactgacaaaaatgacccccatttgtgtgacttcattgagacacattacctgaatgagcaggtgaaagccatcaaagaattgggtgaccacgtgaccaacttgcgcaagatgggagcgcccgaatctggcttggcggaatatctctttgacaagcacaccctgggagacagtgataatgaaagctaagcctcgggctaatttccccatagccgtggggtgacttccctggtcaccaaggcagtgcatgcatgttggggtttcctttaccttttctataagttgtaccaaaacatccacttaagttctttgatttgtaccattccttcaaataaagaaatttggtaccc

SEQ ID NO: 7811 - DNA, 983 bp, Homo sapiens
  source 1..983: mol_type = unassigned DNA; mol_type = unassigned DNA
ccagacgttcttcgccgagagtcgtcggggtttcctgcttcaacagtgcttggacggaacccggcgctcgttccccaccccggccggccgcccatagccagccctccgtcacctcttcaccgcaccctcggactgccccaaggcccccgccgccgctccagcgccgcgcagccaccgccgccgccgccgcctctccttagtcgccgccatgacgaccgcgtccacctcgcaggtgcgccagaactaccaccaggactcagaggccgccatcaaccgccagatcaacctggagctctacgcctcctacgtttacctgtccatgatcgtcacagctacctgtctctggggatccctagtataacacattcagtgttcccctttcagtcttactactttgaccgcgatgatgtggctttgaagaactttgccaaatactttcttcaccaatctcatgaggagagggaacatgctgagaaactgatgaagctgcagaaccaacgaggtggccgaatcttccttcaggatatcaagaaaccagactgtgatgactgggagagcgggctgaatgcaatggagtgtgcattacatttggaaaaaaatgtgaatcagtcactactggaactgcacaaactggccactgacaaaaatgacccccatttgtgtgacttcattgagacacattacctgaatgagcaggtgaaagccatcaaagaattgggtgaccacgtgaccaacttgcgcaagatgggagcgcccgaatctggcttggcggaatatctctttgacaagcacaccctgggagacagtgataatgaaagctaagcctcgggctaatttccccatagccgtggggtgacttccctggtcaccaaggcagtgcatgcatgttggggtttcctttaccttttctataagttgtaccaaaacatccacttaagttctttgatttgtaccattccttcaaataaagaaatttggtaccc

SEQ ID NO: 7812 - DNA, 786 bp, Homo sapiens
  source 1..786: mol_type = unassigned DNA; mol_type = unassigned DNA
ggggtttcctgcttcaacagtgcttggacggaacccggcgctcgttccccaccccggccggccgcccatagccagccctccgtcacctcttcaccgcaccctcggactgccccaaggcccccgccgccgctccagcgccgcgcagccaccgccgccgccgccgcctctccttagtcgccgccatgacgaccgcgtccacctcgcagtcttactactttgaccgcgatgatgtggctttgaagaactttgccaaatactttcttcaccaatctcatgaggagagggaacatgctgagaaactgatgaagctgcagaaccaacgaggtggccgaatcttccttcaggatatcaagaaaccagactgtgatgactgggagagcgggctgaatgcaatggagtgtgcattacatttggaaaaaaatgtgaatcagtcactactggaactgcacaaactggccactgacaaaaatgacccccatttgtgtgacttcattgagacacattacctgaatgagcaggtgaaagccatcaaagaattgggtgaccacgtgaccaacttgcgcaagatgggagcgcccgaatctggcttggcggaatatctctttgacaagcacaccctgggagacagtgataatgaaagctaagcctcgggctaatttccccatagccgtggggtgacttccctggtcaccaaggcagtgcatgcatgttggggtttcctttaccttttctataagttgtaccaaaacatccacttaagttctttgatttgtaccattccttcaa

SEQ ID NO: 7813 - DNA, 742 bp, Homo sapiens
  source 1..742: mol_type = unassigned DNA; mol_type = unassigned DNA
ggacttctctggcgcagaaagtcggggcagctggttcttctcggctgtaccctgagaatgctccctcctaggccagggccgcctctgcacacccttcttttttaaggagaccttggtgtcctgaaatcctggggttgcaagactgccagcctgtgtgatcaatcctgcggttaggaagtcttactactttgaccgcgatgatgtggctttgaagaactttgccaaatactttcttcaccaatctcatgaggagagggaacatgctgagaaactgatgaagctgcagaaccaacgaggtggccgaatcttccttcaggatatcaagaaaccagactgtgatgactgggagagcgggctgaatgcaatggagtgtgcattacatttggaaaaaaatgtgaatcagtcactactggaactgcacaaactggccactgacaaaaatgacccccatttgtgtgacttcattgagacacattacctgaatgagcaggtgaaagccatcaaagaattgggtgaccacgtgaccaacttgcgcaagatgggagcgcccgaatctggcttggcggaatatctctttgacaagcacaccctgggagacagtgataatgaaagctaagcctcgggctaatttccccatagccgtggggtgacttccctggtcaccaaggcagtgcatgcatgttggggtttcctttaccttttctataagttgtaccaaaacatccacttaagttctttgatt

SEQ ID NO: 7814 - DNA, 788 bp, Homo sapiens
  source 1..788: mol_type = unassigned DNA; mol_type = unassigned DNA
gcttggacggaacccggcgctcgttccccaccccggccggccgcccatagccagccctccgtcacctcttcaccgcaccctcggactgccccaaggcccccgccgccgctccagcgccgcgcagccaccgccgccgccgccgcctctccttagtcgccgccatgacgaccgcgtccacctcgcaggtgcgccagaactaccaccaggactcagaggccgccatcaaccgccagatcaacctggagctctacgcctcctacgtttacctgtccatgtcttactactttgaccgcgatgatgtggctttgaagaactttgccaaatactttcttcaccaatctcatgaggagagggaacatgctgagaaactgatgaagctgcagaaccaacgaggtggccgaatcttccttcaggatatcaagaaaccagactgtgatgactgggagagcgggctgaatgcaatggagtgtgcattacatttggaaaaaaatgtgaatcagtcactactggaactgcacaaactggccactgacaaaaatgacccccatgtgagtattggaaccccaggaaataaatggaggaaatcatttgccttagggattgggaaagctgcccactaactgtcttccccattgttttgcagttgtgtgacttcattgagacacattacctgaatgagcaggtgaaagccatcaaagaattgggtgaccacgtgaccaacttgcgcaagatgggagcgcccgaatctggcttggcggaatatctctttgacaagcacaccctgggag

SEQ ID NO: 7815 - DNA, 885 bp, Homo sapiens
  source 1..885: mol_type = unassigned DNA; mol_type = unassigned DNA
gtcgtcggggtttcctgcttcaacagtgcttggacggaacccggcgctcgttccccaccccggccggccgcccatagccagccctccgtcacctcttcaccgcaccctcggactgccccaaggcccccgccgccgctccagcgccgcgcagccaccgccgccgccgccgcctctccttagtcgccgccatgacgaccgcgtccacctcgcaggtgcgccagaactaccaccaggactcagaggccgccatcaaccgccagatcaacctggagctctacgcctcctacgtttacctgtccatgtcttactactttgaccgcgatgatgtggctttgaagaactttgccaaatactttcttcaccaatctcatgaggagagggaacatgctgagaaactgatgaagctgcagaaccaacgaggtggccgaatcttccttcaggatatcaaggtgaacaaaagatcctaggggtgtcatacttcatcatctggcagtgttcgggtatcagaaatcacttaaactagcaattgcccttataaagtgatgatacactgggcttttgccttttgtgcttttttaggcttaccatctaaactaaattaggcaaatagtaatgtcccttttgccaaaacgtggtggttagagatgatgggcttgctgacttctaggttagttggtagagatgcattaacctattctcattcagaaaccagactgtgatgactgggagagcgggctgaatgcaatggagtgtgcattacatttggaaaaaaatgtgaatcagtcactactggaactgcacaaactggccactgacaaaaatgacccccatttgtgtgacttcattgagacacattacctgaatgagcaggtgaaagccatcaaa

SEQ ID NO: 7816 - DNA, 567 bp, Homo sapiens
  source 1..567: mol_type = unassigned DNA; mol_type = unassigned DNA
agacgttcttcgccgagagtcgtcggggtttcctgcttcaacagtgcttggacggaacccggcgctcgttccccaccccggccggccgcccatagccagccctccgtcacctcttcaccgcaccctcggactgccccaaggcccccgccgccgctccagcgccgcgcagccaccgccgccatcaaccgccagatcaacctggagctctacgcctcctacgtttacctgtccatgatcgtcacagctacctgtctctggggatccctagtataacacattcagtgttcccctttcagtcttactactttgaccgcgatgatgtggctttgaagaactttgccaaatactttcttcaccaatctcatgaggagagggaacatgctgagaaactgatgaagctgcagaaccaacgaggtggccgaatcttccttcaggatatcaagaaaccagactgtgatgactgggagagcgggctgaatgcaatggagtgtgcattacatttggaaaaaaatgtgaatcagtcactactggaactgcacaaactggccactgacaaaaatgaccccc

SEQ ID NO: 7817 - DNA, 825 bp, Homo sapiens
  source 1..825: mol_type = unassigned DNA; mol_type = unassigned DNA
agacgttcttcgccgagagtcgtcggggtttcctgcttcaacagtgcttggacggaacccggcgctcgttccccaccccggccgccgccgccgcctctccttagtcgccgccatgacgaccgcgtccacctcgcaggtgcgccagaactaccaccaggactcagaggccgccatcaaccgccagatcaacctggagctctacgcctcctacgtttacctgtccatgtcttactactttgaccgcgatgatgtggctttgaagaactttgccaaatactttcttcaccaatctcatgaggagagggaacatgctgagaaactgatgaagctgcagaaccaacgaggtggccgaatcttccttcaggatatcaagaaaccagactgtgatgactgggagagcgggctgaatgcaatggagtgtgcattacatttggaaaaaaatgtgaatcagtcactactggaactgcacaaactggccactgacaaaaatgacccccatttgtgtgacttcattgagacacattacctgaatgagcaggtgaaagccatcaaagaattgggtgaccacgtgaccaacttgcgcaagatgggagcgcccgaatctggcttggcggaatatctctttgacaagcacaccctgggagacagtgataatgaaagctaagcctcgggctaatttccccatagccgtggggtgacttccctggtcaccaaggcagtgcatgcatgttggggtttcctttaccttttctataagttgtaccaaaacatccacttaagttctttgatttgtaccattccttcaaataaagaaatttggtaccc

SEQ ID NO: 7818 - DNA, 878 bp, Homo sapiens
  source 1..878: mol_type = unassigned DNA; mol_type = unassigned DNA
gtcccctcgcagttcggcggtcccgcgggtctgtctcttgcttcaacagtgtttggacggaacagatccggggactctcttccagcctccgaccgccctccgatttcctctccgcttgcaacctccgggaccatcttctcggccatctcctgcttctgggacctgccagcaccgtttttgtggttagctccttcttgccaaccaaccatgagctcccagattcgtcagaattattccaccgacgtggaggcagccgtcaacagcctggtcaatttgtacctgcaggcctcctacacctacctctctctgggcttctatttcgaccgcgatgatgtggctctggaaggcgtgagccacttcttccgcgaattggccgaggagaagcgcgagggctacgagcgtctcctgaagatgcaaaaccagcgtggcggccgcgctctcttccaggacatcaagaagccagctgaagatgagtggggtaaaaccccagacgccatgaaagctgccatggccctggagaaaaagctgaaccaggcccttttggatcttcatgccctgggttctgcccgcacggacccccatctctgtgacttcctggagactcacttcctagatgaggaagtgaagcttatcaagaagatgggtgaccacctgaccaacctccacaggctgggtggcccggaggctgggctgggcgagtatctcttcgaaaggctcactctcaagcacgactaagagccttctgagcccagcgacttctgaagggccccttgcaaagtaatagggcttctgcctaagcctctccctccagccaataggcagctttcttaactatcctaacaagccttggaccaaatggaaataaagctttttgatgc

SEQ ID NO: 7819 - DNA, 592 bp, Homo sapiens
  source 1..592: mol_type = unassigned DNA; mol_type = unassigned DNA
ctgggccagggggtccaaagtgctcagcccccggggcacagcaggacgtttgggggccttctttcagcaggggacagcccgattggggacaatggcgtctcttggccacatcttggttttctgtgtgggtctcctcaccatggccaaggcagaaagtccaaaggaacacgacccgttcacttacgactaccagtccctgcagatcggaggcctcgtcatcgccgggatcctcttcatcctgggcatcctcatcgtgctgagcagaagatgccggtgcaagttcaaccagcagcagaggactggggaacccgatgaagaggagggaactttccgcagctccatccgccgtctgtccacccgcaggcggtagaaacacctggagcgatggaatccggccaggactcccctggcacctgacatctcccacgctccacctgcgcgcccaccgccccctccgccgccccttccccagccctgcccccgcagactccccctgccgccaagacttccaataaaacgtgcgttcctctcgacagcactttgtcggtctcggtccctcagcgcgaaacgccagcgccactgggccccagca

SEQ ID NO: 7820 - DNA, 959 bp, Homo sapiens
  source 1..959: mol_type = unassigned DNA; mol_type = unassigned DNA
gggcacagcaggacgtttgggggccttctttcagcaggggacagcccgattggggacaatggcgtctcttggccacatcttggttttctgtgtgggtctcctcaccatggccaaggcagaaagtccaaaggaacacgacccgttcacttacgactaccagtccctgcagatcggaggcctcgtcatcgccgggatcctcttcatcctgggcatcctcatcgtgctgagtgagtgcccctagctcccgccctctaccccgcctctccctggccccacctctctctggccccgcctctccctggccccgcctctccctagcccccctctccctggccccgcttctccctggtcccgcccctccctggccccgccccgccccaacccctcccaggccttgccccgcctaccctgccttggttccccggcccccggtctcgcctctagccccgccccgtcccccaagccccgcccctcgcgagggcgagctggagctacagcgccgcttggcgcccgccgggagggagcctcagcttctcctacctctccacgcccacaggcagaagatgccggtgcaagttcaaccagcagcagaggactggggaacccgatgaagaggagggaactttccgcagctccatccgccgtctgtccacccgcaggcggtagaaacacctggagcgatggaatccggccaggtgctgcagctctgacacggcggtgggagggaaggagggaggaaggaaaggcgggagagggagggggccaagtgccagagttgaagggcggcgaggggtggggctggacgtcccccctcgcctctcacccttttcaccctcacaggactcccctggcacctgacatctcccacgctccacctgcgcgcccaccgccccctccgccgccccttccccagccctgcccccgcagactccccctgccgccaagacttccaataaaac

SEQ ID NO: 7821 - DNA, 428 bp, Homo sapiens
  source 1..428: mol_type = unassigned DNA
tgtgtagggctggttgcgtcactgcgtgggggcaccggaggcccagaggaggagtattggatgcctgacggtgtttacaccccacgtcctgctccaaccagcagtttggggagaggacaatggcgtctcttggccacatcttggttttctgtgtgggtctcctcaccatggccaaggcagaaagtccaaaggaacacgacccgttcacttacgactaccagtccctgcagatcggaggcctcgtcatcgccgggatcctcttcatcctgggcatcctcatcgtgctgagcagaagatgccggtgcaagttcaaccagcagcagaggactggggaacccgatgaagaggagggaactttccgcagctccatccgccgtctgtccacccgcaggcggtagaaacacctggagcgatggaatccggccagg

SEQ ID NO: 7822 - DNA, 594 bp, Homo sapiens
  source 1..594: mol_type = unassigned DNA
agggaggagacggggtgacctttcccacaggggcagcctgtggcgatgtggcagctgggcctcaccccggcagggctgtgcgtgaccccctgagtgggggaaggcaggctgttgccatggtggcctgagcgagcagaattcctccagggacaatggcgtctcttggccacatcttggttttctgtgtgggtctcctcaccatggccaaggcagaaagtccaaaggaacacgacccgttcacttacgactaccagtccctgcagatcggaggcctcgtcatcgccgggatcctcttcatcctgggcatcctcatcgtgctgagcagaagatgccggtgcaagttcaaccagcagcagaggactggggaacccgatgaagaggagggaactttccgcagctccatccgccgtctgtccacccgcaggcggtagaaacacctggagcgatggaatccggccaggactcccctggcacctgacatctcccacgctccacctgcgcgcccaccgccccctccgccgccccttccccagccctgcccccgcagactccccctgccgccaagacttccaataaaacgtgcgttcctctcga

SEQ ID NO: 7823 - DNA, 486 bp, Homo sapiens
  source 1..486: mol_type = unassigned DNA
ctctgtgtttgtgtgaggcagcgcctcctctgccctgccagggacaatggcgtctcttggccacatcttggttttctgtgtgggtctcctcaccatggccaaggcagaaagtccaaaggaacacgacccgttcacttacgactaccagtccctgcagatcggaggcctcgtcatcgccgggatcctcttcatcctgggcatcctcatcgtgctgagcagaagatgccggtgcaagttcaaccagcagcagaggactggggaacccgatgaagaggagggaactttccgcagctccatccgccgtctgtccacccgcaggcggtagaaacacctggagcgatggaatccggccaggactcccctggcacctgacatctcccacgctccacctgcgcgcccaccgccccctccgccgccccttccccagccctgcccccgcagactccccctgccgccaagacttccaataaaacgtgcgttcctctc

SEQ ID NO: 7824 - DNA, 619 bp, Homo sapiens
  source 1..619: mol_type = unassigned DNA
gtgaggcagcgcctcctctgccctgccaggctggggatacccgtttctctagcttggagccaccaagatagaggacaaacacttctgtgattcagtccccagactgtctctgacttaatcccttgggttcaagccctatgtgggagagcaagggcacacactgcctaatccgtggtgtcccccccaggacaatggcgtctcttggccacatcttggttttctgtgtgggtctcctcaccatggccaaggcagaaagtccaaaggaacacgacccgttcacttacgactaccagtccctgcagatcggaggcctcgtcatcgccgggatcctcttcatcctgggcatcctcatcgtgctgagcagaagatgccggtgcaagttcaaccagcagcagaggactggggaacccgatgaagaggagggaactttccgcagctccatccgccgtctgtccacccgcaggcggtagaaacacctggagcgatggaatccggccaggactcccctggcacctgacatctcccacgctccacctgcgcgcccaccgccccctccgccgccccttccccagccctgcccccgcagactccccctgccgccaagacttccaataaaacg

SEQ ID NO: 7825 - DNA, 379 bp, Homo sapiens
  source 1..379: mol_type = unassigned DNA
acgaagctggggatacccgtttctctagcttggagccaccaagatagaggacaaacacttctgtgattcagtccccagactgtctctgacttaatcccttgggttcaagccctatgtgggagagcaagggcacacactgcctaatccgtggtgtcccccccaggacaatggcgtctcttggccacatcttggttttctgtgtgggtctcctcaccatggccaaggcagaaagtccaaaggaacacgacccgttcacttacgactaccagtccctgcagatcggaggcctcgtcatcgccgggatcctcttcatcctgggcatcctcatcgtgctgagtgagtgcccctagctcccgccctctaccccgcctctccctgg

SEQ ID NO: 7826 - DNA, 645 bp, Homo sapiens
  source 1..645: mol_type = unassigned DNA
ccctatgtgggagagcaagggcacacactgcctaatccgtggtgtcccccccaggacaatggcgtctcttggccacatcttggttttctgtgtgggtctcctcaccatggccaaggcagaaagtccaaaggaacacgacccgttcacttacgactaccagtccctgcagatcggaggcctcgtcatcgccgggatcctcttcatcctgggcatcctcatcgtgctgagcagaagatgccggtgcaagttcaaccagcagcagaggactggggaacccgatgaagaggagggaactttccgcagctccatccgccgtctgtccacccgcaggcggtagaaacacctggagcgatggaatccggccaggtgctgcagctctgacacggcggtgggagggaaggagggaggaaggaaaggcgggagagggagggggccaagtgccagagttgaagggcggcgaggggtggggctggacgtcccccctcgcctctcacccttttcaccctcacaggactcccctggcacctgacatctcccacgctccacctgcgcgcccaccgccccctccgccgccccttccccagccctgcccccgcagactccccctgccgccaagacttccaataaaacgtgcgttcctctcga

SEQ ID NO: 7827 - DNA, 512 bp, Homo sapiens
  source 1..512: mol_type = unassigned DNA
ttttctgtgtgggtctcctcaccatggccaaggcagaaagtccaaaggaacacgacccgttcacttacgactaccagtccctgcagatcggaggcctcgtcatcgccgggatcctcttcatcctgggcatcctcatcgtgctgaccccgcccctcgcgagggcgagctggagctacagcgccgcttggcgcccgccgggagggagcctcagcttctcctacctctccacgcccacaggcagaagatgccggtgcaagttcaaccagcagcagaggactggggaacccgatgaagaggagggaactttccgcagctccatccgccgtctgtccacccgcaggcggtagaaacacctggagcgatggaatccggccaggactcccctggcacctgacatctcccacgctccacctgcgcgcccaccgccccctccgccgccccttccccagccctgcccccgcagactccccctgccgccaagacttccaataaaacgtgcgttcctctcgaca

SEQ ID NO: 7828 - DNA, 620 bp, Homo sapiens
  source 1..620: mol_type = unassigned DNA
gcatctcgtggcccatcctctgcttcttcccgtcttctctcccccctgtcctcctcctccctgtcccctccctccctttcctatacacccctttcctctccctggtaccccactttcctcctcccatatctgctcccccttaattatcttacttccccccttctgcctgctggtcctttctccctgttccctccttcccaatttacccctctcctattctccctcctgtcttccctgccctcaccttccctgctctgctgctcacagactaccagtccctgcagatcggaggcctcgtcatcgccgggatcctcttcatcctgggcatcctcatcgtgctgagcagaagatgccggtgcaagttcaaccagcagcagaggactggggaacccgatgaagaggagggaactttccgcagctccatccgccgtctgtccacccgcaggcggtagaaacacctggagcgatggaatccggccaggactcccctggcacctgacatctcccacgctccacctgcgcgcccaccgccccctccgccgccccttccccagccctgcccccgcagactccccctgccgccaagacttccaataaaacgtgcgttcctctcgacagca

SEQ ID NO: 7829 - DNA, 690 bp, Homo sapiens
  source 1..690: mol_type = unassigned DNA
ggccaacccaagagggagggagtgtggttgaggcagtgggttctgcagggtgggatgtgggtgactcctccctgccctgctggtgcgtgtgcaccctggcagggtgtggagttgggacacacacgtgtgtagggctggttgcgtcactgcgtgggggcaccggaggcccagaggaggagtattggatgcctgacggtgtttacaccccacgtcctgctccaaccagcagtttggggagaggacaatggcgtctcttggccacatcttggttttctgtgtgggtctcctcaccatggccaaggcagaaagtccaaaggaacacgacccgttcacttacgactaccagtccctgcagatcggaggcctcgtcatcgccgggatcctcttcatcctgggcatcctcatcgtgctgagcagaagatgccggtgcaagttcaaccagcagcagaggactggggaacccgatgaagaggagggaactttccgcagctccatccgccgtctgtccacccgcaggcggtagaaacacctggagcgatggaatccggccaggactcccctggcacctgacatctcccacgctccacctgcgcgcccaccgccccctccgccgccccttccccagccctgcccccgcagactccccctgccgccaagacttccaataaaacgtgcgttcctctcgacagc

SEQ ID NO: 7830 - DNA, 456 bp, Homo sapiens
  source 1..456: mol_type = unassigned DNA
ccccacatcggtccgtcctgcttccagctgctgcagcgcgccttcgccgccaaagcatccagcagccccctgctccggcccagcatggcgaccccgacccagacccccacaaaggctcctgaggaacctgacccattttactatgactacaacacggtgcagactgtgggcatgactctggcaaccatcttgttcctgctgggtatcctcatcgtcatcagcaagaaggtgaagtgcaggaaggcggactccagcccaacctgcaaatcctgtaagtctgagcttccctcttcagcccctggtggcggcggcgtgtaacaccttcccgaggaaactccgctgccgaccctgcctgagcgcgggagcctgaggaccgggtggaggcggtggggacccagccgcgcgccgggagcgctccccggaatgagccgccccacccaccccaaggctggagcc

SEQ ID NO: 7831 - DNA, 712 bp, Homo sapiens
  source 1..712: mol_type = unassigned DNA
ccccacatcggtccgtcctgcttccagctgctgcagcgcgccttcgccgccaaagcatccagcagccccctgctccggcccagcatggcgaccccgacccagacccccacaaaggctcctgaggaacctgacccattttactatgactacaacacggtgcagactgtgggcatgactctggcaaccatcttgttcctgctgggtatcctcatcgtcatcagcaagaaggtgaagtgcaggaaggcggactccaggtctgagagcccaacctgcaaatcctgtaagtctgagcttccctcttcagcccctggtggcggcggcgtgtaacaccttcccgaggaaactccgctgccgaccctgcctgagcgcgggagcctgaggaccgggtggaggcggtggggacccagccgcgcgccgggagcgctccccggaatgagccgccccacccaccccaaggctggagccgctgcaccctgctgtccctctccaggccttggcaatgacgatcccccaaagagcccgtctgcaccccagacccagggcctcaggcctccagctcctgggatccgggagtccatcccggcccagcacccccagcatccccgtgtatggcccccctgcacctccttgtctcatccccgaagatccgtccccctggcccctcagtgtccatgtcttgagcttaataaatgtgcatttggttttttcctct

SEQ ID NO: 7832 - DNA, 1111 bp, Homo sapiens
  source 1..1111: mol_type = unassigned DNA
atcggtccgtcctgcttccagctgctgcagcgcgccttcgccgccaaagcatccagcagccccctgctccggcccagcatggcgaccccgacccagacccccacaaaggctcctgaggaacctgacccattttactatggtgagtgttggatttggggatagggctggactggggagtagctgcaggtgctcacagatcactccggacatggcttcagctgtggccacacgatacgtgctgggccactggccacgggaccatatatgtgggtgtggttcacatcagctgagttcatggagggcagaaccagatgggggagtggggatgcctcacactctctctgagcccccttcaggtctcaccgggatctgggctggtgccttggtgtcgccagagaagcagatgaaggaaaaccttagaagcaatgactctgagcccaggctgcctggatttgaatcctgccttatccactcactagctgtatggccttgggcaagcaactttgcctctctgggcccttctgtaaacaagggatagtaatagttcccacctatgaggactgtgggaaagatacctgactggtggcattaaatctcctccatggcactgaagctcaaataagctaccccaggcctggtagatcgggctccagtttcccctctgaacaccctcctcttgcccccaccccacccctttgctcattcatactttttccctaggtgtcaatttctctcccatctcaggacctttgcgtgtgctatgattctgcagtaatgcttctcctttgtacacgaccggctaaggctcccccttattcaggcctcagatcaaacatagactactctactgggataggccctcctgactccctggcaaggaagagccacaccatactcagctggtgtcgcatgacttgtttttgagggggattgtttctttaatgttttatcacaatacgaaagtcaactccttgctggtagaggcctggaccactactggtacagagtgagtgctccataaattcatatctcaacaaatacttagcgggcacaggctctatttctggcaatgttccaagcagctggagacactgcaatgaaccacacagac

SEQ ID NO: 7833 - DNA, 636 bp, Homo sapiens
  source 1..636: mol_type = unassigned DNA
gctgcagcgcgccttcgccgccaaagcatccagcagccccctgctccggcccagcatggcgaccccgacccagacccccacaaaggctcctgaggaacctgacccattttactatgactacaacacggtgcagactgtgggcatgactctggcaaccatcttgttcctgctgggtatcctcatcgtcatcagtaagtgcgacccattcctgggctgcctcagcctccgcttcctctgctggctttcatccatatcctacccgctatgtcctgtcttcttgttctgtctctctctcccaacaggcaagaaggtgaagtgcaggaaggcggactccaggtctgagagcccaacctgcaaatcctgtaagtctgagcttccctcttcagcccctggtggcggcggcgtgtaacaccttcccgaggaaactccgctgccgaccctgcctgagcgcgggagcctgaggaccgggtggaggcggtggggacccagccgcgcgccgggagcgctccccggaatgagccgccccacccaccccaaggctggagccgctgcaccctgctgtccctctccaggccttggcaatgacgatcccccaaagagcccgtctgcaccccagacccagggcctcaggcctcc

SEQ ID NO: 7834 - DNA, 3859 bp, Homo sapiens
  source 1..3859: mol_type = unassigned DNA
ctctcccaaccgcctcgtcgcactcctcaggctgagagcaccgctgcactcgcggccggcgatgcgggaccccggcgcggccgctccgctttcgtccctgggcctctgtgccctggtgctggcgctgctgggcgcactgtccgcgggcgccggggcgcagccgtaccacggagagaagggcatctccgtgccggaccacggcttctgccagcccatctccatcccgctgtgcacggacatcgcctacaaccagaccatcctgcccaacctgctgggccacacgaaccaagaggacgcgggcctcgaggtgcaccagttctacccgctggtgaaggtgcagtgttctcccgaactccgctttttcttatgctccatgtatgcgcccgtgtgcaccgtgctcgatcaggccatcccgccgtgtcgttctctgtgcgagcgcgcccgccagggctgcgaggcgctcatgaacaagttcggcttccagtggcccgagcggctgcgctgcgagaacttcccggtgcacggtgcgggcgagatctgcgtgggccagaacacgtcggacggctccgggggcccaggcggcggccccactgcctaccctaccgcgccctacctgccggacctgcccttcaccgcgctgcccccgggggcctcagatggcagggggcgtcccgccttccccttctcatgcccccgtcagctcaaggtgcccccgtacctgggctaccgcttcctgggtgagcgcgattgtggcgccccgtgcgaaccgggccgtgccaacggcctgatgtactttaaggaggaggagaggcgcttcgcccgcctctgggtgggcgtgtggtccgtgctgtgctgcgcctcgacgctctttaccgttctcacctacctggtggacatgcggcgcttcagctacccagagcggcccatcatcttcctgtcgggctgctacttcatggtggccgtggcgcacgtggccggcttccttctagaggaccgcgccgtgtgcgtggagcgcttctcggacgatggctaccgcacggtggcgcagggcaccaagaaggagggctgcaccatcctcttcatggtgctctacttcttcggcatggccagctccatctggtgggtcattctgtctctcacttggttcctggcggccggcatgaagtggggccacgaggccatcgaggccaactcgcagtacttccacctggccgcgtgggccgtgcccgccgtcaagaccatcactatcctggccatgggccaggtagacggggacctgctgagcggggtgtgctacgttggcctctccagtgtggacgcgctgcggggcttcgtgctggcgcctctgttcgtctacctcttcataggcacgtccttcttgctggccggcttcgtgtccctcttccgtatccgcaccatcatgaaacacgacggcaccaagaccgagaagctggagaagctcatggtgcgcatcggcgtcttcagcgtgctctacacagtgcccgccaccatcgtcctggcctgctacttctacgagcaggccttccgcgagcactgggagcgcacctggctcctgcagacgtgcaagagctatgccgtgccctgcccgcccggccacttcccgcccatgagccccgacttcaccgtcttcatgatcaagtacctgatgaccatgatcgtcggcatcaccactggcttctggatctggtcgggcaagaccctgcagtcgtggcgccgcttctaccacagacttagccacagcagcaagggggagactgcggtatgagccccggcccctccccacctttcccaccccagccctcttgcaagaggagaggcacggtagggaaaagaactgctgggtgggggcctgtttctgtaactttctccccctctactgagaagtgacctggaagtgagaagttctttgcagatttggggcgaggggtgatttggaaaagaagacctgggtggaaagcggtttggatgaaaagatttcaggcaaagacttgcaggaagatgatgataacggcgatgtgaatcgtcaaaggtacgggccagcttgtgcctaatagaaggttgagaccagcagagactgctgtgagtttctcccggctccgaggctgaacggggactgtgagcgatccccctgctgcagggcgagtggcctgtccagacccctgtgaggccccgggaaaggtacagccctgtctgcggtggctgctttgttggaaagagggagggcctcctgcggtgtgcttgtcaagcagtggtcaaaccataatctcttttcactggggccaaactggagcccagatgggttaatttccagggtcagacattacggtctctcctcccctgccccctcccgcctgtttttcctcccgtactgctttcaggtcttgtaaaataagcatttggaagtcttgggaggcctgcctgctagaatcctaatgtgaggatgcaaaagaaatgatgataacattttgagataaggccaaggagacgtggagtaggtatttttgctactttttcattttctggggaaggcaggaggcagaaagacgggtgttttatttggtctaataccctgaaaagaagtgatgacttgttgcttttcaaaacaggaatgcatttttccccttgtctttgttgtaagagacaaaagaggaaacaaaagtgtctccctgtggaaaggcataactgtgacgaaagcaacttttataggcaaagcagcgcaaatctgaggtttcccgttggttgttaatttggttgagataaacattcctttttaaggaaaagtgaagagcagtgtgctgtcacacaccgttaagccagaggttctgacttcgctaaaggaaatgtaagaggttttgttgtctgttttaaataaatttaattcggaacacatgatccaacagactatgttaaaatattcagggaaatctctcccttcatttactttttcttgctataagcctatatttaggtttcttttctatttttttctcccatttggatcctttgaggtaaaaaaacataatgtcttcagcctcataataaaggaaagttaattaaaaaaaaaaagcaaagagccattttgtcctgttttcttggttccatcaatctgtttattaaacatcatccatatgctgaccctgtctctgtgtggttgggttgggaggcgatcagcagataccatagtgaacgaagaggaaggtttgaaccatgggccccatctttaaagaaagtcattaaaagaaggtaaacttcaaagtgattctggagttctttgaaatgtgctggaagacttaaatttattaatcttaaatcatgtactttttttctgtaatagaactcggattcttttgcatgatggggtaaagcttagcagagaatcatgggagctaacctttatcccacctttgacactaccctccaatcttgcaacactatcctgtttctcagaacagtttttaaatgccaatcatagagggtactgtaaagtgtacaagttactttatatatgtaatgttcacttgagtggaactgctttttacattaaagttaaaatcgatcttgtgtttcttcaaccttcaaaactatctcatctgtcagatttttaaaactccaacacaggttttggcatcttttgtgctgtatcttttaagtgcatgtgaaatttgtaaaatagagataagtacagtatgtatattttgtaaatctcccatttttgtaagaaaatatatattgtatttatacatttttactttggatttttgttttgttggctttaaaggtctaccccactttatcacatgtacagatcacaaataaatttttttaaatacaaaatgaa

SEQ ID NO: 7835 - DNA, 4030 bp, Homo sapiens
  source 1..4030: mol_type = unassigned DNA
gggaagttgggctaagggcgctgctcccgccgaggaggaggcggcggctgggcgcgggccgcgccactcaggtgtccgctccgccttccggtctggatttgctcctgggtgtccagcaggaaggagactgtgtgcacctcgcccgactgcggccggagcgcggcgctgacttttccaggcggcgggggtccgtctgtcccggcggcggacggacgaaggacggacgccggagaaagagggcggcggcctgggccgaggcgggtccccaactccggcggcggcggcggcggcttggccttgggggcgggcatgagcccccgggggccgagtggtggccgccagggctgacccggcgcggcaagcggcccggcccagccatcttgactgcgcaccgcggccccagaggaaacttgcggcgcctccgccctctctgtccggcggagtcaccgccgcccggcgcggcggggagaagtggtcgggcgcgcggagaggaggcgagcgagcgcgggacgatgagccgaggcccggccgctctgcgccgcgagggctgagcgcgacccggggccagcagagcggacctacggactgtggcgcgcgcctgcagccgccttcaaacccccggagcggcggaaaggagtgcggaagggccctgcccaggctgcgggccgcgccgctgcggacgcgcccctagaaggggttagattatcggcagacccccctcccgggcgaagcataagggagaccccagatcacccgctgtacccgtctgcggctctctcgtgggccccccccccggcacccctctgcgcgccgcctggagggcgagggcaccgggccgaggcgcacagcatggagtggggttacctgttggaagtgacctcgctgctggccgccttggcgctgctgcagcgctctagcggcgctgcggccgcctcggccaaggagctggcatgccaagagatcaccgtgccgctgtgtaagggcatcggctacaactacacctacatgcccaatcagttcaaccacgacacgcaagacgaggcgggcctggaggtgcaccagttctggccgctggtggagatccagtgctcgcccgatctcaagttcttcctgtgcagcatgtacacgcccatctgcctagaggactacaagaagccgctgccgccctgccgctcggtgtgcgagcgcgccaaggccggctgcgcgccgctcatgcgccagtacggcttcgcctggcccgaccgcatgcgctgcgaccggctgcccgagcaaggcaaccctgacacgctgtgcatggactacaaccgcaccgacctaaccaccgccgcgcccagcccgccgcgccgcctgccgccgccgccgcccggcgagcagccgccttcgggcagcggccacggccgcccgccgggggccaggcccccgcaccgcggcggcggcaggggcggtggcggcggggacgcggcggcgcccccagctcgcggcggcggcggtggcgggaaggcgcggccccctggcggcggcgcggctccctgcgagcccgggtgccagtgccgcgcgcctatggtgagcgtgtccagcgagcgccacccgctctacaaccgcgtcaagacaggccagatcgctaactgcgcgctgccctgccacaacccctttttcagccaggacgagcgcgccttcaccgtcttctggatcggcctgtggtcggtgctctgcttcgtgtccaccttcgccaccgtctccaccttccttatcgacatggagcgcttcaagtacccggagcggcccattatcttcctctcggcctgctacctcttcgtgtcggtgggctacctagtgcgcctggtggcgggccacgagaaggtggcgtgcagcggtggcgcgccgggcgcggggggcgctgggggcgcgggcggcgcggcggcgggcgcgggcgcggcgggcgcgggcgcgggcggcccgggcgggcgcggcgagtacgaggagctgggcgcggtggagcagcacgtgcgctacgagaccaccggccccgcgctgtgcaccgtggtcttcttgctggtctacttcttcggcatggccagctccatctggtgggtgatcttgtcgctcacatggttcctggcggccggtatgaagtggggcaacgaagccatcgccggctactcgcagtacttccacctggccgcgtggcttgtgcccagcgtcaagtccatcgcggtgctggcgctcagctcggtggacggcgacccggtggcgggcatctgctacgtgggcaaccagagcctggacaacctgcgcggcttcgtgctggcgccgctggtcatctacctcttcatcggcaccatgttcctgctggccggcttcgtgtccctcttccgcatccgctcggtcatcaagcaacaggacggccccaccaagacgcacaagctggagaagctgatgatccgcctgggcctgttcaccgtgctctacaccgtgcccgccgcggtggtggtcgcctgcctcttctacgagcagcacaaccgcccgcgctgggaggccacgcacaactgcccgtgcctgcgggacctgcagcccgaccaggcacgcaggcccgactacgccgtcttcatgctcaagtacttcatgtgcctagtggtgggcatcacctcgggcgtgtgggtctggtccggcaagacgctggagtcctggcgctccctgtgcacccgctgctgctgggccagcaagggcgccgcggtgggcgggggcgcgggcgccacggccgcggggggtggcggcgggccggggggcggcggcggcgggggacccggcggcggcggggggccgggcggcggcgggggctccctctacagcgacgtcagcactggcctgacgtggcggtcgggcacggcgagctccgtgtcttatccaaagcagatgccattgtcccaggtctgagcggaggggagggggcgcccaggaggggtggggaggggggcgaggagagccaagtgcagcgaagggacacttgatgggctgaggttcccaccccttcacagtgttgattgctattagcatgataatgaactcttaatggtatccattagctgggacttaaatgactcacttagaacaaagtacctggcattgaagcctcccagacccagccccttttcctccattgatgtgcggggagctcctcccgccacgcgttaatttctgttggctgaggagggtggactctgcggcgtttccagaacccgagatttggagccctccctggctgcacttggctgggtttgcagtcagatacacagatttcacctgggagaacctctttttctccctcgactcttcctacgtaaactcccacccctgacttaccctggaggaggggtgaccgccacctgatgggattgcacggtttgggtattcttaatgaccaggcaaatgccttaagtaaacaaacaagaaatgtcttaattatacaccccacgtaaatacgggtttcttacattagaggatgtatttatataattatttgttaaattgtaaaaaaaaaagtgtaaaatatgtatatatccaaagatatagtgtgtacatttttttgtaaaaagtttagaggcttacccctgtaagaacagatataagtattctattttgtcaataaaatgacttttgataaatgatttaaccattgccctctcccccgcctcttctgagctgtcacctttaaagtgcttgctaaggacgcatggggaaaatggacattttctggcttgtcattctgtacactgaccttaggcatggagaaaattacttgttaaactctagttcttaagttgttagccaagtaaatatcattgttgaactgaaatcaaaattgagtttttgcaccttccccaaagacggtgtttttcatgggagctcttttctgatccatggataacaactctcactttagtggatgtaaatggaacttctgcaaggcagtaattccccttaggccttgttatttatcctgcatggtatcactaaaggtttcaaaaccctg

SEQ ID NO: 7836 - DNA, 2338 bp, Homo sapiens
  source 1..2338: mol_type = unassigned DNA
tggctcagcggcggctccggtggcagcggcggtggcggctaggcgggctcggcggctcctgtccctcgggcggctgcccgctcgctgcccagggcgcccggacacacgtgggcggctcagcgatggcccgcgccccgcgacgtggcgggcaggcaccggggcgcgggaccgctgagcccgagtgagccggggccgcgctcccgccttcggcccgggcctcccgggatggccgtggcgcctctgcggggggcgctgctgctgtggcagctgctggcggcgggcggcgcggcactggagatcggccgcttcgacccggagcgcgggcgcggggctgcgccgtgccaggcggtggagatccccatgtgccgcggcatcggctacaacctgacccgcatgcccaacctgctgggccacacgtcgcagggcgaggcggctgccgagctagcggagttcgcgccgctggtgcagtacggctgccacagccacctgcgcttcttcctgtgctcgctctacgcgcccatgtgcaccgaccaggtctcgacgcccattcccgcctgccggcccatgtgcgagcaggcgcgcctgcgctgcgcgcccatcatggagcagttcaacttcggctggccggactcgctcgactgcgcccggctgcccacgcgcaacgacccgcacgcgctgtgcatggaggcgcccgagaacgccacggccggccccgcggagccccacaagggcctgggcatgctgcccgtggcgccgcggcccgcgcgccctcccggagacctgggcccgggcgcgggcggcagtggcacctgcgagaaccccgagaagttccagtacgtggagaagagccgctcgtgcgcaccgcgctgcgggcccggcgtcgaggtgttctggtcccggcgcgacaaggacttcgcgctggtctggatggccgtgtggtcggcgctgtgcttcttctccaccgccttcactgtgctcaccttcttgctggagccccaccgcttccagtaccccgagcgccccatcatcttcctctccatgtgctacaacgtctactcgctggccttcctgatccgtgcggtggccggagcgcagagcgtggcctgtgaccaggaggcgggcgcgctctacgtgatccaggagggcctggagaacacgggctgcacgctggtcttcctactgctctactacttcggcatggccagctcgctctggtgggtggtcctgacgctcacctggttcctggctgccgggaagaaatggggccacgaggccatcgaggcccacggcagctatttccacatggctgcctggggcctgcccgcgctcaagaccatcgtcatcctgaccctgcgcaaggtggcgggtgatgagctgactgggctttgctacgtggccagcacggatgcagcagcgctcacgggcttcgtgctggtgcccctctctggctacctggtgctgggcagtagtttcctcctgaccggcttcgtggccctcttccacatccgcaagatcatgaagacgggcggcaccaacacagagaagctggagaagctcatggtcaagatcggggtcttctccatcctctacacggtgcccgccacctgcgtcatcgtttgctatgtctacgaacgcctcaacatggacttctggcgccttcgggccacagagcagccatgcgcagcggccgcggggcccggaggccggagggactgctcgctgccagggggctcggtgcccaccgtggcggtcttcatgctcaaaattttcatgtcactggtggtggggatcaccagcggcgtctgggtgtggagctccaagactttccagacctggcagagcctgtgctaccgcaagatagcagctggccgggcccgggccaaggcctgccgcgcccccgggagctacggacgtggcacgcactgccactataaggctcccaccgtggtcttgcacatgactaagacggacccctctttggagaaccccacacacctctagccacacaggcctggcgcggggtggctgctgccccctccttgccctccacgccctgccccctgcatcccctagagacagctgactagcagctgcccagctgtcaaggtcaggcaagtgagcaccggggactgaggatcagggcgggaccccgtgaggctcattaggggagatgggggtctcccctaatgcgggggctggaccaggctgagtccccacagggtcctagtggaggatgtggaggggcggggcagaggggtccagccggagtttatttaatgatgtaatttattgttgcgttcctctggaagctgtgactggaataaacccccgcgtggca

SEQ ID NO: 7837 - DNA, 5212 bp, Homo sapiens
  source 1..5212: mol_type = unassigned DNA
ggccgggcgcgcgcggcggagggagggagccgggaggcagcggaggagcgaccgccgccatattagggaccgcggagcccgggatcccgtcagcggcggccgcggccgggcctgcgggagctgcggaggccggaggcgggcgctgtgcggtgccaggagaggcggggtcggcgggagccagcgagccacgggagcgagccaggctaaccttgccgcgggccgagccctgcctcgccatggaccaggactatgagcggcgcctgcttcgccagatcgtcatccagaatgagaacacgatgccacgcgtcacagagatgcggcggaccctgacgcctgccagctccccagtgtcctcgcccagcaagcacggagaccgcttcatcccctccagagccggagccaactggagcgtgaacttccacaggattaacgagaatgagaagtctcccagtcagaaccggaaagccaaggacgccacctcagacaacggcaaagacggcctggcctactctgccctgctcaagaatgagctgctgggtgccggcatcgagaaggtgcaggacccgcagactgaggaccgcaggctgcagccctccacgcctgagaagaagggtctgttcacgtattcccttagcaccaagcgctccagccccgatgacggcaacgatgtgtctccctactccctgtctcccgtcagcaacaagagccagaagctgctccggtccccccggaaacccacccgcaagatctccaagatccccttcaaggtgctggacgcgcccgagctgcaggacgacttctacctcaatctggtggactggtcgtccctcaatgtgctcagcgtggggctaggcacctgcgtgtacctgtggagtgcctgtaccagccaggtgacgcggctctgtgacctctcagtggaaggggactcagtgacctccgtgggctggtctgagcgggggaacctggtggcggtgggcacacacaagggcttcgtgcagatctgggacgcagccgcagggaagaagctgtccatgttggagggccacacggcacgcgtcggggcgctggcctggaatgctgagcagctgtcgtccgggagccgcgaccgcatgatcctgcagagggacatccgcaccccgccactgcagtcggagcggcggctgcagggccaccggcaggaggtgtgcgggctcaagtggtccacagaccaccagctcctcgcctcggggggcaacgacaacaagctgctggtctggaatcactcgagcctgagccccgtgcagcagtacacggagcacctggcggccgtgaaggccatcgcctggtccccacatcagcacgggctgctggcctcggggggcggcacagctgaccgctgtatccgcttctggaacacgctgacaggacaaccactgcagtgtatcgacacgggctcccaagtgtgcaatctggcctggtccaagcacgccaacgagctggtgagcacgcacggctactcacagaaccagatccttgtctggaagtacccctccctgacccaggtggccaagctgaccgggcactcctaccgcgtgctgtacctggcaatgtcccctgatggggaggccatcgtcactggtgctggagacgagaccctgaggttctggaacgtctttagcaaaacccgttcgacaaaggagtctgtgtctgtgctcaacctcttcaccaggatccggtaaacctgccgggcaggaccgtgccacaccagctgtccagagtcggaggaccccagctcctcagcttgcatggactctgccttcccagcgcttgtcccccgaggaaggcggctgggcgggcggggagctgggcctggaggatcctggagtctcattaaatgcctgattgtgaaccatgtccaccagtatctggggtgggcacgtggtcggggaccctcagcagcaggggctctgtctcccttcccaaagggcgagaaccacattggacggtcccggctcagaccgtctgtactcagagcgacggatgccccctgggaccctcactgcctccgtctgttcatcacctgcccaccggagccgcatgctcttcctggaactgcccacgtctgcacagaacagaccaccagacgccagggctgattggtgggggcctgagaccccggttgcccattcatggctgcaccccaccatgtcaaacccaagaccagccccaaggccagaccaaggcatgtaggcctgggcaggtggctcggggccactggcggagccagcctgtggatccaagagacagtccccacctgggcttcacggcatccttgcagccacctctgctgtcactgctcgaagcagcagtctctctggaagcatctgtgtcatggccatcgcccggcggtcagtgggcttcagatgggcctgtgcatcctggccaagcgtcaccctcacactggaggaggatgtctgctctggacttatcaccccaggagaactgaacccggacctgctcactgccctggctggagaggagcacaacagatgccacgtcttcgtgcattcgccaacacgtgccctcacagggccagcgtcctccttccctgcgcaagacttgcgtcccccatgcctgctgggtggctgggtcctgtggaggccagcagcggtgtggcccccgcccccaggctgcctgtgtcttcacctgtcctgtccaccagcgccaacagccgtggggaagccaaggagacccaaggggtccaggaggtgggcgccctccatccttcgagaagcttcccaggctcctctgcttctctgtctcatgctcccaggctgcacagcaggcagggagggaggcaaggcaggggagtggggcctgagctgagcactgccccctcacccccccaccaccccttcccatttcatcggtggggacgtggagagggtggggcgggctggggttggagggtcccacccaccaccctgctgtgcttgggaacccccactccccactccccacatcccaacatcctggtgtctgtccccagtggggttggcgtgcatgtgtacatatgtatttgtgacttttctttggatttgttttgtgtttttgttgactagtcctggaaatgtttgaggctagacggggaggggccaggacccacccactgctcctgggggatgaggtcctggttttaaagccccgtcatttcaagcgggtcgatcttccacattcactggagagactctccccacctctgtctgggtggggcgcggacccctcactgtgcgcctgtgcagggggtgctggtgcacgtggcagtgtggatttccagtggtcacggtcttactgtttcaaggtttttaaataagaaaaccaaccctgccttcgcccatgcccgcccctgcccgcagttgccaaagagccgccttgtcgctgtgggcgtcagggcttggctggctcagtgcacaacccacagtggccttcagaggctcctcctgggactgggaaccgccgcagggccaggcggacggcgtgaggtttgtgttggggctggttctgcccatgctagggggtgggggagctcccaggacagaccagccttgtttctcatgtaatgcagtgacgctgtcattaaacacgtggattcatgtgtggccgggactggctggctctaggtccccggctcgggtggggtcacacggtcctgccctagagtccccatctggccctggagctgcagaagcagcttctgaggggcttcccaggcctgcatttcacagatggggagctcagccctcgaaggccgcagagacgcctcccaggcccgtctgccagggcgccggccacaatcctgcagggccaaggactggactccaggcaagtccctgcgctccagctggacggccctgttccagggaggaggtgctcggttgacaccatcagggagggagggtgggcactgctgggctgagttcacccccagggctggccagatggggccaggagggacagagcaaggggggtgaaggccgtggtgggagggtcccatgatgatgggccagggctcgtgtagaaatgggggaattggttccccatggcccaggacagctgagaggaggtggaggggccccaggggagtgtacgtcaggctttgcggggcacgggggccactcagcagcgctggggcaggtgcctctgctgtcagctccacccgacaggcagacgaaggccagtggggccatcgcttcctggggcgaccctggcagtggttgggagacgcccagatggagggggaggctgaccaagggccccgcagggcgggctgcaacttttctgttgatcctggaatgtagctggtgcagtgagagggaaagagaattgaaaaactcaggctgccataggttctgcgatgagaggtgcaggaggcaggagcctggcccagggggtgctggtgcctccccggggtctgggcggagagaacaggaggaatggctgggaagtggctgagggagccaggaggccggggggccgggggctgcaggggaggctgtgggggtcctggcagccaggaggccccaggtggttttgaggctcgctcttgcgcggtgcctgagaagagggtgaaggagctggggcaggccccatcctgggcattggagatgatgaaaccgagcagacctggcccatgtggagctggcatgggggacacagcccagagacagagaagcttatgaggaagtgaggaggtggcgtcacaagggtggggagggggccttggggaagggcggccttggatcagaggctcaccacaagcctggcatttcagccagggctggagaaggcagggacgcctgggtgagaggcaaagggcacagccatgcaaaggccctggggcaggacggcacctggtatgcgggaggaacagagtgaggagaggagggcagggcgtgcagggccttgtgggcctcagggaggacttgggcacctacgccgagggagtggagctcctgggtgcgtgtccagatgggaaaggcagggtcgtatctgtggggacctgacaagggcaggggaagcggagaccagggtgcaggctccgcccccacccaaggccgggcccagccagaggaggggcagggcagggcaggaggtttctggatgtttgttgggtttggtttggttttgttttgttttgtttattgtggtaaaatacaaaatctaccgtcttaca

SEQ ID NO: 7838 - DNA, 675 bp, Homo sapiens
  source 1..675: mol_type = unassigned DNA
gccgggcctgcgggagctgcggaggccggaggcgggcgctgtgcggtgccaggagaggcggggtcggcgggagccagcgagccacgggagcgagccaggctaaccttgccgcgggccgagccctgcctcgccatggaccaggactatgagcggcgcctgcttcgccagatcgtcatccagaatgagaacacgatgccacgcgtcacagagatgcggcggaccctgacgcctgccagctccccagtgtcctcgcccagcaagcacggagaccgcttcatcccctccagagccggagccaactggagcgtgaacttccacaggattaacgagaatgagaagtctcccagtcagaaccggaaagccaaggacgccacctcagacaacggcaaaggttagggtcccagcccatccgccctgcaggcccccaccctgccttgccccgcctcactgtgcttggtgcccgcagacggcctggcctactctgccctgctcaagaatgagctgctgggtgccggcatcgagaaggtgcaggacccgcagactgaggaccgcaggctgcagccctccacgcctgagaagaagggtctgttcacgtattcccttagcaccaagcgctccagccccgatgacggcaacgatgtgtctccctactccctgtctcccgtcagcaacaag

SEQ ID NO: 7839 - DNA, 1331 bp, Homo sapiens
  source 1..1331: mol_type = unassigned DNA
ctcgccatggaccaggactatgagcggcgcctgcttcgccagatcgtcatccagaatgagaacacgatgccacgcgtcacagagatgcggcggaccctgacgcctgccagctccccagtgtcctcgcccagcaagcacggagaccgcttcatcccctccagagccggagccaactggagcgtgaacttccacaggattaacgagaatgagaagtctcccagtcagaaccggaaagccaaggacgccacctcagacaacggcaaagacggcctggcctactctgccctgctcaagaatgagctgctgggtgccggcatcgagaaggtgcaggacccgcagactgaggaccgcaggctgcagccctccacgcctgagaagaagggtctgttcacgtattcccttagcaccaagcgctccagccccgatgacggcaacgatgtgtctccctactccctgtctcccgtcagcaacaagagccagaagctgctccggtccccccggaaacccacccgcaagatctccaagatccccttcaaggtgctggacgcgcccgagctgcaggacgacttctacctcaatctggtggactggtcgtccctcaatgtgctcagcgtggggctaggcacctgcgtgtacctgtggagtgcctgtaccagccaggtgacgcggctctgtgacctctcagtggaaggggactcagtgacctccgtgggctggtctgagcgggggaacctggtggcggtgggcacacacaagggcttcgtgcagatctgggacgcagccgcagggaagaagctgtccatgttggagggccacacggcacgcgtcggggcgctggcctggaatgctgagcagctgtcgtccgggagccgcgaccgcatgatcctgcagagggacatccgcaccccgccactgcagtcggagcggcggctgcagggccaccggcaggaggtgtgcgggctcaagtggtccacagaccaccagctcctcgcctcggggggcaacgacaacaaggacaaccactgcagtgtatcgacacgggctcccaagtgtgcaatctggcctggtccaagcacgccaacgagctggtgagcacgcacggctactcacagaaccagatccttgtctggaagtacccctccctgacccaggtggccaagctgaccgggcactcctaccgcgtgctgtacctggcaatgtcccctgatggggaggccatcgtcactggtgctggagacgagaccctgaggttctggaacgtctttagcaaaacccgttcgacaaaggagtctgtgtctgtgctcaacctcttcaccaggatccggtaaacc

SEQ ID NO: 7840 - DNA, 1491 bp, Homo sapiens
  source 1..1491: mol_type = unassigned DNA
atggaccaggactatgagcggcgcctgcttcgccagatcgtcatccagaatgagaacacgatgccacgcgtcacagagatgcggcggaccctgacgcctgccagctccccagtgtcctcgcccagcaagcacggagaccgcttcatcccctccagagccggagccaactggagcgtgaacttccacaggattaacgagaatgagaagtctcccagtcagaaccggaaagccaaggacgccacctcagacaacggcaaagacggcctggcctactctgccctgctcaagaatgagctgctgggtgccggcatcgagaaggtgcaggacccgcagactgaggaccgcaggctgcagccctccacgcctgagaagaagggtctgttcacgtattcccttagcaccaagcgctccagccccgatgacggcaacgatgtgtctccctactccctgtctcccgtcagcaacaagagccagaagctgctccggtccccccggaaacccacccgcaagatctccaagatccccttcaaggtgctggacgcgcccgagctgcaggacgacttctacctcaatctggtggactggtcgtccctcaatgtgctcagcgtggggctaggcacctgcgtgtacctgtggagtgcctgtaccagccaggtgacgcggctctgtgacctctcagtggaaggggactcagtgacctccgtgggctggtctgagcgggggaacctggtggcggtgggcacacacaagggcttcgtgcagatctgggacgcagccgcagggaagaagctgtccatgttggagggccacacggcacgcgtcggggcgctggcctggaatgctgagcagctgtcgtccgggagccgcgaccgcatgatcctgcagagggacatccgcaccccgccactgcagtcggagcggcggctgcagggccaccggcaggaggtgtgcgggctcaagtggtccacagaccaccagctcctcgcctcggggggcaacgacaacaagctgctggtctggaatcactcgagcctgagccccgtgcagcagtacacggagcacctggcggccgtgaaggccatcgcctggtccccacatcagcacgggctgctggcctcggggggcggcacagctgaccgctgtatccgcttctggaacacgctgacaggacaaccactgcagtgtatcgacacgggctcccaagtgtgcaatctggcctggtccaagcacgccaacgagctggtgagcacgcacggctactcacagaaccagatccttgtctggaagtacccctccctgacccaggtggccaagctgaccgggcactcctaccgcgtgctgtacctggcaatgtcccctgatggggaggccatcgtcactggtgctggagacgagaccctgaggttctggaacgtctttagcaaaacccgttcgacaaaggtaaagtgggagtctgtgtctgtgctcaacctcttcaccaggatccggtaa

SEQ ID NO: 7841 - DNA, 1215 bp, Homo sapiens
  source 1..1215: mol_type = unassigned DNA
atggaccaggactatgagcggcgcctgcttcgccagatcgtcatccagaatgagaacacgatgccacgcgtcacagagatgcggcggaccctgacgcctgccagctccccagtgtcctcgcccagcaagcacggagaccgcttcatcccctccagagccggagccaactggagcgtgaacttccacaggattaacgagaatgagaagtctcccagtcagaaccggaaagccaaggacgccacctcagacaacggcaaagacggcctggcctactctgccctgctcaagaatgagctgctgggtgccggcatcgagaaggtgcaggacccgcagactgaggaccgcaggctgcagccctccacgcctgagaagaagggtctgttcacggtgacgcggctctgtgacctctcagtggaaggggactcagtgacctccgtgggctggtctgagcgggggaacctggtggcggtgggcacacacaagggcttcgtgcagatctgggacgcagccgcagggaagaagctgtccatgttggagggccacacggcacgcgtcggggcgctggcctggaatgctgagcagctgtcgtccgggagccgcgaccgcatgatcctgcagagggacatccgcaccccgccactgcagtcggagcggcggctgcagggccaccggcaggaggtgtgcgggctcaagtggtccacagaccaccagctcctcgcctcggggggcaacgacaacaagctgctggtctggaatcactcgagcctgagccccgtgcagcagtacacggagcacctggcggccgtgaaggccatcgcctggtccccacatcagcacgggctgctggcctcggggggcggcacagctgaccgctgtatccgcttctggaacacgctgacaggacaaccactgcagtgtatcgacacgggctcccaagtgtgcaatctggcctggtccaagcacgccaacgagctggtgagcacgcacggctactcacagaaccagatccttgtctggaagtacccctccctgacccaggtggccaagctgaccgggcactcctaccgcgtgctgtacctggcaatgtcccctgatggggaggccatcgtcactggtgctggagacgagaccctgaggttctggaacgtctttagcaaaacccgttcgacaaaggagtctgtgtctgtgctcaacctcttcaccaggatccggtaa

SEQ ID NO: 7842 - DNA, 598 bp, Homo sapiens
  source 1..598: mol_type = unassigned DNA
ctctgctctcctgcctgcaggagaatgagaagtctcccagtcagaaccggaaagccaaggacgccacctcagacaacggcaaagacggcctggcctactctgccctgctcaagaatgagctgctgggtgccggcatcgagaaggtgcaggacccgcagactgaggaccgcaggctgcagccctccacgcctgagaagaagggtctgttcacgtattcccttagcaccaagcgctccagccccgatgacggcaacgatgtgtctccctactccctgtctcccgtcagcaacaagagccagaagctgctccggtccccccggaaacccacccgcaagatctccaagatccccttcaaggtgctggacgcgcccgagctgcaggacgacttctacctcaatctggtggactggtcgtccctcaatgtgctcagcgtggggctaggcacctgcgtgtacctgtggagtgcctgtaccagccaggtgacgcggctctgtgacctctcagtggaaggggactcagtgacctccgtgggctggtctgagcgggggaacctggtggcggtgggcacacacaagggcttcgtgcagatctgggacgc

SEQ ID NO: 7843 - DNA, 623 bp, Homo sapiens
  source 1..623: mol_type = unassigned DNA
aaggccatcgcctggtccccacatcagcacgggctgctggcctcggggggcggcacagctgaccgctgtatccgcttctggaacacgctgacaggacaaccactgcagtgtatcgacacgggctcccaagtgtgcaatctggcctggtccaagcacgccaacgagctggtgagcacgcacggctactcacagaaccagatccttgtctggaagtacccctccctgacccaggtggccaagctgaccgggcactcctaccgcgtgctgtacctggtgagttcacgccaggcacttcaaggtgccccgggattctggacaaactgccatggccaccccagagcaccctgtcctgtgttcttagggaggatggtgtgcagatctaaaaccccgtgggacccagcagcaggggccggcagggcatctggtgctggttgtgttgccagcgttggaatgggctctaccgaactccccagccctgcaggtgcaggccctgtcctcctggaggaccttagcttcttcatttgtttattttccccataaagaggggtgaagaggaaagccaaaaccaactcacagctgaccactcagatgaccctgtgaacgtcctacacagtaactgtatg

SEQ ID NO: 7844 - DNA, 671 bp, Homo sapiens
  source 1..671: mol_type = unassigned DNA
ctgcccctccctcctggctccagagtctggggggcccagccacccgacaccttgctcccctctccttcagtcccccagcactgtcccgaggcacctagaggcccagagacatggggtgcttccctcctgtccacaggcaatgtcccctgatggggaggccatcgtcactggtgctggagacgagaccctgaggttctggaacgtctttagcaaaacccgttcgacaaaggagtctgtgtctgtgctcaacctcttcaccaggatccggtaaacctgccgggcaggaccgtgccacaccagctgtccagagtcggaggaccccagctcctcagcttgcatggactctgccttcccagcgcttgtcccccgaggaaggcggctgggcgggcggggagctgggcctggaggatcctggagtctcattaaatgcctgattgtgaaccatgtccaccagtatctggggtgggcacgtggtcggggaccctcagcagcaggggctctgtctcccttcccaaagggcgagaaccacattggacggtcccggctcagaccgtctgtactcagagcgacggatgccccctgggaccctcactgcctccgtctgttcatcacctgcccaccggagccgcatgctcttcctggaactgcccacgtctgcacagaacagacca

SEQ ID NO: 7845 - DNA, 7981 bp, Homo sapiens
  source 1..7981: mol_type = unassigned DNA
gtgtgtgtgtgtgtgtgtgagcagcgctgtgtctgtttcggaaagcgctctggggaggtcttgtccctagggggcggagcgcaaaggacagaagctccggcaccgagtcggggcagagtcccgctgagtccgagcgctgctgaggcagctggcgagacggcacgtctggaggcgaggcgggcgcactgaaaggaggccggcgcgcccgcggccccggctcgcgttctgttcaggttcgtgggcctgcagaggagagactcgaactcgtggaacccgcgcaccgtggagtctgtccgcccagtccgtccggggtgcgcgaccaggagagctaggttctcgccactgcgcgctcggcaggcgtcggctgtgtcgggagcgcgcccgccgcccctcagctgcccggcccggagcccgagacgcgcgcaccatgagcggtggtgaagtggtctgctccggatggctccgcaagtcccccccggagaaaaagttgaagcgttatgcatggaagaggagatggttcgtgttacgcagtggccgtttaactggagatccagatgttttggaatattacaaaaatgatcatgccaagaagcctattcgtattattgatttaaatttatgtcaacaagtagatgctggattgacatttaacaaaaaagagtttgaaaacagctacatttttgatatcaacactattgaccggattttctacttggtagcagacagcgaggaggagatgaataagtgggttcgttgtatttgtgacatctgtgggtttaatccaacagaagaagatcctgtgaagccacctggcagctctttacaagcaccagctgatttacctttagctataaatacagcaccaccatccacccaggcagattcatcctctgctactctacctcctccatatcagctaatcaatgttccaccacacctggaaactcttggcattcaggaggatcctcaagactacctgttgctcatcaactgtcaaagcaagaagcccgaacccaccagaacgcatgctgattctgcaaaatccacctcttctgaaacagactgcaatgataacgtcccttctcataaaaatcctgcttcctcccagagcaaacatggaatgaatggcttttttcagcagcaaatgatatacgactctccaccttcacgtgccccatctgcttcagttgactccagcctttataacctgcccaggagttattcccatgatgttttaccaaaggtgtctccatcaagtactgaagcagatggagaactctatgtttttaataccccatctgggacatcgagtgtagagactcaaatgaggcatgtatctattagttatgacattcctccaacacctggtaatacttatcagattccacgaacatttccagaaggaaccttgggacagacatcaaagctagacactattccagatattcctccacctcggccaccgaaaccacatccagctcatgaccgatctcctgtggaaacgtgtagtatcccacgcaccgcctcagacactgacagtagttactgtatccctacagcagggatgtcgccttcacgtagtaataccatttccactgtggatttaaacaaattgcgaaaagatgctagttctcaagactgctatgatattccacgagcatttccaagtgatagatctagttcacttgaaggcttccataaccactttaaagtcaaaaatgtgttgacagtgggaagtgtttcaagtgaagaactggatgaaaattacgtcccaatgaatcccaattcaccaccacgacaacattccagcagttttacagaaccaattcaggaagcaaattatgtgccaatgactccaggaacatttgatttttcctcatttggaatgcaagttcctcctcctgctcatatgggcttcaggtccagcccaaaaacccctcccagaaggccagttcctgttgcagactgtgaaccaccccccgtggataggaacctcaagccagacagaaaaggtcaaagtcctaaaattttaagactcaaaccccatggtttagagcgaactgattcacaaaccataggtgactttgctacaagaagaaaggtcaagccagcgcctttagaaataaaacctttgccagaatgggaagaattacaagccccagttagatctcccatcactaggagttttgctcgagactcttccaggtttcccatgtccccccgaccagattcagtgcatagcacaacttcaagcagtgactcacacgacagtgaagagaattatgttcccatgaacccaaacctgtccagtgaagacccaaatctctttggcagtaacagtcttgatggaggaagcagccctatgatcaagcccaaaggagacaaacaggtggaatacttagatctcgacttagattctgggaaatccacaccaccacgtaagcaaaagagcagtggctcaggcagcagtgtagcagatgagagagtggattatgttgttgttgaccaacagaagaccttggctctaaagagtacccgggaagcctggacagatgggagacagtccacagaatcagaaacgccagcgaagagtgtgaaatgaaaatattgccttgccatttctgaacaaaagaaaactgaattgtaaagataaatcccttttgaagaatgacttgacacttccactctaggtagatcctcaaatgagtagagttgaagtcaaaggacctttctgacataatcaagcaatttagacttaagtggtgctttgtggtatctgaacaattcataacatgtaaataatgtgggaaaatagtattgtttagctcccagagaaacatttgttccacagttaacacactcgtagtattactgtatttatgcactttttcatctaaaacattgttctgggttttcccaatgtaccttaccataattcctttgggagttcttgttttttgtcacactactttatataacaatactaagtcaactaagctacttttagatttggaaattgctgtttacagtctaacaacattaaaatgagaggtagattcacaagttagctttctacctgaagcttcaggtgataaccattagcttatacttggactcatcatttgttgccttccaaaatgctgaggataatgtatgtactggtgtcaggacctagttctctggttaatgtacatttagtttttaatggtggaactttgttatattttgttaattacagtgtttttggttcattgagtgaagattctgccgggtgggatcttgcacctttgaaagactgaataattacactaccaagtaagcctgcaaatcattgatggcatgcagtgatgatgtgctcttacacttgttaacatgtattaagtgttatttgcaaaaggtagattatgtaaccaatcaggtacgtaccaggcagtgatgtgctaatacactgatcaggtttagacaatgagctttggttgtgttcttgttagtcctaatattggttttcagtttggaattaataaagcagttgacattcactgttagttacagcaacatactgtgatttttaattagatagtaattcagatttattactctatgaaattctgtcttttgacaccatagtgccctttctatgattttttttacttaatattcttcttggccttatatttaattccctatgcaattaatattttatatctgcatttttttaaaaaaaatagatgttatataagtgattctcgtatgtagcacctgttgcttttccactgaaagaattacggattttgtactgtgatttatattcactgccccaattcaagaaatattggagccttgctacaatgtgaaatgttatagtcatggactccttccaaccagatttctgaaaacaccagagggatggtataattctgtctcacctataacatggtcctgtgacatagatattaagaccacaagttgtagtgaggctacaattatattcgtctgtcttggctttgcaacataatttagaaagcacgtatagttgttttttaaccaagttacatacaatctcatgtactgatttgagacttataacaatttttggagggggcatagagaaaggagtgcccacagttgaggcatgaccccctccattcagacctctaactgttgcctgagtacacagatgtgccctgatttctggcccattggccatagtactgtgcctaatcaatgtaataggtttattttcccaatcctcaaactaaaaatgttcataacaagatgaattgtagactagtaacatttgatgcttttaaatatttgcttctttttaaacaaaaactaaaacccagaagtgaatttttaggtggatttttaaataaaaaagattgattgagtttggtgtgcaagctgttttataatgaaacaacaaaatgaaatctaaaatcctgaaatgtgcctaaactatcaaaacacacgatacagctaatgtgtaaagatgctaaattctgttacttggaggatgaatatatttaagatttaaaacacaataataaatacatgattaattcaaaaataaaaatctttacagctgcctatcaagggtctaaagcacttaatgaatgtttttagtctaacttatcattaactttttacaagtcaccatatttgaagatctgtagcactctgattttcagaaaatttttcattctgaataatttaaaaatggtgatgtattagaaaggcagtttgctttagaaaactaaatcacattgaacattgtattagagaattaaattaaaagtttcttacagagcagtattttccaaacatttttagcactagaatctttttagatgaaattttatgtataaccccaatacataaagcctgaaaactcaattttatcaatataaatgtattttgggttcacatttatgcttattcattttggctcattactaagcataataagattctgagttatttctgaataacacaaatgtggagttatacatagttgatgaaaccagcagccaatttatagctatgccctgttttatttgtatactatcaagaaaattttgattcacacaaatgtaagcaaaaataataggttttaaacatacatctcaggaaattctttaattagagatagctaaagttattcaaggtctatacaaaaataagttatcctggtagtggaagttaatacataagcagtctccagtgtggtaaagtagggtatgtaacacatcagaatgtgcgtttttattaggttttaaaatatgcacgtataaaaactaaatttgaatcaaacccttttaactcacctccaagaagctagactttggccaggaatgggctaaaaaccactggttaacgatgtgacagttatgatcttggagattggaaatctttcttccacattagagttctttaccttaattccttattctgaaaaattgtaagattttatgaaggtttgaatactgaagcacagttctgctttcaaaaattaaaattcaaacttgaaaaagctgtttaacccatggaagatatcatttagtaagatgtaaaagattttttaaatctacacttcagtttatacatctttatcattatcaatactatataagttactgtgagcattttagagaattccataaaggtactatgagtgtgtctgtatgtgtgtgtatatatagcattgtatttaatcatagactaaatttaatttgatatagaaatactactttacttgtacattaaggtcataatttctgctggactcttttatatttaattaatggggattatagtcttccttcataaatgcatttaaacctgaaattgaacaccagtgtttttctttttctacttatgggaagttgtctgcttccccctttagagaaaacagtatttttatattttgttaaaatattaactactttatgcctacacactatgctgtagatactgatcataattcttgggtgttcacaaacactcctagtgcctcttttttggcccgttgaaagtgttggtattactactttcactacagagcctttggccctctaataatgctgaggtgggctgatccttcccatttctgtcttcgggtcattctggtaggtcttctcctccactgtcaagtaagcaatcaggtccgtgacagggattggacatatgaacaaattaagtggatacacacagtgagaaagatacatgcattctatggtaacaactactgtcaataacatctgatgttacatgcacatttatatatatataattttaaaaactgaactatgagaagccatggtataaatgaatattgtggacatcatggacttgatatgatagaaatcaattgtcagcttgagaaagttgtttttaatctgtctaaatagttcatgcattactacagttaaaaatagtttcatttgtcttctatagacttaattttattccggttcagtataatctctgttaacagagtttcagcaaactgattggtcaaggtattaacatagcttctacttcctttacttaaaaagatgtggttttatgtaagttcttgattactgatgatcatcccaaattttgacaacaaaatcatatgtataaatttatttctcccctcttgttcatcatcttttgtaaaggtcccattgtagatcttttctgctaccaaataaaacttttcaaacaatttggtttcaagaccttaaatagacaagttggatactaagattgtgaactgataaggacatataaatttatatttccagcccttccttagagtctttatctgcatcaaaaacccaattctgccattaactgtgcttcccagtcccacctctatatgtcactcattttctgcaacaaagatctcactaaatcatgttgaaacacaagtcatgatcctctctaagtaaatagaaaaagctccctggaaaaactctgttgccacatgcacgtgccctgttactcctccagccagccagtgctgccagcattttattgtgtaaaagtccaaataaataagggcctgcatgcaacctttatcttcagaaactaggttttatatgtaaaatgtgacttgggaaatgattctgtttattaactggctgggatttttcatttctatgaaagtttcaaacatctccagtactttataaaatcccaacaattgctgtaagtcagcactttggtccactcagcccacccagcccacttgcaactctgactcttcactgaatcatatttgggaagtttgggtagggtgaggctatcttcttcaagattattttctcatatgtctgtctgtcaccttgtaaaccatgagactcctgggtatttgcatgtaacttctttgaggaagttaccaccatctctgatatagacacactttttgagttgcagtttctgttagaattttttggagactaacttgccaattctgtgaatgttattgaatatttaaaaagctgggtctgtaatgggaggcattttattagctgttgtgattgggtaacatgtccccttagatttcctgatttaaaattatacaaaattactatttttgataaaataaaggaacacctacagaaaattaagtttctaagatgtttctatacttcattagaaaagattttattactattacttatggttattggtgattaacacttaatgcgtctcctctgattttgtgttccatgaggtgcttggaacatttggagtgctctgtgcgagggacatacagtgatataggaaatttaaaaattaaaataatacccaaaacccactttatcagatatggtattgtgatggttaatattatgtgtcaacttggtgaggctatggcgcccatgtgtttggtcaaacactagcctagatgttgctgtgaatatattttgtagatgtgattaacatttacaatcagttgattttaagtaaagcagattctcatccataa

SEQ ID NO: 7846 - DNA, 2648 bp, Homo sapiens
  source 1..2648: mol_type = unassigned DNA
gagtccgagcgctgctgaggcagctggcgagacggcacgtctggaggcgaggcgggcgcactgaaaggaggccggcgcgcccgcggccccggctcgcgttctgttcaggttcgtgggcctgcagaggagagactcgaactcgtggaacccgcgcaccgtggagtctgtccgcccagtccgtccggggtgcgcgaccaggagagctaggttctcgccactgcgcgctcggcaggcgtcggctgtgtcgggagcgcgcccgccgcccctcagctgcccggcccggagcccgagacgcgcgcaccatgagcggtggtgaagtggtctgctccggatggctccgcaagtcccccccggagaaaaagttgaagcgttatgcatggaagaggagatggttcgtgttacgcagtggccgtttaactggagatccagatgttttggaatattacaaaaatgatcatgccaagaagcctattcgtattattgatttaaatttatgtcaacaagtagatgctggattgacatttaacaaaaaagagtttgaaaacagctacatttttgatatcaacactattgaccggattttctacttggtagcagacagcgaggaggagatgaataagtgggttcgttgtatttgtgacatctgtgggtttaatccaacagaagaagatcctgtgaagccacctggcagctctttacaagcaccagctgatttacctttagctataaatacagcaccaccatccacccaggcagattcatcctctgctactctacctcctccatatcagctaatcaatgttccaccacacctggaaactcttggcattcaggaggatcctcaagactacctgttgctcatcaactgtcaaagcaagaagcccgaacccaccagaacgcatgctgattctgcaaaatccacctcttctgaaacagactgcaatgataacgtcccttctcataaaaatcctgcttcctcccagagcaaacatggaatgaatggcttttttcagcagcaaatgatatacgactctccaccttcacgtgccccatctgcttcagttgactccagcctttataacctgcccaggagttattcccatgatgttttaccaaaggtgtctccatcaagtactgaagcagatggagaactctatgtttttaataccccatctgggacatcgagtgtagagactcaaatgaggcatgtatctattagttatgacattcctccaacacctggtaatacttatcagattccacgaacatttccagaaggaaccttgggacagacatcaaagctagacactattccagatattcctccacctcggccaccgaaaccacatccagctcatgaccgatctcctgtggaaacgtgtagtatcccacgcaccgcctcagacactgacagtagttactgtatccctacagcagggatgtcgccttcacgtagtaataccatttccactgtggatttaaacaaattgcgaaaagatgctagttctcaagactgctatgatattccacgagcatttccaagtgatagatctagttcacttgaaggcttccataaccactttaaagtcaaaaatgtgttgacagtgggaagtgtttcaagtgaagaactggatgaaaattacgtcccaatgaatcccaattcaccaccacgacaacattccagcagttttacagaaccaattcaggaagcaaattatgtgccaatgactccaggaacatttgatttttcctcatttggaatgcaagttcctcctcctgctcatatgggcttcaggtccagcccaaaaacccctcccagaaggccagttcctgttgcagactgtgaaccaccccccgtggataggaacctcaagccagacagaaaagtcaagccagcgcctttagaaataaaacctttgccagaatgggaagaattacaagccccagttagatctcccatcactaggagttttgctcgagactcttccaggtttcccatgtccccccgaccagattcagtgcatagcacaacttcaagcagtgactcacacgacagtgaagagaattatgttcccatgaacccaaacctgtccagtgaagacccaaatctctttggcagtaacagtcttgatggaggaagcagccctatgatcaagcccaaaggagacaaacaggtggaatacttagatctcgacttagattctgggaaatccacaccaccacgtaagcaaaagagcagtggctcaggcagcagtgtagcagatgagagagtggattatgttgttgttgaccaacagaagaccttggctctaaagagtacccgggaagcctggacagatgggagacagtccacagaatcagaaacgccagcgaagagtgtgaaatgaaaatattgccttgccatttctgaacaaaagaaaactgaattgtaaagataaatcccttttgaagaatgacttgacacttccactctaggtagatcctcaaatgagtagagttgaagtcaaaggacctttctgacataatcaagcaatttagacttaagtggtgctttgtggtatctgaacaattcataacatgtaaataatgtgggaaaatagtattgtttagctcccagagaaacatttgttccacagttaacacactcg

SEQ ID NO: 7847 - DNA, 728 bp, Homo sapiens
  source 1..728: mol_type = unassigned DNA
acgcgcgcaccatgagcggtggtgaagtggtctgctccggatggctccgcaagtcccccccggagaaaaagttgaagcgttatgcatggaagaggagatggttcgtgttacgcagtggccgtttaactggagatccagatgttttggaatattacaaaaatgatcatgccaagaagcctattcgtattattgatttaaatttatgtcaacaagtagatgctggattgacatttaacaaaaaagagtttgaaaacagctacatttttgatatcaacactattgaccggattttctacttggtagcagacagcgaggaggagatgaataagtgggttcgttgtatttgtgacatctgtgggtttaatccaacagaagaagatcctgtgaagccacctggcagctctttacaagcaccagctgatttacctttagctataaatacagcaccaccatccacccaggcagattcatcctctgctactctacctcctccatatcagctaatcaatgttccaccacacctggaaactcttggcattcaggaggatcctcaagactacctgttgctcatcaactgtcaaagcaagaagcccgaacccaccagccaagggtcatcttttgtttctgaagaaggagaggaataccttctactagaagattttgaaagcaaaacgattccattgcaaacgcatgctgattctgcaaaatccacctcttctgaaacagac

SEQ ID NO: 7848 - DNA, 582 bp, Homo sapiens
  source 1..582: mol_type = unassigned DNA
aaaaattatagaggatctgcagactgagacgcattgggactgaaattaggcaattcagagtttctcatgcatagtctcactgtgttgcccagattggtcttgaactcctggcctcaagtgatcctctttccttgccctcccaaagtgctgggattacaggcttgagccaccactcccagccaacagaattcttttcaacagcatggaagaggagatggttcgtgttacgcagtggccgtttaactggagatccagatgttttggaatattacaaaaatgatcatgccaagaagcctattcgtattattgatttaaatttatgtcaacaagtagatgctggattgacatttaacaaaaaagagtttgaaaacagctacatttttgatatcaacactattgaccggattttctacttggtagcagacagcgaggaggagatgaataagtgggttcgttgtatttgtgacatctgtgggtttaatccaacagaagaagatcctgtgaagccacctggcagctctttacaagcaccagctgatttacctttagctataaatacagcaccaccatccacccaggcag

SEQ ID NO: 7849 - DNA, 2477 bp, Homo sapiens
  source 1..2477: mol_type = unassigned DNA
attactttcctagactctagtcatgaacaggatgttggaagtcagaggtacagagaagctgcctttttaggccgctcacatgaaaggcatggaagaggagatggttcgtgttacgcagtggccgtttaactggagatccagatgttttggaatattacaaaaatgatcatgccaagaagcctattcgtattattgatttaaatttatgtcaacaagtagatgctggattgacatttaacaaaaaagagtttgaaaacagctacatttttgatatcaacactattgaccggattttctacttggtagcagacagcgaggaggagatgaataagtgggttcgttgtatttgtgacatctgtgggtttaatccaacagaagaagatcctgtgaagccacctggcagctctttacaagcaccagctgatttacctttagctataaatacagcaccaccatccacccaggcagattcatcctctgctactctacctcctccatatcagctaatcaatgttccaccacacctggaaactcttggcattcaggaggatcctcaagactacctgttgctcatcaactgtcaaagcaagaagcccgaacccaccagaacgcatgctgattctgcaaaatccacctcttctgaaacagactgcaatgataacgtcccttctcataaaaatcctgcttcctcccagagcaaacatggaatgaatggcttttttcagcagcaaatgatatacgactctccaccttcacgtgccccatctgcttcagttgactccagcctttataacctgcccaggagttattcccatgatgttttaccaaaggtgtctccatcaagtactgaagcagatggagaactctatgtttttaataccccatctgggacatcgagtgtagagactcaaatgaggcatgtatctattagttatgacattcctccaacacctggtaatacttatcagattccacgaacatttccagaaggaaccttgggacagacatcaaagctagacactattccagatattcctccacctcggccaccgaaaccacatccagctcatgaccgatctcctgtggaaacgtgtagtatcccacgcaccgcctcagacactgacagtagttactgtatccctacagcagggatgtcgccttcacgtagtaataccatttccactgtggatttaaacaaattgcgaaaagatgctagttctcaagactgctatgatattccacgagcatttccaagtgatagatctagttcacttgaaggcttccataaccactttaaagtcaaaaatgtgttgacagtgggaagtgtttcaagtgaagaactggatgaaaattacgtcccaatgaatcccaattcaccaccacgacaacattccagcagttttacagaaccaattcaggaagcaaattatgtgccaatgactccaggaacatttgatttttcctcatttggaatgcaagttcctcctcctgctcatatgggcttcaggtccagcccaaaaacccctcccagaaggccagttcctgttgcagactgtgaaccaccccccgtggataggaacctcaagccagacagaaaagtcaagccagcgcctttagaaataaaacctttgccagaatgggaagaattacaagccccagttagatctcccatcactaggagttttgctcgagactcttccaggtttcccatgtccccccgaccagattcagtgcatagcacaacttcaagcagtgactcacacgacagtgaagagaattatgttcccatgaacccaaacctgtccagtgaagacccaaatctctttggcagtaacagtcttgatggaggaagcagccctatgatcaagcccaaaggagacaaacaggtggaatacttagatctcgacttagattctgggaaatccacaccaccacgtaagcaaaagagcagtggctcaggcagcagtgtagcagatgagagagtggattatgttgttgttgaccaacagaagaccttggctctaaagagtacccgggaagcctggacagatgggagacagtccacagaatcagaaacgccagcgaagagtgtgaaatgaaaatattgccttgccatttctgaacaaaagaaaactgaattgtaaagataaatcccttttgaagaatgacttgacacttccactctaggtagatcctcaaatgagtagagttgaagtcaaaggacctttctgacataatcaagcaatttagacttaagtggtgctttgtggtatctgaacaattcataacatgtaaataatgtgggaaaatagtattgtttagctcccagagaaacatttgttccacagttaacacactcgtagtattactgtatttatgcactttttcatctaaaacattgttctgggttttcccaatgtaccttaccataattcctttgggagttcttgttttttgtcacactactttatataaca

SEQ ID NO: 7850 - DNA, 1176 bp, Homo sapiens
  source 1..1176: mol_type = unassigned DNA
actttcctagactctagtcatgaacaggatgttggaagtcagaggtacagagaagctgcctttttaggccgctcacatgaaagccagccatctgggcaacaagaaaggcttactacagttagataaatttaaccccttctctgacctggcaaggacaaagtacactggcttctgaagaaactttttcttgggagcaaggtagttatttcaaagcacagaaaaaggcggcggggggcacagagaagcacagagaagcgggggcagttgcacaggttgtttattctgttgatggatattggactggagtgatgagtgttctaggatgggtatttgatgatgccaggggactcaagtaatggctttgcatgaagattacacagtaaagctgcacattgattacctcatcttattagctgatggagatgtttgagaggacaagattgcagggctttcaagcctgtacagctaccaggatttgatcctaagagcttgatcattgtcattgcccatagggactgtgttaagaatagtggtggtttactacttaaacgcatgagagtgttataacagttccctatgtcttttgaattgtttagataaggttaggactttcagatcaacttgagttttaatttttagcatttatagaattctaaaattaatcctgtttgtttttgtcttcctccactaaaatttaagtttgctgaggtagacagttttgtttctggaaccactatccctccagcggctagaacagtggaacatgttcaataaatattcaataaatatttttgaataagtgaatgaatgaacaggttaaatgtaatctttattttttaatgaactatcctttccagagacatacaaattgccagttgatggcattttttatttctttttgtaaaaagagtattttaaaatttgaatgagttctatctaacagataacacagttgagtacattaaaagggaccttgaacacaaaatccatgttttcgtggattagtatttttgcagcttaaatggtgaacgataggattgttagatgcaaataactctggaaattaaagacctttagttgtaactctccctaaaatgtttgtgagagcttgtaaaatgttgttcactttattctattataaaagggcattataataaatatgaagttttgaaacca

SEQ ID NO: 7851 - DNA, 743 bp, Homo sapiens
  source 1..743: mol_type = unassigned DNA
caaggacaaagtacactggcttctgaagaaactttttcttgggagcaaggacttgggggtaacaaaatgaggagtaagtgaagaaagaagaaggcacagcttgtcgagattgatggaccgccccccgcccccgggagagcagcgtaggaaattgcaggatgaaatttgtgtgccagtcttgtcagcacccattcctgttgaaggagagggcatatggatgaggcatggaagaggagatggttcgtgttacgcagtggccgtttaactggagatccagatgttttggaatattacaaaaatgatcatgccaagaagcctattcgtattattgatttaaatttatgtcaacaagtagatgctggattgacatttaacaaaaaagagtttgaaaacagctacatttttgatatcaacactattgaccggattttctacttggtagcagacagcgaggaggagatgaataagtgggttcgttgtatttgtgacatctgtgggtttaatccaacagaagaagatcctgtgaagccacctggcagctctttacaagcaccagctgatttacctttagctataaatacagcaccaccatccacccaggcagattcatcctctgctactctacctcctccatatcagctaatcaatgttccaccacacctggaaactcttggcattcaggaggatcctcaagactacctgttgctcatcaactgtcaaagcaagaagcccgaacccaccag

SEQ ID NO: 7852 - DNA, 571 bp, Homo sapiens
  source 1..571: mol_type = unassigned DNA
tggccgtttaactggagatccagatgttttggaatattacaaaaatgatcatgccaagaagcctattcgtattattgatttaaatttatgtcaacaagtagatgctggattgacatttaacaaaaaagagtttgaaaacagctacatttttgatatcaacactattgaccggattttctacttggtagcagacagcgaggaggagatgaataagtgggttcgttgtatttgtgacatctgtgggtttaatccaacagaagaaggatctcactttgtcgtctaggctggagtacagtggcatgatctctgctcactgcaacctctgcctcccaggttcaagcgattctcgtgcctcagccttctgagtagctggaattacagatcctgtgaagccacctggcagctctttacaagcaccagctgatttacctttagctataaatacagcaccaccatccacccaggcagattcatcctctgctactctacctcctccatatcagctaatcaatgttccaccacacctggaaactcttggcattcaggaggatcctcaagactacctgttgct

SEQ ID NO: 7853 - DNA, 470 bp, Homo sapiens
  source 1..470: mol_type = unassigned DNA
atcctgtgaagccacctggcagctctttacaagcaccagctgatttacctttagctataaatacagcaccaccatccacccaggcagattcatcctctgctactctacctcctccatatcagctaatcaatgttccaccacacctggaaactcttggcattcaggaggatcctcaagactacctgttgctcatcaactgtcaaagcaagaagcccgaacccaccagaaacgccagcgaagagtgtgaaatgaaaatattgccttgccatttctgaacaaaagaaaactgaattgtaaagataaatcccttttgaagaatgacttgacacttccactctaggtagatcctcaaatgagtagagttgaagtcaaaggacctttctgacataatcaagcaatttagacttaagtggtgctttgtggtatctgaacaattcataacatgtaaataatgtgggaaaatagtattg

SEQ ID NO: 7854 - DNA, 559 bp, Homo sapiens
  source 1..559: mol_type = unassigned DNA
ctatgtttttaataccccatctgggacatcgagtgtagagactcaaatgaggcatgtatctattagttatgacattcctccaacacctggtaatacttatcagattccacgaacatttccagaaggaaccttgggacagacatcaaagctagacactattccagatattcctccacctcggccaccgaaaccacatccagctcatgaccgatctcctgtggaaacgtgtagtatcccacgcaccgcctcagacactgacagtagttactgtatccctacagcagggatgtcgccttcacgtagtaataccatttccactgtggatttaaacaaattgcgaaaagatgctagttctcaagactgctatgatattccacgagcatttccaagtgatagatctagttcacttgaaggcttccataaccactttgtaagtataattgaccttggcatcatcaagtgtatttcattgtctaaatcttcataattagtgccatgagactaagtgatatcatgaaataaaagtacgctgagatccatatgaatgagtgtgacttac

SEQ ID NO: 7855 - DNA, 677 bp, Homo sapiens
  source 1..677: mol_type = unassigned DNA
agacacagttctatgagcatcctttttaaaattctgtgtgtgtgcatgtgtgtatgcatatgtataatgagagaaagataataggtcatcccaatgaccctgagagctggcaaagatgggaataaatgttgatagtttgttctttattttagatgctagttctcaagactgctatgatattccacgagcatttccaagtgatagatctagttcacttgaaggcttccataaccactttaaagtcaaaaatgtgttgacagtgggaagtgtttcaagtgaagaactggatgaaaattacgtcccaatgaatcccaattcaccaccacgacaacattccagcagttttacagaaccaattcaggaagcaaattatgtgccaatgactccaggaacatttgatttttcctcatttggaatgcaagttcctcctcctgctcatatgggcttcaggtccagcccaaaaacccctcccagaaggccagttcctgttgcagactgtgaaccaccccccgtggataggaacctcaagccagacagaaaaggtcaaagtcctaaaattttaagactcaaaccccatggtttagagcgaactgattcacaaaccataggtgactttgctacaagaagaaaggtcaagccagcgcctttagaaataaaacctttgccagaatgggaag

SEQ ID NO: 7856 - DNA, 568 bp, Homo sapiens
  source 1..568: mol_type = unassigned DNA
ttttaaaattctgtgtgtgtgcatgtgtgtatgcatatgtataatgagagaaagataataggtcatcccaatgaccctgagagctggcaaagatgggaataaatgttgatagtttgttctttattttagatgctagttctcaagactgctatgatattccacgagcatttccaagtgatagatctagttcacttgaaggcttccataaccactttaaagtcaaaaatgtgttgacagtgggaagtgtttcaagtgaagaactggatgaaaattacgtcccaatgaatcccaattcaccaccacgacaacattccagcagttttacagaaccaattcaggaagcaaattatgtgccaatgactccaggaacatttgatttttcctcatttggaatgcaagttcctcctcctgctcatatgggcttcaggtccagcccaaaaacccctcccagaaggccagttcctgttgcagactgtgaaccaccccccgtggataggaacctcaagccagacagaaaagtcaagccagcgcctttagaaataaaacctttgccagaatgggaagaatt

SEQ ID NO: 7857 - DNA, 577 bp, Homo sapiens
  source 1..577: mol_type = unassigned DNA
attccagcagttttacagaaccaattcaggaagcaaattatgtgccaatgactccaggaacatttgatttttcctcatttggaatgcaagttcctcctcctgctcatatgggcttcaggtccagcccaaaaacccctcccagaaggccagttcctgttgcagactgtgaaccaccccccgtggataggaacctcaagccagacagaaaaggtcaaagtcctaaaattttaagactcaaaccccatggtttagagcgaactgattcacaaaccataggtgactttgctacaagaagaaaggtcaagccagcgcctttagaaataaaacctttgccagaatgggaagaattacaagccccagttagatctcccatcactaggagttttgctcgagactcttccaggtttcccatgtccccccgaccagattcagtgcatagcacaacttcaagcagtgactcacacgacagtgaagagaattatgttcccatgaacccaaacctgtccagtgaagacccataacagtcttgatggaggaagcagccctatgatcaagcccaaaggagacaaacaggtgg

SEQ ID NO: 7858 - DNA, 838 bp, Homo sapiens
  source 1..838: mol_type = unassigned DNA; mol_type = unassigned DNA
tatgtcctcttgaaagcaaatatttaggcttccgtagatgttcaacagtacgagtggtatgtctggtgaatgtctgaccgttgattttgttgtctaatactttcagaatctctttggcagtaacagtcttgatggaggaagcagccctatgatcaagcccaaaggagacaaacaggtggaatacttagatctcgacttagattctgggaaatccacaccaccacgtaagcaaaagagcagtggctcaggcagcagtgtagcagatgagagagtggattatgttgttgttgaccaacagaagaccttggctctaaagagtacccgggaagcctggacagatgggagacagtccacagaatcagaaacgccagcgaagagtgtgaaatgaaaatattgccttgccatttctgaacaaaagaaaactgaattgtaaagataaatcccttttgaagaatgacttgacacttccactctaggtagatcctcaaatgagtagagttgaagtcaaaggacctttctgacataatcaagcaatttagacttaagtggtgctttgtggtatctgaacaattcataacatgtaaataatgtgggaaaatagtattgtttagctcccagagaaacatttgttccacagttaacacactcgtagtattactgtatttatgcactttttcatctaaaacattgttctgggttttcccaatgtaccttaccataattcctttgggagttcttgttttttgtcacactactttatataacaatactaagtcaactaagctacttttagatttggaaattgctgtttacagtctaacaacattaaaatgagagg

SEQ ID NO: 7859 - DNA, 6052 bp, Homo sapiens
  source 1..6052: mol_type = unassigned DNA
gaaattttgagaagtggtgggatgaagaagatccctgaagagaggagtaactgagacaaaggcgaggctagcaatagagagacaagtgagggaattagacctttggtatcatcatgaaaaggcctggaagaaacgctggtttatcctgcggagtggccggatgagcggtgacccagatgttctggaatactacaagaacgatcactccaagaagcctctgcggatcatcaacctgaacttctgtgagcaggtagatgcaggcctgacctttaacaagaaggagctgcaggatagttttgtgtttgacatcaagaccagtgaacgcaccttttacctggtggctgagacagaagaggacatgaataagtgggtccagagcatctgccagatctgtggcttcaatcaggctgaggagagcacagactccctgagaaatgtttcctcagccggtcatggcccccgctcttctccagctgagctcagcagctctagccagcaccttctccgagagcgcaagtcctcagccccatcacactccagccagccaactctgttcacgtttgaaccccctgtgtcaaaccacatgcagcccaccttgtccaccagcgcacctcaggagtatctctacttgcaccagtgcataagccgaagagcagaaaatgcaaggagtgccagcttctctcagggcaccagagcctcttttctcatgaggagtgacacagctgtacaaaaacttgcccagggcaatggacactgtgtcaacgggatcagtggtcaagtccatggcttctatagccttcccaagccgagccggcacaatacagaattcagagacagtacctacgacctcccccgcagcctggcctcccatggccacaccaagggcagcctcacaggctccgagacagataatgaggatgtgtacaccttcaagacgcccagcaacaccctgtgcagggagttcggggacctcctggtagacaatatggatgttccggccaccccactctcagcctaccagatccctaggacattcactctggacaaaaaccacaatgccatgacagtggccactcctggggactcagccatagctcccccaccccgcccccccaagccaagtcaggcagaaacacctcgatggggcagtcctcagcagagaccgccaatcagtgaaaatagcagatctgtcgctgccaccatccccagacgcaacaccctccctgcaatggacaacagccgacttcaccgagcttcttcctgtgagacctacgagtacccacagcgtggtggagagagtgcaggccggtctgctgaatccatgagtgatggagttggctctttcctgccagggaaaatgattgtgggccgatcggacagcaccaattctgaagacaactatgtgcccatgaatccaggttcttccaccctgttggccatggaacgagcaggtgataattcccagagcgtctacatcccaatgagcccaggggcccatcactttgactcacttggctacccatcaacaacccttcctgtgcaccgaggccccagcagaggaagtgagattcagccaccccctgtcaaccgcaacctcaaacctgatcggaaagcaaagccaacaccacttgacctgaggaacaacaccgtcatcgatgaactccccttcaagtcacctatcaccaagtcttggtctagggccaaccacaccttcaactccagctcctcccagtactgccgccccatctccacccagagcatcaccagcacagactcaggagacagcgaagagaactatgtccctatgcaaaacccagtgtctgcatctcccgttcccagtggcacgaacagtcctgcccctaagaagagcaccggcagcgttgattatctggccctggacttccagccgagctccccaagcccccaccgcaagccatctacttcatccgtcacctctgatgagaaggtggactacgttcaggtggacaaggagaagacccaggccctgcagaacaccatgcaggagtggacagacgtgcggcagtcctcagagccttccaagggtgccaagctgtgatgagagggccaccgcagagcccaggaggcagcatctccagagctggcccttcccatctcccctctcccctctcccgttcttcctcccatccacctcctctctactctgccagtctcagccttcaaagcacttgacatcagggaccctgaacccttcccctgggaggtgagggcctgatcaaggcacctcctctgcccactcggggcccagctgtgatttttatcagtaatggccatgcctccacccaccttagttaggagctacttccaaaaagcatccttcagcctcttcctgtcctttagacctgactctctaccagatgtttggagggaagggctggggctctgagccagattccacacctcacgttcagtcacagccctcagctatcttccctccggccactgggctacctctccttcagtcccagaagacaagtctcaccaacccagggagtcaaggaccagcaaaccaaagtggataatggactttttcattcctgtttttcttggcaggagagaagcaaggccactaaaagaggagatggtggagacggaggctcagcagtggtcttgaggggtaaaggacttagatgcccagatgaagagggaaagctgacatctgcagggaacccactttgaggctgaggccatggcaggacagctgctgtggggtgcagaggcagaagatgaaggacaaaaggaagggaaaactgatggccaacctagagcagcaaggagcagggcttggagctcgggtggtggagatgacaaggacactgtggggtctgggtccccagaactctggagctacaggccactctaggcccaagggctagtcctcttccccagtcccctcagaggcccccgccagccccaccttgaaagcagcatacaggggaaggcttggaccaagctgggcgaccaagcacatggggcaggaacacatggtaaaggggtggggaatatgggagggagtgtggtgtggatgggggtgatgcagggactgaggggaaccctgggacaggcacaggctgggcagaggcacagggcagtgcaggggactctgcagtggggtcgggaagtgagtttctttgcagtgagcagtgcagtggaagtcgggcacagaggtagcagacagatgtgaagcagtggtgaaggccatgtagcaagtggggaaatacatccaaagggcctgggagttggggggtgcccaacgcaatccttgggggtgcagggtggagcagaaagtgaaggagggacacgtgcaagagtggtgtgcatggtggtgtgacatgaggaccgttcctaggatgggacagtgggtcaggcaggacaaggagaaagcagggcagaatgatgcctagaggaccacatcaggcatggctgacagcttgtgcccatgggctgtggcgtatgtcagatcgcagggtaggaacgagtctggcctggtgccggcccagtgtttcctcagctcatccgccctctgttgctccctagcattccaggagccatcttggactctcctccccaggtttgaaaggccatcagattagcagggacggggtgtagggcatcacccaaggttccttctcttaaactaagggtgggggatctgaatgtttttatgttgactgttcttgactaaattttcaagagtttcagaagcaacaggacagaccagacgtttcattctaccctggggcgaacagaacttcttcctcccaaacaatgacttcctgccatgtttgatggggacagctaccactgtcctctgcccccattcccctttcagctcccatgagcatgcatagttcaccagaccaatggcctagccattctctaagtcccatcctggaagaagttatttcttcaagagctgcacctctcctcctagcattagtttagatcaactcaaggagtatttattaatggctgctgtctccagtttctggggttaagcactaaggacacaagaatcaatcagaccttctccctgaacttaagatagccacaatcagaaaaaggacaaggacatgagacagtggtgatggccatcagacagagacttcaaatgctgatggagggcagaggaagtacttagggaggttggtgtcagaggcaggagtgggggatcagggaaggtggattctaggaaaagggagtgcctgaggtaggccttagaaggggatgagtcagatttttacagaggaggagggcagggcttgggtccagtggaggaagaaggaaggagaggcttggaaagccttgtgtcttgggaacaaaaggcctttgagcatatgggtccagccactcagaagtgtaggggccatgccttggtgttccaataagtgaatggaagcagtggtggtagctacactgggcagagttggcagggtgctggttcactctgcccagccctgaatgtgtgccttaaaggccccctacaaggggccccatacgacagagcttttaactggtgccttccctgtacccgcagcagccacaagtgggcccagactattgcagcctcccataaacatgtgagcatgttctgagtgtgccatgatgtgagtggacctggctggaatcttcggagagcgactgaggtgttcaaatcgaatctcccaggaggcttccttccagccccctattctggtaactaccaggaggcttccttccagccccctattctggtaactaccaaaatccctcgggtgcaagtgtaggggtagagatggaaggatgagaggtgaaattgaccttttgaaagcaaagctctggctcacaggccccaaactaccagccgtatctagcatatccccaccctccacccactacctcctccaacaaaggagtcaactcagttgaaaaaactggtcctttggcctatccatgggtcaaagtccacctctcctgggggcctggagaggactgagcctacggaaaggggataccttcccactcagcactgcttcacacaggccccctgcctggggctctccaaggagccttcttcacccacttccagctccacttctgcaaggttaagtcaagtgagaacgatgagaaatagggagatggtgtctccttaagtccttgatctgcctgtctgtggaatgggaggttggattagctgcgctgaggtcccatccacagctggtgctcagctgcttgaaggggagactccctcctctgtaacttctttctgggggattggggtgggcagtacctatccccagtcccctcctagcttgactttagtggtttccaatgtagaagttaacaaagtatgccccattcctgtgacaaaagcacaaccattctgaagttactggagcatgggctcagctcatcctccctctggccccttctcccatggggacatctcggcccagcacccctatcccatttccagagttcttccttccccatctgggccttcataaaatgcaggggaagccagactggtctcaggagcgctaaagcccttccgtggggggtcgtctttctgggactagccctgctgtttaggacctgggaccacaatggggtacctgccgagggggtccccaagagatccaggctgtcatgtgatttatggtggcatgtgttgtgtatttgttggctacttgtgtcttgaaatctagaattatttcacgcagaattgtcactgtttgtcaggaagagaaaatgggctagtggaagcccagtcttgagttcttgtcttgttaccatttaaaattgacatttaattttcaaatcactgttggtgcctaatcacttaagttattaatttattctgttgtattcttttttttaaattgtaacatatttatccggtgggtgggacaggagtgtgttcaagtgggtcatgtttttgctgtggtgacacatggtacaggcttggagcttgcaggtccctttctactgtggtgttggagcaggacaataaagtccactagaaatgcacccc

SEQ ID NO: 7860 - DNA, 6092 bp, Homo sapiens
  source 1..6092: mol_type = unassigned DNA
gagctgcgcaccgccggccgctgccccagctgcccgagcccgcgccctcgtccgcgcgacccggcggggggctccaggccggcagcatgagcggcggcggcgacgtggtgtgcaccggctggctgaggaaatcgcctcccgagaagaagttgaggcgctatgcctggaagaaacgctggtttatcctgcggagtggccggatgagcggtgacccagatgttctggaatactacaagaacgatcactccaagaagcctctgcggatcatcaacctgaacttctgtgagcaggtagatgcaggcctgacctttaacaagaaggagctgcaggatagttttgtgtttgacatcaagaccagtgaacgcaccttttacctggtggctgagacagaagaggacatgaataagtgggtccagagcatctgccagatctgtggcttcaatcaggctgaggagagcacagactccctgagaaatgtttcctcagccggtcatggcccccgctcttctccagctgagctcagcagctctagccagcaccttctccgagagcgcaagtcctcagccccatcacactccagccagccaactctgttcacgtttgaaccccctgtgtcaaaccacatgcagcccaccttgtccaccagcgcacctcaggagtatctctacttgcaccagtgcataagccgaagagcagaaaatgcaaggagtgccagcttctctcagggcaccagagcctcttttctcatgaggagtgacacagctgtacaaaaacttgcccagggcaatggacactgtgtcaacgggatcagtggtcaagtccatggcttctatagccttcccaagccgagccggcacaatacagaattcagagacagtacctacgacctcccccgcagcctggcctcccatggccacaccaagggcagcctcacaggctccgagacagataatgaggatgtgtacaccttcaagacgcccagcaacaccctgtgcagggagttcggggacctcctggtagacaatatggatgttccggccaccccactctcagcctaccagatccctaggacattcactctggacaaaaaccacaatgccatgacagtggccactcctggggactcagccatagctcccccaccccgcccccccaagccaagtcaggcagaaacacctcgatggggcagtcctcagcagagaccgccaatcagtgaaaatagcagatctgtcgctgccaccatccccagacgcaacaccctccctgcaatggacaacagccgacttcaccgagcttcttcctgtgagacctacgagtacccacagcgtggtggagagagtgcaggccggtctgctgaatccatgagtgatggagttggctctttcctgccagggaaaatgattgtgggccgatcggacagcaccaattctgaagacaactatgtgcccatgaatccaggttcttccaccctgttggccatggaacgagcaggtgataattcccagagcgtctacatcccaatgagcccaggggcccatcactttgactcacttggctacccatcaacaacccttcctgtgcaccgaggccccagcagaggaagtgagattcagccaccccctgtcaaccgcaacctcaaacctgatcggaaagcaaagccaacaccacttgacctgaggaacaacaccgtcatcgatgaactccccttcaagtcacctatcaccaagtcttggtctagggccaaccacaccttcaactccagctcctcccagtactgccgccccatctccacccagagcatcaccagcacagactcaggagacagcgaagagaactatgtccctatgcaaaacccagtgtctgcatctcccgttcccagtggcacgaacagtcctgcccctaagaagagcaccggcagcgttgattatctggccctggacttccagccgagctccccaagcccccaccgcaagccatctacttcatccgtcacctctgatgagaaggtggactacgttcaggtggacaaggagaagacccaggccctgcagaacaccatgcaggagtggacagacgtgcggcagtcctcagagccttccaagggtgccaagctgtgatgagagggccaccgcagagcccaggaggcagcatctccagagctggcccttcccatctcccctctcccctctcccgttcttcctcccatccacctcctctctactctgccagtctcagccttcaaagcacttgacatcagggaccctgaacccttcccctgggaggtgagggcctgatcaaggcacctcctctgcccactcggggcccagctgtgatttttatcagtaatggccatgcctccacccaccttagttaggagctacttccaaaaagcatccttcagcctcttcctgtcctttagacctgactctctaccagatgtttggagggaagggctggggctctgagccagattccacacctcacgttcagtcacagccctcagctatcttccctccggccactgggctacctctccttcagtcccagaagacaagtctcaccaacccagggagtcaaggaccagcaaaccaaagtggataatggactttttcattcctgtttttcttggcaggagagaagcaaggccactaaaagaggagatggtggagacggaggctcagcagtggtcttgaggggtaaaggacttagatgcccagatgaagagggaaagctgacatctgcagggaacccactttgaggctgaggccatggcaggacagctgctgtggggtgcagaggcagaagatgaaggacaaaaggaagggaaaactgatggccaacctagagcagcaaggagcagggcttggagctcgggtggtggagatgacaaggacactgtggggtctgggtccccagaactctggagctacaggccactctaggcccaagggctagtcctcttccccagtcccctcagaggcccccgccagccccaccttgaaagcagcatacaggggaaggcttggaccaagctgggcgaccaagcacatggggcaggaacacatggtaaaggggtggggaatatgggagggagtgtggtgtggatgggggtgatgcagggactgaggggaaccctgggacaggcacaggctgggcagaggcacagggcagtgcaggggactctgcagtggggtcgggaagtgagtttctttgcagtgagcagtgcagtggaagtcgggcacagaggtagcagacagatgtgaagcagtggtgaaggccatgtagcaagtggggaaatacatccaaagggcctgggagttggggggtgcccaacgcaatccttgggggtgcagggtggagcagaaagtgaaggagggacacgtgcaagagtggtgtgcatggtggtgtgacatgaggaccgttcctaggatgggacagtgggtcaggcaggacaaggagaaagcagggcagaatgatgcctagaggaccacatcaggcatggctgacagcttgtgcccatgggctgtggcgtatgtcagatcgcagggtaggaacgagtctggcctggtgccggcccagtgtttcctcagctcatccgccctctgttgctccctagcattccaggagccatcttggactctcctccccaggtttgaaaggccatcagattagcagggacggggtgtagggcatcacccaaggttccttctcttaaactaagggtgggggatctgaatgtttttatgttgactgttcttgactaaattttcaagagtttcagaagcaacaggacagaccagacgtttcattctaccctggggcgaacagaacttcttcctcccaaacaatgacttcctgccatgtttgatggggacagctaccactgtcctctgcccccattcccctttcagctcccatgagcatgcatagttcaccagaccaatggcctagccattctctaagtcccatcctggaagaagttatttcttcaagagctgcacctctcctcctagcattagtttagatcaactcaaggagtatttattaatggctgctgtctccagtttctggggttaagcactaaggacacaagaatcaatcagaccttctccctgaacttaagatagccacaatcagaaaaaggacaaggacatgagacagtggtgatggccatcagacagagacttcaaatgctgatggagggcagaggaagtacttagggaggttggtgtcagaggcaggagtgggggatcagggaaggtggattctaggaaaagggagtgcctgaggtaggccttagaaggggatgagtcagatttttacagaggaggagggcagggcttgggtccagtggaggaagaaggaaggagaggcttggaaagccttgtgtcttgggaacaaaaggcctttgagcatatgggtccagccactcagaagtgtaggggccatgccttggtgttccaataagtgaatggaagcagtggtggtagctacactgggcagagttggcagggtgctggttcactctgcccagccctgaatgtgtgccttaaaggccccctacaaggggccccatacgacagagcttttaactggtgccttccctgtacccgcagcagccacaagtgggcccagactattgcagcctcccataaacatgtgagcatgttctgagtgtgccatgatgtgagtggacctggctggaatcttcggagagcgactgaggtgttcaaatcgaatctcccaggaggcttccttccagccccctattctggtaactaccaggaggcttccttccagccccctattctggtaactaccaaaatccctcgggtgcaagtgtaggggtagagatggaaggatgagaggtgaaattgaccttttgaaagcaaagctctggctcacaggccccaaactaccagccgtatctagcatatccccaccctccacccactacctcctccaacaaaggagtcaactcagttgaaaaaactggtcctttggcctatccatgggtcaaagtccacctctcctgggggcctggagaggactgagcctacggaaaggggataccttcccactcagcactgcttcacacaggccccctgcctggggctctccaaggagccttcttcacccacttccagctccacttctgcaaggttaagtcaagtgagaacgatgagaaatagggagatggtgtctccttaagtccttgatctgcctgtctgtggaatgggaggttggattagctgcgctgaggtcccatccacagctggtgctcagctgcttgaaggggagactccctcctctgtaacttctttctgggggattggggtgggcagtacctatccccagtcccctcctagcttgactttagtggtttccaatgtagaagttaacaaagtatgccccattcctgtgacaaaagcacaaccattctgaagttactggagcatgggctcagctcatcctccctctggccccttctcccatggggacatctcggcccagcacccctatcccatttccagagttcttccttccccatctgggccttcataaaatgcaggggaagccagactggtctcaggagcgctaaagcccttccgtggggggtcgtctttctgggactagccctgctgtttaggacctgggaccacaatggggtacctgccgagggggtccccaagagatccaggctgtcatgtgatttatggtggcatgtgttgtgtatttgttggctacttgtgtcttgaaatctagaattatttcacgcagaattgtcactgtttgtcaggaagagaaaatgggctagtggaagcccagtcttgagttcttgtcttgttaccatttaaaattgacatttaattttcaaatcactgttggtgcctaatcacttaagttattaatttattctgttgtattcttttttttaaattgtaacatatttatccggtgggtgggacaggagtgtgttcaagtgggtcatgtttttgctgtggtgacacatggtacaggcttggagcttgcaggtccctttctactgtggtgttggagcaggacaataaagtccactagaaatgcacccc

SEQ ID NO: 7861 - DNA, 556 bp, Homo sapiens
  source 1..556: mol_type = unassigned DNA
tagttcaaatgacctcttaaacatggccagtgacagttacagaactctaaatggtgtttaatctacttacaagcattttatattaagtcacccttaaatgggaacatactcattgaaaatcaaagagtgccagcttctctcagggcaccagagcctcttttctcatgaggagtgacacagctgtacaaaaacttgcccagggcaatggacactgtgtcaacgggatcagtggtcaagtccatggcttctatagccttcccaagccgagccggcacaatacagaattcagagacagtacctacgacctcccccgcagcctggcctcccatggccacaccaagggcagcctcacaggctccgagacagataatgaggatgtgtacaccttcaagacgcccagcaacaccctgtgcagggagttcggggacctcctggtagacaatatggatgttccggccaccccactctcagcctaccagatccctaggacattcactctggacaaaaaccacaatgccatgacagtggccactcctggggactcagccatagctcc

SEQ ID NO: 7862 - DNA, 650 bp, Homo sapiens
  source 1..650: mol_type = unassigned DNA
gcccctggcctcccgcgagctgcgcaccgccggccgctgccccagctgcccgagcccgcgccctcgtccgcgcgacccggcggggggctccaggccggcagcatgagcggcggcggcgacgtggtgtgcaccggctggctgaggaaatcgcctcccgagaagaagttgaggcgctatattcactcctgatccctcatctccctcctcaaaaagaagtctccctcaattatcaactctctgatggattttccctggcctggaagaaacgctggtttatcctgcggagtggccggatgagcggtgacccagatgttctggaatactacaagaacgatcactccaagaagcctctgcggatcatcaacctgaacttctgtgagcaggtagatgcaggcctgacctttaacaagaaggagctgcaggatagttttgtgtttgacatcaagaccagtgaacgcaccttttacctggtggctgagacagaagaggacatgaataagtgggtccagagcatctgccagatctgtggcttcaatcaggctgaggagagcacaggagtgccagcttctctcagggcaccagagcctcttttctcatgaggagtgacacagctgtacaaaaacttgcccagggcaatggacactgtgtca

SEQ ID NO: 7863 - DNA, 543 bp, Homo sapiens
  source 1..543: mol_type = unassigned DNA
gtagtaggtccgtctcctcctcccgccgagggacgccagagttaaggagcttcttgctgggaaggggtccctcctttcagccggaacctgacccgcagaatgtatcggaaatgcctggaagaaacgctggtttatcctgcggagtggccggatgagcggtgacccagatgttctggaatactacaagaacgatcactccaagaagcctctgcggatcatcaacctgaacttctgtgagcaggtagatgcaggcctgacctttaacaagaaggagctgcaggatagttttgtgtttgacatcaagaccagtgaacgcaccttttacctggtggctgagacagaagaggacatgaataagtgggtccagagcatctgccagatctgtggcttcaatcaggctgaggagagcacagactccctgagaaatgtttcctcagccggtcatggcccccgctcttctccagctgagctcagcagctctagccagcaccttctccgagagcgcaagtcctcagccccatcacactccagccagccaactct

SEQ ID NO: 7864 - DNA, 567 bp, Homo sapiens
  source 1..567: mol_type = unassigned DNA
agctgcccgagcccgcgccctcgtccgcgcgacccggcggggggctccaggccggcagcatgagcggcggcggcgacgtggtgtgcaccggctggctgaggaaatcgcctcccgagaagaagttgaggcgctattaccttctgtctgacttcaaccccacatctgcttgacaagaattaactcaaatatctcttcttaacacctacctgattctggcatacagcctggaagaaacgctggtttatcctgcggagtggccggatgagcggtgacccagatgttctggaatactacaagaacgatcactccaagaagcctctgcggatcatcaacctgaacttctgtgagcaggtagatgcaggcctgacctttaacaagaaggagctgcaggatagttttgtgtttgacatcaagaccagtgaacgcaccttttacctggtggctgagacagaagaggacatgaataagtgggtccagagcatctgccagatctgtggcttcaatcaggctgaggagagcacagactccctgagaaatgtttcctcagccggtcatggcccccgctct

SEQ ID NO: 7865 - DNA, 568 bp, Homo sapiens
  source 1..568: mol_type = unassigned DNA
gagcccgcgccctcgtccgcgcgacccggcggggggctccaggccggcagcatgagcggcggcggcgacgtggtgtgcaccggctggctgaggaaatcgcctcccgagaagaagttgaggcgctatgcctggaagaaacgctggtttatcctgcggagtggccggatgagcggtgacccagatgttctggaatactacaagaacgatcactccaagaagcctctgcggatcatcaacctgaacttctgtgagcaggtagatgcaggcctgacctttaacaagaaggagctgcaggatagttttgtgtttgacatcaagaccagtgaacgcaccttttacctggtggctgagacagaagaggacatgaataagtgggtccagagcatctgccagatctgtggcttcaatcaggctgaggagagcacaggtatgagaacgcacacagatctttctcatagggggttgaggtgaggcccttggattcctggagcattgagagcaggctctagctaaggtttcctgttggaagagcgttcatagataaagggtaaagagtgtgaaggggttg

SEQ ID NO: 7866 - DNA, 760 bp, Homo sapiens
  source 1..760: mol_type = unassigned DNA
ggggcagcggaacgcgcagagggcacggtgcaagcacgggacagctctgcattggccaaagggatcccaggaggcctggccctcttttctcctgaggctggatcccaaccagcaggaaaaggctggattttcgccttttgtatttgttttggggcccaaccaagaaaaacagtggagggggaataaaacatgtttaaatcttttttttgtcttaaaaccatctttaatttcacagtcacaaaataaaacataactcgaatgttttgatgtttgcagtgacatcgattgtgaaaaaggcaggctcacccgagatccccgccccgaaccccccctgcacactcggcccagcgctgttgcccccggagcggacgtttctgcagctattctgagcacaccttgacgtcggctgagggagcgggacagggtcagcggcgaaggaggcaggccccgcgcggggatctcggaagccctgcggtgcatcatgaagttccagtacaaggaggaccatccctttgagtatcggaaaaaggaaggagaaaagatccggaagaaatatccggacagggtccccgctccggggcttgtgtggggacagccagcctcctcgtgttgatttctgatcacctggtacctggtcgcgataaggcaggactgagacgttttttctccgttttggacaccggcttaagtagttaaaactaccgcaggcagctgcgcagccgaattggagggcagaatatggcttaagtggtagggggac

SEQ ID NO: 7867 - DNA, 1423 bp, Homo sapiens
  source 1..1423: mol_type = unassigned DNA
ttggccaaagggatcccaggaggcctggccctcttttctcctgaggctggatcccaaccagcaggaaaaggctggattttcgccttttgtatttgttttggggcccaaccaagaaaaacagtggagggggaataaaacatgtttaaatcttttttttgtcttaaaaccatctttaatttcacagtcacaaaataaaacataactcgaatgttttgatgtttgcagtgacatcgattgtgaaaaagctctagcgaaaagccgccggtatttctccatctggctctcctctacctccaggcaggctcacccgagatccccgccccgaaccccccctgcacactcggcccagcgctgttgcccccggagcggacgtttctgcagctattctgagcacaccttgacgtcggctgagggagcgggacagggtcagcggcgaaggaggcaggccccgcgcggggatctcggaagccctgcggtgcatcatgaagttccagtacaaggaggaccatccctttgagtatcggaaaaaggaaggagaaaagatccggaagaaatatccggacagggtccccgctccggggcttgtgtggggacagccagcctcctcgtgttgatttctgatcacctggtacctggtcgcgataaggcaggactgagacgttttttctccgttttggacaccggcttaagtagttaaaactaccgcaggcagtgagtaggaacagaaaagtattaggtatctttcagcatccgggcgttttccccattaccccctcccccgcccacttgcctggtgtttctctaatgcaggctgcgcagccgaattggagggcagaatatggcttaagtggtagggggaccagcagctgttggattttggaaatggaggagcggagattttaaaattgtgctctttatcttcaggtgattgtagagaaggctccaaaagccagggtgcctgatctggacaagaggaagtacctagtgccctctgaccttactgttggccagttctacttcttaatccggaagagaatccacctgagacctgaggacgccttattcttctttgtcaacaacaccatccctcccaccagtgctaccatgggccaactgtatgaggacaatcatgaggaagactattttctgtatgtggcctacagtgatgagagtgtctatgggaaatgagtggttggaagcccagcagatgggagcacctggacttgggggtaggggaggggtgtgtgtgcgcgacatggggaaagagggtggctcccaccgcaaggagacagaaggtgaagacatctagaaacattacaccacacacaccgtcatcacattttcacatgctcaattgatattttttgctgcttcctcggcccagggagaaagcatgtcaggacagagctgttggattggcttt

SEQ ID NO: 7868 - DNA, 553 bp, Homo sapiens
  source 1..553: mol_type = unassigned DNA
gtatttgttttggggcccaaccaagaaaaacagtggagggggaataaaacatgtttaaatcttttttttgtcttaaaaccatctttaatttcacagtcacaaaataaaacataactcgaatgttttgatgtttgcagtgacatcgattgtgaaaaaggcaggctcacccgagatccccgccccgaaccccccctgcacactcggcccagcgctgttgcccccggagcggacgtttctgcagctattctgagcacaccttgacgtcggctgagggagcgggacagggtcagcggcgaaggaggcaggccccgcgcggggatctcggaagccctgcggtgcatcatgaagttccagtacaaggaggaccatccctttgagtatcggaaaaaggaaggagaaaagatccggaagaaatatccggacagggtccccgtgattgtagagaaggctccaaaagccagggtgcctgatctggacaagaggaagtacctagtgccctctgaccttactgttggccagttctacttcttaatccggaagagaatccacctga

SEQ ID NO: 7869 - DNA, 1957 bp, Homo sapiens
  source 1..1957: mol_type = unassigned DNA
ctgggcgcctggcgcatggggggcggggcggggctcgcggggtgacgtcacagcccgacgcgccacccagctgtttttgtgctcccagctctagcgaaaagccgccggtatttctccatctggctctcctctacctccaggcaggctcacccgagatccccgccccgaaccccccctgcacactcggcccagcgctgttgcccccggagcggacgtttctgcagctattctgagcacaccttgacgtcggctgagggagcgggacagggtcagcggcgaaggaggcaggccccgcgcggggatctcggaagccctgcggtgcatcatgaagttccagtacaaggaggaccatccctttgagtatcggaaaaaggaaggagaaaagatccggaagaaatatccggacagggtccccgtgattgtagagaaggctccaaaagccagggtgcctgatctggacaagaggaagtacctagtgccctctgaccttactgttggccagttctacttcttaatccggaagagaatccacctgagacctgaggacgccttattcttctttgtcaacaacaccatccctcccaccagtgctaccatgggccaactgtatgaggacaatcatgaggaagactattttctgtatgtggcctacagtgatgagagtgtctatgggaaatgagtggttggaagcccagcagatgggagcacctggacttgggggtaggggaggggtgtgtgtgcgcgacatggggaaagagggtggctcccaccgcaaggagacagaaggtgaagacatctagaaacattacaccacacacaccgtcatcacattttcacatgctcaattgatattttttgctgcttcctcggcccagggagaaagcatgtcaggacagagctgttggattggctttgatagaggaatggggatgatgtaagtttacagtattcctggggtttaattgttgtgcagtttcatagatgggtcaggaggtggacaagttggggccagagatgatggcagtccagcagcaactccctgtgctcccttctctttgggcagagattctatttttgacatttgcacaagacaggtagggaaaggggacttgtggtagtggaccatacctggggaccaaaagagacccactgtaattgatgcattgtggcccctgatcttccctgtctcacacttcttttctcccatcccggttgcaatctcactcagacatcacagtaccaccccaggggtggcagtagacaacaacccagaaatttagacagggatctcttacctttggaaaataggggttaggcatgaaggtggttgtgattaagaagatggttttgttattaaatagcattaaactggaattgacaagagtgttgagcatccctgtctaacctgctctttctctttggtgccccttatctcaccccttccttggaatttaataagtctcaggcatttccaattgtagactaaaaccactcttagcatctcctctagtattttccatgtatcaggacagaggtgtcttatgtagggagggggcaagtatgaagtaaggtaattatatactactctcattcaggattcttgctcccatgctgctgtcccttcaggctcacatgcacaggaatgctacatgatggccagctgcttccctccttggttatcatccactgcagctgctagttagaaaggtttggagggatgacttttagtaaatcatggggattttattgatttattttcacttttgggattttgtggggtgggagtggggagcaggaattgcactcagacatgacatttcaattcatctctgctaatgaaaagggttctttctcttgggggaaatgtgtgtgtcagttctgtcagctgcaagttcttgtataatgaagtcaatgccatcaggccaaggaaataaaataattgcttaccttaaaaatc

SEQ ID NO: 7870 - DNA, 855 bp, Homo sapiens
  source 1..855: mol_type = unassigned DNA
ggctcgcggggtgacgtcacagcccgacgcgccacccagctgtttttgtgctcccagctctagcgaaaagccgccggtatttctccatctggctctcctctacctccaggcaggctcacccgagatccccgccccgaaccccccctgcacactcggcccagcgctgttgcccccggagcggacgtttctgcagctattctgagcacaccttgacgtcggctgagggagcgggacagggtcagcggcgaaggaggcaggccccgcgcggggatctcggaagccctgcggtgcatcatgaagttccagtacaaggaggaccatccctttgagtatcggaaaaaggaaggagaaaagatccggaagaaatatccggacagggtccccgtgattgtagagaaggctccaaaagccagggtgcctgatctggacaagaggaagtacctagtgccctctgaccttactgttggccagttctacttcttaatccggaagagaatccacctgagacctgaggacgccttattcttctttgtcaacaacaccatccctcccaccagtgctaccatgggccaactgtatgaggtaatggttctggttgcacaatactggatgccgtccagtgcagtctggcatcctctagcccttgttctagatgcgttgataacacatctgagaagtggggcagaaggtgttatttatccggatcctcttacatatggcagtgtaaggctctgagagattagatacctcttgttttttagggattagccactctactagatttaatccttctgaaatcttgtctgactatagtcttgtctgactatagtgttttaatgctggactgtttattga

SEQ ID NO: 7871 - DNA, 531 bp, Homo sapiens
  source 1..531: mol_type = unassigned DNA
acagcccgacgcgccacccagctgtttttgtgctcccagctctagcgaaaagccgccggtatttctccatctggctctcctctacctccagtacaaggaggaccatccctttgagtatcggaaaaaggaaggagaaaagatccggaagaaatatccggacagggtccccgtgattgtagagaaggctccaaaagccagggtgcctgatctggacaagaggaagtacctagtgccctctgaccttactgttggccagttctacttcttaatccggaagagaatccacctgagacctgaggacgccttattcttctttgtcaacaacaccatccctcccaccagtgctaccatgggccaactgtatgaggacaatcatgaggaagactattttctgtatgtggcctacagtgatgagagtgtctatgggaaatgagtggttggaagcccagcagatgggagcacctggacttgggggtaggggaggggtgtgtgtgcgcgacatggggaaagagggtggctcccaccgcaagg

SEQ ID NO: 7872 - DNA, 559 bp, Homo sapiens
  source 1..559: mol_type = unassigned DNA
gtttttgtgctcccagctctagcgaaaagccgccggtatttctccatctggctctcctctacctccaggcaggctcacccgagatccccgccccgaaccccccctgcacactcggcccagcgctgttgcccccggagcggacgtttctgcagctattctgagcacaccttgacgtcggctgagggagcgggacagggtcagcggcgaaggaggcaggccccgcgcggggatctcggaagccctgcggtgcatcatgaagttccagtacaaggaggaccatccctttgagtatcggaaaaaggaaggagaaaagatccggaagaaatatccggacagggtccccttggccagttctacttcttaatccggaagagaatccacctgagacctgaggacgccttattcttctttgtcaacaacaccatccctcccaccagtgctaccatgggccaactgtatgaggtaatggttctggttgcacaatactggatgccgtccagtgcagtctggcatcctctagcccttgttctagatgcgttgataacacatctgagaagtg

SEQ ID NO: 7873 - DNA, 584 bp, Homo sapiens
  source 1..584: mol_type = unassigned DNA
gtttttgtgctcccagctctagcgaaaagccgccggtatttctccatctggctctcctctacctccaggcaggctcacccgagatccccgccccgaaccccccctgcacactcggcccagcgctgttgcccccggagcggacgtttctgcagctattctgagcacaccttgacgtcggctgagggagcgggacagggtcagcggcgaaggaggcaggccccgcgcggggatctcggaagccctgcggtgcatcatgaagttccagtacaaggaggaccatccctttgagtatcggaaaaaggaaggagaaaagatccggaagaaatatccggacagggtccccttggccagttctacttcttaatccggaagagaatccacctgagacctgaggacgccttattcttctttgtcaacaacaccatccctcccaccagtgctaccatgggccaactgtatgaggacaatcatgaggaagactattttctgtatgtggcctacagtgatgagagtgtctatgggaaatgagtggttggaagcccagcagatgggagcacctggacttgggggtaggggaggggtgt

SEQ ID NO: 7874 - DNA, 653 bp, Homo sapiens
  source 1..653: mol_type = unassigned DNA
gtgctcccagctctagcgaaaagccgccggtatttctccatctggctctcctctacctccaggcaggctcacccgagatccccgccccgaaccccccctgcacactcggccccgcgcggggatctcggaagccctgcggtgcatcatgaagttccagtacaaggaggaccatccctttgagtatcggaaaaaggaaggagaaaagatccggaagaaatatccggacagggtccccgtgattgtagagaaggctccaaaagccagggtgcctgatctggacaagaggaagtacctagtgccctctgaccttactgttggccagttctacttcttaatccggaagagaatccacctgagacctgaggacgccttattcttctttgtcaacaacaccatccctcccaccagtgctaccatgggccaactgtatgaggtaatggttctggttgcacaatactggatgccgtccagtgcagtctggcatcctctagcccttgttctagatgcgttgataacacatctgagaagtggggcagaaggtgttatttatccggatcctcttacatatggcagtgtaaggctctgagagattagatacctcttgttttttagggattagccactctactagatttaatccttctgaaatcttg

SEQ ID NO: 7875 - DNA, 2321 bp, Homo sapiens
  source 1..2321: mol_type = unassigned DNA
agcgaaaagccgccggtatttctccatctggctctcctctacctccaggcaggctcacccgagatccccgccccgaaccccccctgcacactcggcccagcgctgttgcccccggagcggacgtttctgcagctattctgagcacaccttgacgtcggctgagggagcgggacagggtcagcggcgaaggaggcaggccccgcgcggggatctcggaagccctgcggtgcatcatgaagttccagtacaaggaggaccatccctttgagtatcggaaaaaggaaggagaaaagatccggaagaaatatccggacagggtccccgctccggggcttgtgtggggacagccagcctcctcgtgttgatttctgatcacctggtacctggtcgcgataaggcaggactgagacgttttttctccgttttggacaccggcttaagtagttaaaactaccgcaggcagtgagtaggaacagaaaagtattaggtatctttcagcatccgggcgttttccccattaccccctcccccgcccacttgcctggtgtttctctaatgcaggctgcgcagccgaattggagggcagaatatggcttaagtggtagggggaccagcagctgttggattttggaaatggaggagcggagattttaaaattgtgctctttatcttcagatggagtattcaaagcacaaagaaatgcagtaacttcctaaaggtttcacattgctgatctgtggttgagctggaattccaaccctgtctgaaggactgtggagctctcgggtgattgtagagaaggctccaaaagccagggtgcctgatctggacaagaggaagtacctagtgccctctgaccttactgttggccagttctacttcttaatccggaagagaatccacctgagacctgaggacgccttattcttctttgtcaacaacaccatccctcccaccagtgctaccatgggccaactgtatgaggacaatcatgaggaagactattttctgtatgtggcctacagtgatgagagtgtctatgggaaatgagtggttggaagcccagcagatgggagcacctggacttgggggtaggggaggggtgtgtgtgcgcgacatggggaaagagggtggctcccaccgcaaggagacagaaggtgaagacatctagaaacattacaccacacacaccgtcatcacattttcacatgctcaattgatattttttgctgcttcctcggcccagggagaaagcatgtcaggacagagctgttggattggctttgatagaggaatggggatgatgtaagtttacagtattcctggggtttaattgttgtgcagtttcatagatgggtcaggaggtggacaagttggggccagagatgatggcagtccagcagcaactccctgtgctcccttctctttgggcagagattctatttttgacatttgcacaagacaggtagggaaaggggacttgtggtagtggaccatacctggggaccaaaagagacccactgtaattgatgcattgtggcccctgatcttccctgtctcacacttcttttctcccatcccggttgcaatctcactcagacatcacagtaccaccccaggggtggcagtagacaacaacccagaaatttagacagggatctcttacctttggaaaataggggttaggcatgaaggtggttgtgattaagaagatggttttgttattaaatagcattaaactggaattgacaagagtgttgagcatccctgtctaacctgctctttctctttggtgccccttatctcaccccttccttggaatttaataagtctcaggcatttccaattgtagactaaaaccactcttagcatctcctctagtattttccatgtatcaggacagaggtgtcttatgtagggagggggcaagtatgaagtaaggtaattatatactactctcattcaggattcttgctcccatgctgctgtcccttcaggctcacatgcacaggaatgctacatgatggccagctgcttccctccttggttatcatccactgcagctgctagttagaaaggtttggagggatgacttttagtaaatcatggggattttattgatttattttcacttttgggattttgtggggtgggagtggggagcaggaattgcactcagacatgacatttcaattcatctctgctaatgaaaagggttctttctcttgggggaaatgtgtgtgtcagttctgtcagctgcaagttcttgtataatgaagtcaatgccatcaggccaaggaaataaaataattgcttacctt

SEQ ID NO: 7876 - DNA, 572 bp, Homo sapiens
  source 1..572: mol_type = unassigned DNA
atctggctctcctctacctccaggcaggctcacccgagatccccgccccgaaccccccctgcacactcggcccagcgctgttgcccccggagcggacgtttctgcagctattctgagcacaccttgacgtcggctgagggagcgggacagggtcagcggcgaaggaggcaggccccgcgcggggatctcggaagccctgcggtgcatcatgaagttccagtacaaggaggaccatccctttgagtatcggaaaaaggaaggagaaaagatccggaagaaatatccggacagggtccccgctccggggcttgtgtggggacagccagcctcctcgtgttgatttctgatcacctggtacctggtcgcgataaggcaggactgagacgttttttctccgttttggacaccggcttaagtagttaaaactaccgcaggcagctgcgcagccgaattggagggcagaatatggcttaagtggtagggggaccagcagctgttggattttggaaatggaggagcggagattttaaaattgtgctctttatcttcagatggagtattcaaagcacaaa

SEQ ID NO: 7877 - DNA, 571 bp, Homo sapiens
  source 1..571: mol_type = unassigned DNA
ctctcctctacctccaggcaggctcacccgagatccccgccccgaaccccccctgcacactcggccccgcgcggggatctcggaagccctgcggtgcatcatgaagttccagtacaaggaggaccatccctttgagtatcggaaaaaggaaggagaaaagatccggaagaaatatccggacagggtccccgtgattgtagagaaggctccaaaagccagggtgcctgatctggacaagaggaagtacctagtgccctctgaccttactgttggccagttctacttcttaatccggaagagaatccacctgagacctgaggacgccttattcttctttgtcaacaacaccatccctcccaccagtgctaccatgggccaactgtatgaggacaatcatgaggaagactattttctgtatgtggcctacagtgatgagagtgtctatgggaaatgagtggttggaagcccagcagatgggagcacctggacttgggggtaggggaggggtgtgtgtgcgcgacatggggaaagagggtggctcccaccgcaaggagacagaaggtgaagacat

SEQ ID NO: 7878 - DNA, 3214 bp, Homo sapiens
  source 1..3214: mol_type = unassigned DNA
atctcggaagccctgcggtgcatcatgaagttccagtacaaggaggaccatccctttgagtatcggaaaaaggaaggagaaaagatccggaagaaatatccggacagggtccccgtgagtgtagaggagcggaggggatgggaggggaagggcccgcgggggcgggggcgggtagtcgagatggcttccctggggcgcccaggcggctctggagaagggaggttccgagaattacttaatcctgaacgcccttcagtgccagagccaatggacgtccagactgtagagcttttaaaaccccgtatgcctgggccccgaaccccacttcagggctgacggcgttttgggggccgagccgccgtcttcagtgactcagcaacccacacacggtctcagcagctgagaccgtgtgtgggttgcggtgcacaaaatagggcccctgtgggcgagactggttagatcggggccatggattggctgcctttaagaacgcagggacattgtgctgtgcggtgaggtttgcgcaaacccagtcgatttctgccttggctggttctcctttaatgaagttgactttggctctcatatcattggtcttgggacgaaaaggttcagaagctattcagtaattttcttgcattacagggggttaggggagcacaagacagtcctggcctggaaaacaaggtcacgttctctgcccaacagccctcttgcctcatcgttctaggctccggggcttgtgtggggacagccagcctcctcgtgttgatttctgatcacctggtacctggtcgcgataaggcaggactgagacgttttttctccgttttggacaccggcttaagtagttaaaactaccgcaggcagtgagtaggaacagaaaagtattaggtatctttcagcatccgggcgttttccccattaccccctcccccgcccacttgcctggtgtttctctaatgcaggctgcgcagccgaattggagggcagaatatggcttaagtggtagggggaccagcagctgttggattttggaaatggaggagcggagattttaaaattgtgctctttatcttcaggtaggaacattagtattacgtgtcacataatggtaaaataattgctgttatctgatgtcttttcttgactcacagccactctgggtttcttctctaatccttacctaacgttcgtggttttatagctaccagaagccaccagggccttagcccagcagtagaaacctcttgtaacccttttcctttaaaaagaaaaaaaagtcattagggctcttcattccccaggaattacaaaaaggttttcagcttatagaggggtgagctaatcccttactcgggaaaggatcctttacaaattactttcctggtttctggaccttggatacctgaaaattttgcccagttctggtgataccaatcttttgagcaatgatatttaaaaaatacaatcaagttttattgatagtttaccctagcggtattataagtactcagtctgtaatcattgacttacttccttacacgattacccgttctacagatggagtattcaaagcacaaagaaatgcagtaacttcctaaaggtttcacattgctgatctgtggttgagctggaattccaaccctgtctgaaggactgtggagctctcgggtgattgtagagaaggctccaaaagccagggtgcctgatctggacaagaggaagtacctagtgccctctgaccttactgttggccagttctacttcttaatccggaagagaatccacctgagacctgaggacgccttattcttctttgtcaacaacaccatccctcccaccagtgctaccatgggccaactgtatgaggacaatcatgaggaagactattttctgtatgtggcctacagtgatgagagtgtctatgggaaatgagtggttggaagcccagcagatgggagcacctggacttgggggtaggggaggggtgtgtgtgcgcgacatggggaaagagggtggctcccaccgcaaggagacagaaggtgaagacatctagaaacattacaccacacacaccgtcatcacattttcacatgctcaattgatattttttgctgcttcctcggcccagggagaaagcatgtcaggacagagctgttggattggctttgatagaggaatggggatgatgtaagtttacagtattcctggggtttaattgttgtgcagtttcatagatgggtcaggaggtggacaagttggggccagagatgatggcagtccagcagcaactccctgtgctcccttctctttgggcagagattctatttttgacatttgcacaagacaggtagggaaaggggacttgtggtagtggaccatacctggggaccaaaagagacccactgtaattgatgcattgtggcccctgatcttccctgtctcacacttcttttctcccatcccggttgcaatctcactcagacatcacagtaccaccccaggggtggcagtagacaacaacccagaaatttagacagggatctcttacctttggaaaataggggttaggcatgaaggtggttgtgattaagaagatggttttgttattaaatagcattaaactggaattgacaagagtgttgagcatccctgtctaacctgctctttctctttggtgccccttatctcaccccttccttggaatttaataagtctcaggcatttccaattgtagactaaaaccactcttagcatctcctctagtattttccatgtatcaggacagaggtgtcttatgtagggagggggcaagtatgaagtaaggtaattatatactactctcattcaggattcttgctcccatgctgctgtcccttcaggctcacatgcacaggaatgctacatgatggccagctgcttccctccttggttatcatccactgcagctgctagttagaaaggtttggagggatgacttttagtaaatcatggggattttattgatttattttcacttttgggattttgtggggtgggagtggggagcaggaattgcactcagacatgacatttcaattcatctctgctaatgaaaagggttctttctcttgggggaaatgtgtgtgtcagttctgtcagctgcaagttcttgtataatgaagtcaatgccatcaggccaaggaaataaaataattgcttaccttaaaaa

SEQ ID NO: 7879 - DNA, 565 bp, Homo sapiens
  source 1..565: mol_type = unassigned DNA
acttcagggctgacggcgttttgggggccgagccgccgtcttcagtgactcagcaacccacacacggtctcagcagctgagaccgtgtgtgggttgcggtgcacaaaatagggcccctgtgggcgagactggttagatcggggccatggattggctgcctttaagaacgcagggacattgtgctgtgcggtgaggtttgcgcaaacccagtcgatttctgccttggctggttctcctttaatgaagttgactttggctctcatatcattggtcttgggacgaaaaggctgcgcagccgaattggagggcagaatatggcttaagtggtagggggaccagcagctgttggattttggaaatggaggagcggagattttaaaattgtgctctttatcttcaggtgattgtagagaaggctccaaaagccagggtgcctgatctggacaagaggaagtacctagtgccctctgaccttactgttggccagttctacttcttaatccggaagagaatccacctgagacctgaggacgccttattcttctttgtcaacaacaccatccct

SEQ ID NO: 7880 - DNA, 2294 bp, Homo sapiens
  source 1..2294: mol_type = unassigned DNA
acttcagggctgacggcgttttgggggccgagccgccgtcttcagtgactcagcaacccacacacggtctcagcagctgagaccgtgtgtgggttgcggtgcacaaaatagggcccctgtgggcgagactggttagatcggggccatggattggctgcctttaagaacgcagggacattgtgctgtgcggtgaggtttgcgcaaacccagtcgatttctgccttggctggttctcctttaatgaagttgactttggctctcatatcattggtcttgggacgaaaaggttcagaagctattcagtaattttcttgcattacagggggttaggggagcacaagacagtcctggcctggaaaacaaggtcacgttctctgcccaacagccctcttgcctcatcgttctaggctccggggcttgtgtggggacagccagcctcctcgtgttgatttctgatcacctggtacctggtcgcgataaggcaggactgagacgttttttctccgttttggacaccggcttaagtagttaaaactaccgcaggcagtgagtaggaacagaaaagtattaggtatctttcagcatccgggcgttttccccattaccccctcccccgcccacttgcctggtgtttctctaatgcaggctgcgcagccgaattggagggcagaatatggcttaagtggtagggggaccagcagctgttggattttggaaatggaggagcggagattttaaaattgtgctctttatcttcaggtgattgtagagaaggctccaaaagccagggtgcctgatctggacaagaggaagtacctagtgccctctgaccttactgttggccagttctacttcttaatccggaagagaatccacctgagacctgaggacgccttattcttctttgtcaacaacaccatccctcccaccagtgctaccatgggccaactgtatgaggacaatcatgaggaagactattttctgtatgtggcctacagtgatgagagtgtctatgggaaatgagtggttggaagcccagcagatgggagcacctggacttgggggtaggggaggggtgtgtgtgcgcgacatggggaaagagggtggctcccaccgcaaggagacagaaggtgaagacatctagaaacattacaccacacacaccgtcatcacattttcacatgctcaattgatattttttgctgcttcctcggcccagggagaaagcatgtcaggacagagctgttggattggctttgatagaggaatggggatgatgtaagtttacagtattcctggggtttaattgttgtgcagtttcatagatgggtcaggaggtggacaagttggggccagagatgatggcagtccagcagcaactccctgtgctcccttctctttgggcagagattctatttttgacatttgcacaagacaggtagggaaaggggacttgtggtagtggaccatacctggggaccaaaagagacccactgtaattgatgcattgtggcccctgatcttccctgtctcacacttcttttctcccatcccggttgcaatctcactcagacatcacagtaccaccccaggggtggcagtagacaacaacccagaaatttagacagggatctcttacctttggaaaataggggttaggcatgaaggtggttgtgattaagaagatggttttgttattaaatagcattaaactggaattgacaagagtgttgagcatccctgtctaacctgctctttctctttggtgccccttatctcaccccttccttggaatttaataagtctcaggcatttccaattgtagactaaaaccactcttagcatctcctctagtattttccatgtatcaggacagaggtgtcttatgtagggagggggcaagtatgaagtaaggtaattatatactactctcattcaggattcttgctcccatgctgctgtcccttcaggctcacatgcacaggaatgctacatgatggccagctgcttccctccttggttatcatccactgcagctgctagttagaaaggtttggagggatgacttttagtaaatcatggggattttattgatttattttcacttttgggattttgtggggtgggagtggggagcaggaattgcactcagacatgacatttcaattcatctctgctaatgaaaagggttctttctcttgggggaaatgtgtgtgtcagttctgtcagctgcaagttcttgtataatgaagtcaatgccatcaggccaaggaaataaaataattgcttacctt

SEQ ID NO: 7881 - DNA, 792 bp, Homo sapiens
  source 1..792: mol_type = unassigned DNA
gacggcgttttgggggccgagccgccgtcttcagtgactcagcaacccacacacggtctcagcagctgagaccgtgtgtgggttgcggtgcacaaaatagggcccctgtgggcgagactggttagatcggggccatggattggctgcctttaagaacgcagggacattgtgctgtgcggtgaggtttgcgcaaacccagtcgatttctgccttggctggttctcctttaatgaagttgactttggctctcatatcattggtcttgggacgaaaaggctccggggcttgtgtggggacagccagcctcctcgtgttgatttctgatcacctggtacctggtcgcgataaggcaggactgagacgttttttctccgttttggacaccggcttaagtagttaaaactaccgcaggcagctgcgcagccgaattggagggcagaatatggcttaagtggtagggggaccagcagctgttggattttggaaatggaggagcggagattttaaaattgtgctctttatcttcaggtgattgtagagaaggctccaaaagccagggtgcctgatctggacaagaggaagtacctagtgccctctgaccttactgttggccagttctacttcttaatccggaagagaatccacctgagacctgaggacgccttattcttctttgtcaacaacaccatccctcccaccagtgctaccatgggccaactgtatgaggacaatcatgaggaagactattttctgtatgtggcctacagtgatgagagtgtctatgggaaatga

SEQ ID NO: 7882 - DNA, 1700 bp, Homo sapiens
  source 1..1700: mol_type = unassigned DNA
gacggcgttttgggggccgagccgccgtcttcagtgactcagcaacccacacacggtctcagcagctgagaccgtgtgtgggttgcggtgcacaaaatagggcccctgtgggcgagactggttagatcggggccatggattggctgcctttaagaacgcagggacattgtgctgtgcggtgattgtagagaaggctccaaaagccagggtgcctgatctggacaagaggaagtacctagtgccctctgaccttactgttggccagttctacttcttaatccggaagagaatccacctgagacctgaggacgccttattcttctttgtcaacaacaccatccctcccaccagtgctaccatgggccaactgtatgaggacaatcatgaggaagactattttctgtatgtggcctacagtgatgagagtgtctatgggaaatgagtggttggaagcccagcagatgggagcacctggacttgggggtaggggaggggtgtgtgtgcgcgacatggggaaagagggtggctcccaccgcaaggagacagaaggtgaagacatctagaaacattacaccacacacaccgtcatcacattttcacatgctcaattgatattttttgctgcttcctcggcccagggagaaagcatgtcaggacagagctgttggattggctttgatagaggaatggggatgatgtaagtttacagtattcctggggtttaattgttgtgcagtttcatagatgggtcaggaggtggacaagttggggccagagatgatggcagtccagcagcaactccctgtgctcccttctctttgggcagagattctatttttgacatttgcacaagacaggtagggaaaggggacttgtggtagtggaccatacctggggaccaaaagagacccactgtaattgatgcattgtggcccctgatcttccctgtctcacacttcttttctcccatcccggttgcaatctcactcagacatcacagtaccaccccaggggtggcagtagacaacaacccagaaatttagacagggatctcttacctttggaaaataggggttaggcatgaaggtggttgtgattaagaagatggttttgttattaaatagcattaaactggaattgacaagagtgttgagcatccctgtctaacctgctctttctctttggtgccccttatctcaccccttccttggaatttaataagtctcaggcatttccaattgtagactaaaaccactcttagcatctcctctagtattttccatgtatcaggacagaggtgtcttatgtagggagggggcaagtatgaagtaaggtaattatatactactctcattcaggattcttgctcccatgctgctgtcccttcaggctcacatgcacaggaatgctacatgatggccagctgcttccctccttggttatcatccactgcagctgctagttagaaaggtttggagggatgacttttagtaaatcatggggattttattgatttattttcacttttgggattttgtggggtgggagtggggagcaggaattgcactcagacatgacatttcaattcatctctgctaatgaaaagggttctttctcttgggggaaatgtgtgtgtcagttctgtcagctgcaagttcttgtataatgaagtcaatgccatcaggccaaggaaataaaat

SEQ ID NO: 7883 - DNA, 582 bp, Homo sapiens
  source 1..582: mol_type = unassigned DNA
gcaaacccagtcgatttctgccttggctggttctcctttaatgaagttgactttggctctcatatcattggtcttgggacgaaaaggttcagaagctattcagtaattttcttgcattacagggggttaggggagcacaagacagtcctggcctggaaaacaaggtcacgttctctgcccaacagccctcttgcctcatcgttctaggctccggggcttgtgtggggacagccagcctcctcgtgttgatttctgatcacctggtacctggtcgcgataaggcaggactgagacgttttttctccgttttggacaccggcttaagtagttaaaactaccgcaggcagtgagtaggaacagaaaagtattaggtgattgtagagaaggctccaaaagccagggtgcctgatctggacaagaggaagtacctagtgccctctgaccttactgttggccagttctacttcttaatccggaagagaatccacctgagacctgaggacgccttattcttctttgtcaacaacaccatccctcccaccagtgctaccatgggccaactgtatgaggacaatcatgagg

SEQ ID NO: 7884 - DNA, 379 bp, Homo sapiens
  source 1..379: mol_type = unassigned DNA
gtgctcccagctctagcgaaaagccgccggtatttctccatctggctctcctctacctccaggcaggctcacccgagatccccgccccgaaccccccctgcacactcggcccagcgctgttgcccccggagcggacgtttctgcagctattctgagcacaccttgacgtcggctgagggagcgggacagggtcagcggcgaaggaggcaggccccgcgcggggatctcggaagccctgcggtgcatcatgaagttccagtacaaggaggaccatccctttgagtatcggaaaaaggaaggagaaaagatccggaagaaatatccggacagggtccccgctccggggcttgtgtggggacagccagcctcctcgtgttga

SEQ ID NO: 7885 - DNA, 4510 bp, Homo sapiens
  source 1..4510: mol_type = unassigned DNA
cccttgcaccctccttcttccctccgcccgggagctctccctggtccccggcgccgcctccttccctcccggctccccgctccccgctcccgtggctgccgccgccccggggaagaagagacaggggtggggtttgggggaagcgagagaggaggggagagaccctggccaggctggagcctggattcgaggggaggagggacgggaggaggagaaaggtggaggagaagggaggggggagcggggaggagcggccgggcctggggccttgaggcccggggagagccggggagccgggcccgcgcgccgagatgttgctgctgctgctactggcgccactcttcctccgccccccgggcgcgggcggggcgcagacccccaacgccacctcagaaggttgccagatcatacacccgccctgggaagggggcatcaggtaccggggcctgactcgggaccaggtgaaggctatcaacttcctgccagtggactatgagattgagtatgtgtgccggggggagcgcgaggtggtggggcccaaggtccgcaagtgcctggccaacggctcctggacagatatggacacacccagccgctgtgtccgaatctgctccaagtcttatttgaccctggaaaatgggaaggttttcctgacgggtggggacctcccagctctggacggagcccgggtggatttccggtgtgaccccgacttccatctggtgggcagctcccggagcatctgtagtcagggccagtggagcacccccaagccccactgccaggtgaatcgaacgccacactcagaacggcgcgcagtgtacatcggggcactgtttcccatgagcgggggctggccagggggccaggcctgccagcccgcggtggagatggcgctggaggacgtgaatagccgcagggacatcctgccggactatgagctcaagctcatccaccacgacagcaagtgtgatccaggccaagccaccaagtacctatatgagctgctctacaacgaccctatcaagatcatccttatgcctggctgcagctctgtctccacgctggtggctgaggctgctaggatgtggaacctcattgtgctttcctatggctccagctcaccagccctgtcaaaccggcagcgtttccccactttcttccgaacgcacccatcagccacactccacaaccctacccgcgtgaaactctttgaaaagtggggctggaagaagattgctaccatccagcagaccactgaggtcttcacttcgactctggacgacctggaggaacgagtgaaggaggctggaattgagattactttccgccagagtttcttctcagatccagctgtgcccgtcaaaaacctgaagcgccaggatgcccgaatcatcgtgggacttttctatgagactgaagcccggaaagttttttgtgaggtgtacaaggagcgtctctttgggaagaagtacgtctggttcctcattgggtggtatgctgacaattggttcaagatctacgacccttctatcaactgcacagtggatgagatgactgaggcggtggagggccacatcacaactgagattgtcatgctgaatcctgccaatacccgcagcatttccaacatgacatcccaggaatttgtggagaaactaaccaagcgactgaaaagacaccctgaggagacaggaggcttccaggaggcaccgctggcctatgatgccatctgggccttggcactggccctgaacaagacatctggaggaggcggccgttctggtgtgcgcctggaggacttcaactacaacaaccagaccattaccgaccaaatctaccgggcaatgaactcttcgtcctttgagggtgtctctggccatgtggtgtttgatgccagcggctctcggatggcatggacgcttatcgagcagcttcagggtggcagctacaagaagattggctactatgacagcaccaaggatgatctttcctggtccaaaacagataaatggattggagggtcccccccagctgaccagaccctggtcatcaagacattccgcttcctgtcacagaaactctttatctccgtctcagttctctccagcctgggcattgtcctagctgttgtctgtctgtcctttaacatctacaactcacatgtccgttatatccagaactcacagcccaacctgaacaacctgactgctgtgggctgctcactggctttagctgctgtcttccccctggggctcgatggttaccacattgggaggaaccagtttcctttcgtctgccaggcccgcctctggctcctgggcctgggctttagtctgggctacggttccatgttcaccaagatttggtgggtccacacggtcttcacaaagaaggaagaaaagaaggagtggaggaagactctggaaccctggaagctgtatgccacagtgggcctgctggtgggcatggatgtcctcactctcgccatctggcagatcgtggaccctctgcaccggaccattgagacatttgccaaggaggaacctaaggaagatattgacgtctctattctgccccagctggagcattgcagctccaggaagatgaatacatggcttggcattttctatggttacaaggggctgctgctgctgctgggaatcttccttgcttatgagaccaagagtgtgtccactgagaagatcaatgatcaccgggctgtgggcatggctatctacaatgtggcagtcctgtgcctcatcactgctcctgtcaccatgattctgtccagccagcaggatgcagcctttgcctttgcctctcttgccatagttttctcctcctatatcactcttgttgtgctctttgtgcccaagatgcgcaggctgatcacccgaggggaatggcagtcggaggcgcaggacaccatgaagacagggtcatcgaccaacaacaacgaggaggagaagtcccggctgttggagaaggagaaccgtgaactggaaaagatcattgctgagaaagaggagcgtgtctctgaactgcgccatcaactccagtctcggcagcagctccgctcccggcgccacccaccgacacccccagaaccctctgggggcctgcccaggggaccccctgagccccccgaccggcttagctgtgatgggagtcgagtgcatttgctttataagtgagggtagggtgagggaggacaggccagtagggggagggaaagggagaggggaagggcaggggactcaggaagcagggggtccccatccccagctgggaagaacatgctatccaatctcatctcttgtaaatacatgtccccctgtgagttctgggctgatttgggtctctcatacctctgggaaacagacctttttctctcttactgcttcatgtaattttgtatcacctcttcacaatttagttcgtacctggcttgaagctgctcactgctcacacgctgcctcctcagcagcctcactgcatctttctcttcccatgcaacaccctcttctagttaccacggcaacccctgcagctcctctgcctttgtgctctgttcctgtccagcaggggtctcccaacaagtgctctttccaccccaaaggggcctctccttttctccactgtcataatctctttccatcttacttgcccttctatactttctcacatgtggctccccctgaattttgcttcctttgggagctcattcttttcgccaaggctcacatgctccttgcctctgctctgtgcactcacgctcagcacacatgcatcctcccctctcctgcgtgtgcccactgaacatgctcatgtgtacacacgcttttcccgtatgctttcttcatgttcagtcacatgtgctctcgggtgccctgcattcacagctacgtgtgcccctctcatggtcatgggtctgcccttgagcgtgtttgggtaggcatgtgcaatttgtctagcatgctgagtcatgtctttcctatttgcacacgtccatgtttatccatgtactttccctgtgtaccctccatgtaccttgtgtactttcttcccttaaatcatggtattcttctgacagagccatatgtaccctaccctgcacattgttatgcacttttccccaattcatgtttggtggggccatccacaccctctccttgtcacagaatctccatttctgctcagattccccccatctccattgcattcatgtactaccctcagtctacactcacaatcatcttctcccaagactgctcccttttgttttgtgtttttttgaggggaattaaggaaaaataagtgggggcaggtttggagagctgcttccagtggatagttgatgagaatcctgaccaaaggaaggcacccttgactgttgggatagacagatggacctatggggtgggaggtggtgtccctttcacactgtggtgtctcttggggaaggatctccccgaatctcaataaaccagtgaacagtgtgactcgg

SEQ ID NO: 7886 - DNA, 4070 bp, Homo sapiens
  source 1..4070: mol_type = unassigned DNA
agtcagtccgcgaggagagtccgcggtggcggcgacggtggcgagagccgcgggggccgtaggaagccaaccttccctgcttctccggggccctcgccccctcctccccacaaaatcagggatggaggcgcctccccggcaccctcttagcagccctccccaggaaaagtgtcccccctgagctcctaacgctccccaacagctacccctgccccccacgccatggggcccggggccccttttgcccgggtggggtggccactgccgcttctggttgtgatggcggcaggggtggctccggtgtgggcctcccactccccccatctcccgcggcctcactcgcgggtccccccgcacccctcctcagaacggcgcgcagtgtacatcggggcactgtttcccatgagcgggggctggccagggggccaggcctgccagcccgcggtggagatggcgctggaggacgtgaatagccgcagggacatcctgccggactatgagctcaagctcatccaccacgacagcaagtgtgatccaggccaagccaccaagtacctatatgagctgctctacaacgaccctatcaagatcatccttatgcctggctgcagctctgtctccacgctggtggctgaggctgctaggatgtggaacctcattgtgctttcctatggctccagctcaccagccctgtcaaaccggcagcgtttccccactttcttccgaacgcacccatcagccacactccacaaccctacccgcgtgaaactctttgaaaagtggggctggaagaagattgctaccatccagcagaccactgaggtcttcacttcgactctggacgacctggaggaacgagtgaaggaggctggaattgagattactttccgccagagtttcttctcagatccagctgtgcccgtcaaaaacctgaagcgccaggatgcccgaatcatcgtgggacttttctatgagactgaagcccggaaagttttttgtgaggtgtacaaggagcgtctctttgggaagaagtacgtctggttcctcattgggtggtatgctgacaattggttcaagatctacgacccttctatcaactgcacagtggatgagatgactgaggcggtggagggccacatcacaactgagattgtcatgctgaatcctgccaatacccgcagcatttccaacatgacatcccaggaatttgtggagaaactaaccaagcgactgaaaagacaccctgaggagacaggaggcttccaggaggcaccgctggcctatgatgccatctgggccttggcactggccctgaacaagacatctggaggaggcggccgttctggtgtgcgcctggaggacttcaactacaacaaccagaccattaccgaccaaatctaccgggcaatgaactcttcgtcctttgagggtgtctctggccatgtggtgtttgatgccagcggctctcggatggcatggacgcttatcgagcagcttcagggtggcagctacaagaagattggctactatgacagcaccaaggatgatctttcctggtccaaaacagataaatggattggagggtcccccccagctgaccagaccctggtcatcaagacattccgcttcctgtcacagaaactctttatctccgtctcagttctctccagcctgggcattgtcctagctgttgtctgtctgtcctttaacatctacaactcacatgtccgttatatccagaactcacagcccaacctgaacaacctgactgctgtgggctgctcactggctttagctgctgtcttccccctggggctcgatggttaccacattgggaggaaccagtttcctttcgtctgccaggcccgcctctggctcctgggcctgggctttagtctgggctacggttccatgttcaccaagatttggtgggtccacacggtcttcacaaagaaggaagaaaagaaggagtggaggaagactctggaaccctggaagctgtatgccacagtgggcctgctggtgggcatggatgtcctcactctcgccatctggcagatcgtggaccctctgcaccggaccattgagacatttgccaaggaggaacctaaggaagatattgacgtctctattctgccccagctggagcattgcagctccaggaagatgaatacatggcttggcattttctatggttacaaggggctgctgctgctgctgggaatcttccttgcttatgagaccaagagtgtgtccactgagaagatcaatgatcaccgggctgtgggcatggctatctacaatgtggcagtcctgtgcctcatcactgctcctgtcaccatgattctgtccagccagcaggatgcagcctttgcctttgcctctcttgccatagttttctcctcctatatcactcttgttgtgctctttgtgcccaagatgcgcaggctgatcacccgaggggaatggcagtcggaggcgcaggacaccatgaagacagggtcatcgaccaacaacaacgaggaggagaagtcccggctgttggagaaggagaaccgtgaactggaaaagatcattgctgagaaagaggagcgtgtctctgaactgcgccatcaactccagtctcggcagcagctccgctcccggcgccacccaccgacacccccagaaccctctgggggcctgcccaggggaccccctgagccccccgaccggcttagctgtgatgggagtcgagtgcatttgctttataagtgagggtagggtgagggaggacaggccagtagggggagggaaagggagaggggaagggcaggggactcaggaagcagggggtccccatccccagctgggaagaacatgctatccaatctcatctcttgtaaatacatgtccccctgtgagttctgggctgatttgggtctctcatacctctgggaaacagacctttttctctcttactgcttcatgtaattttgtatcacctcttcacaatttagttcgtacctggcttgaagctgctcactgctcacacgctgcctcctcagcagcctcactgcatctttctcttcccatgcaacaccctcttctagttaccacggcaacccctgcagctcctctgcctttgtgctctgttcctgtccagcaggggtctcccaacaagtgctctttccaccccaaaggggcctctccttttctccactgtcataatctctttccatcttacttgcccttctatactttctcacatgtggctccccctgaattttgcttcctttgggagctcattcttttcgccaaggctcacatgctccttgcctctgctctgtgcactcacgctcagcacacatgcatcctcccctctcctgcgtgtgcccactgaacatgctcatgtgtacacacgcttttcccgtatgctttcttcatgttcagtcacatgtgctctcgggtgccctgcattcacagctacgtgtgcccctctcatggtcatgggtctgcccttgagcgtgtttgggtaggcatgtgcaatttgtctagcatgctgagtcatgtctttcctatttgcacacgtccatgtttatccatgtactttccctgtgtaccctccatgtaccttgtgtactttcttcccttaaatcatggtattcttctgacagagccatatgtaccctaccctgcacattgttatgcacttttccccaattcatgtttggtggggccatccacaccctctccttgtcacagaatctccatttctgctcagattccccccatctccattgcattcatgtactaccctcagtctacactcacaatcatcttctcccaagactgctcccttttgttttgtgtttttttgaggggaattaaggaaaaataagtgggggcaggtttggagagctgcttccagtggatagttgatgagaatcctgaccaaaggaaggcacccttgactgttgggatagacagatggacctatggggtgggaggtggtgtccctttcacactgtggtgtctcttggggaaggatctccccgaatctcaataaaccagtgaacagtgtgactcgg

SEQ ID NO: 7887 - DNA, 4299 bp, Homo sapiens
  source 1..4299: mol_type = unassigned DNA
gcccgggagctctccctggtccccggcgccgcctccttccctcccggctccccgctccccgctcccgtggctgccgccgccccggggaagaagagacaggggtggggtttgggggaagcgagagaggaggggagagaccctggccaggctggagcctggattcgaggggaggagggacgggaggaggagaaaggtggaggagaagggaggggggagcggggaggagcggccgggcctggggccttgaggcccggggagagccggggagccgggcccgcgcgccgagatgttgctgctgctgctactggcgccactcttcctccgccccccgggcgcgggcggggcgcagacccccaacgccacctcagaaggttgccagatcatacacccgccctgggaagggggcatcaggtaccggggcctgactcgggaccaggtgaaggctatcaacttcctgccagtggactatgagattgagtatgtgtgccggggggagcgcgaggtggtggggcccaaggtccgcaagtgcctggccaacggctcctggacagatatggacacacccagccgctgtgtgaatcgaacgccacactcagaacggcgcgcagtgtacatcggggcactgtttcccatgagcgggggctggccagggggccaggcctgccagcccgcggtggagatggcgctggaggacgtgaatagccgcagggacatcctgccggactatgagctcaagctcatccaccacgacagcaagtgtgatccaggccaagccaccaagtacctatatgagctgctctacaacgaccctatcaagatcatccttatgcctggctgcagctctgtctccacgctggtggctgaggctgctaggatgtggaacctcattgtgctttcctatggctccagctcaccagccctgtcaaaccggcagcgtttccccactttcttccgaacgcacccatcagccacactccacaaccctacccgcgtgaaactctttgaaaagtggggctggaagaagattgctaccatccagcagaccactgaggtcttcacttcgactctggacgacctggaggaacgagtgaaggaggctggaattgagattactttccgccagagtttcttctcagatccagctgtgcccgtcaaaaacctgaagcgccaggatgcccgaatcatcgtgggacttttctatgagactgaagcccggaaagttttttgtgaggtgtacaaggagcgtctctttgggaagaagtacgtctggttcctcattgggtggtatgctgacaattggttcaagatctacgacccttctatcaactgcacagtggatgagatgactgaggcggtggagggccacatcacaactgagattgtcatgctgaatcctgccaatacccgcagcatttccaacatgacatcccaggaatttgtggagaaactaaccaagcgactgaaaagacaccctgaggagacaggaggcttccaggaggcaccgctggcctatgatgccatctgggccttggcactggccctgaacaagacatctggaggaggcggccgttctggtgtgcgcctggaggacttcaactacaacaaccagaccattaccgaccaaatctaccgggcaatgaactcttcgtcctttgagggtgtctctggccatgtggtgtttgatgccagcggctctcggatggcatggacgcttatcgagcagcttcagggtggcagctacaagaagattggctactatgacagcaccaaggatgatctttcctggtccaaaacagataaatggattggagggtcccccccagctgaccagaccctggtcatcaagacattccgcttcctgtcacagaaactctttatctccgtctcagttctctccagcctgggcattgtcctagctgttgtctgtctgtcctttaacatctacaactcacatgtccgttatatccagaactcacagcccaacctgaacaacctgactgctgtgggctgctcactggctttagctgctgtcttccccctggggctcgatggttaccacattgggaggaaccagtttcctttcgtctgccaggcccgcctctggctcctgggcctgggctttagtctgggctacggttccatgttcaccaagatttggtgggtccacacggtcttcacaaagaaggaagaaaagaaggagtggaggaagactctggaaccctggaagctgtatgccacagtgggcctgctggtgggcatggatgtcctcactctcgccatctggcagatcgtggaccctctgcaccggaccattgagacatttgccaaggaggaacctaaggaagatattgacgtctctattctgccccagctggagcattgcagctccaggaagatgaatacatggcttggcattttctatggttacaaggggctgctgctgctgctgggaatcttccttgcttatgagaccaagagtgtgtccactgagaagatcaatgatcaccgggctgtgggcatggctatctacaatgtggcagtcctgtgcctcatcactgctcctgtcaccatgattctgtccagccagcaggatgcagcctttgcctttgcctctcttgccatagttttctcctcctatatcactcttgttgtgctctttgtgcccaagatgcgcaggctgatcacccgaggggaatggcagtcggaggcgcaggacaccatgaagacagggtcatcgaccaacaacaacgaggaggagaagtcccggctgttggagaaggagaaccgtgaactggaaaagatcattgctgagaaagaggagcgtgtctctgaactgcgccatcaactccagtctcggcagcagctccgctcccggcgccacccaccgacacccccagaaccctctgggggcctgcccaggggaccccctgagccccccgaccggcttagctgtgatgggagtcgagtgcatttgctttataagtgagggtagggtgagggaggacaggccagtagggggagggaaagggagaggggaagggcaggggactcaggaagcagggggtccccatccccagctgggaagaacatgctatccaatctcatctcttgtaaatacatgtccccctgtgagttctgggctgatttgggtctctcatacctctgggaaacagacctttttctctcttactgcttcatgtaattttgtatcacctcttcacaatttagttcgtacctggcttgaagctgctcactgctcacacgctgcctcctcagcagcctcactgcatctttctcttcccatgcaacaccctcttctagttaccacggcaacccctgcagctcctctgcctttgtgctctgttcctgtccagcaggggtctcccaacaagtgctctttccaccccaaaggggcctctccttttctccactgtcataatctctttccatcttacttgcccttctatactttctcacatgtggctccccctgaattttgcttcctttgggagctcattcttttcgccaaggctcacatgctccttgcctctgctctgtgcactcacgctcagcacacatgcatcctcccctctcctgcgtgtgcccactgaacatgctcatgtgtacacacgcttttcccgtatgctttcttcatgttcagtcacatgtgctctcgggtgccctgcattcacagctacgtgtgcccctctcatggtcatgggtctgcccttgagcgtgtttgggtaggcatgtgcaatttgtctagcatgctgagtcatgtctttcctatttgcacacgtccatgtttatccatgtactttccctgtgtaccctccatgtaccttgtgtactttcttcccttaaatcatggtattcttctgacagagccatatgtaccctaccctgcacattgttatgcacttttccccaattcatgtttggtggggccatccacaccctctccttgtcacagaatctccatttctgctcagattccccccatctccattgcattcatgtactaccctcagtctacactcacaatcatcttctcccaagactgctcccttttgttttgtgtttttttgaggggaattaaggaaaaataagtgggggcaggtttggagagctgcttccagtggatagttgatgagaatcctgaccaaaggaaggcacccttgactgttgggatagacagatggacctatggggtgggaggtggtgtccctttcacactgtggtgtctcttggggaaggatctccccgaatctcaataaaccagtgaacagtgtgactcgg

SEQ ID NO: 7888 - DNA, 2364 bp, Homo sapiens
  source 1..2364: mol_type = unassigned DNA
atgttgctgctgctgctactggcgccactcttcctccgccccccgggcgcgggcggggcgcagacccccaacgccacctcagaaggttgccagatcatacacccgccctgggaagggggcatcaggtaccggggcctgactcgggaccaggtgaaggctatcaacttcctgccagtggactatgagattgagtatgtgtgccggggggagcgcgaggtggtggggcccaaggtccgcaagtgcctggccaacggctcctggacagatatggacacacccagccgctgtgtccgaatctgctccaagtcttatttgaccctggaaaatgggaaggttttcctgacgggtggggacctcccagctctggacggagcccgggtggatttccggtgtgaccccgacttccatctggtgggcagctcccggagcatctgtagtcagggccagtggagcacccccaagccccactgccaggtgaatcgaacgccacactcagaacggcgcgcagtgtacatcggggcactgtttcccatgagcgggggctggccagggggccaggcctgccagcccgcggtggagatggcgctggaggacgtgaatagccgcagggacatcctgccggactatgagctcaagctcatccaccacgacagcaagtgtgatccaggccaagccaccaagtacctatatgagctgctctacaacgaccctatcaagatcatccttatgcctggctgcagctctgtctccacgctggtggctgaggctgctaggatgtggaacctcattgtgctttcctatggctccagctcaccagccctgtcaaaccggcagcgtttccccactttcttccgaacgcacccatcagccacactccacaaccctacccgcgtgaaactctttgaaaagtggggctggaagaagattgctaccatccagcagaccactgaggtcttcacttcgactctggacgacctggaggaacgagtgaaggaggctggaattgagattactttccgccagagtttcttctcagatccagctgtgcccgtcaaaaacctgaagcgccaggatgcccgaatcatcgtgggacttttctatgagactgaagcccggaaagttttttgtgaggtgtacaaggagcgtctctttgggaagaagtacgtctggttcctcattgggtggtatgctgacaattggttcaagatctacgacccttctatcaactgcacagtggatgagatgactgaggcggtggagggccacatcacaactgagattgtcatgctgaatcctgccaatacccgcagcatttccaacatgacatcccaggaatttgtggagaaactaaccaagcgactgaaaagacaccctgaggagacaggaggcttccaggaggcaccgctggcctatgatgccatctgggccttggcactggccctgaacaagacatctggaggaggcggccgttctggtgtgcgcctggaggacttcaactacaacaaccagaccattaccgaccaaatctaccgggcaatgaactcttcgtcctttgagggtgtctctggccatgtggtgtttgatgccagcggctctcggatggcatggacgcttatcgagcagcttcagggtggcagctacaagaagattggctactatgacagcaccaaggatgatctttcctggtccaaaacagataaatggattgttatatccagaactcacagcccaacctgaacaacctgactgctgtgggctgctcactggctttagctgctgtcttccccctggggctcgatggttaccacattgggaggaaccagtttcctttcgtctgccaggcccgcctctggctcctgggcctgggctttagtctgggctacggttccatgttcaccaagatttggtgggtccacacggtcttcacaaagaaggaagaaaagaaggagtggaggaagactctggaaccctggaagctgtatgccacagtgggcctgctggtgggcatggatgtcctcactctcgccatctggcagatcgtggaccctctgcaccggaccattgagacatttgccaaggaggaacctaaggaagatattgacgtctctattctgccccagctggagcattgcagctccaggaagatgaatacatggcttggcattttctatggttacaaggggctgctgctgctgctgggaatcttccttgcttatgagaccaagagtgtgtccactgagaagatcaatgatcaccgggctgtgggcatggctatctacaatgtggcagtcctgtgcctcatcactgctcctgtcaccatgattctgtccagccagcaggatgcagcctttgcctttgcctctc

SEQ ID NO: 7889 - DNA, 659 bp, Homo sapiens
  source 1..659: mol_type = unassigned DNA
gtgcaggagaggtgatgggtaaggctccagatggaagacagagaaggaagtttaatgaaagaggagaaaaaaggcacttgacaggaagagatgccagaaaggagaagaaaacggtaattaatgatgaaagtgagtaattgagaaaggaactaatttgttcgagaaagataagagcaggaattgcagacaggggaggggccccaggagagcttgccctcatctcctcttgtctttcagtgtgatccaggccaagccaccaagtacctatatgagctgctctacaacgaccctatcaagatcatccttatgcctggctgcagctctgtctccacgctggtggctgaggctgctaggatgtggaacctcattgtgctttcctatggctccagctcaccagccctgtcaaaccggcagcgtttccccactttcttccgaacgcacccatcagccacactccacaaccctacccgcgtgaaactctttgaaaagtggggctggaagaagattgctaccatccagcagaccactgaggtcttcacttcgactctggacgacctggaggaacgagtgaaggaggctggaattgagattactttccgccagagtttcttctcagatccagctgtgcccgtcaaaaacctgaagcgccaggatgcccg

SEQ ID NO: 7890 - DNA, 486 bp, Homo sapiens
  source 1..486: mol_type = unassigned DNA
ttgagggtctcataggaaaacagttggaagccagagactgagaagcgttgaggagaggaggggaggctggcaaccatctttcttgtgaccttgtttctgccctagacatttgccaaggaggaacctaaggaagatattgacgtctctattctgccccagctggagcattgcagctccaggaagatgaatacatggcttggcattttctatggttacaaggggctgctgctgctgctgggaatcttccttgcttatgagaccaagagtgtgtccactgagaagatcaatgatcaccgggctgtgggcatggctatctacaatgtggcagtgagcactgaccccatggcattgaccctgtaggctgaccacagcagcccagatatagaggactaggaagaatcaatgctagatctgggatcggttgcttagaagtcttaaaaagtttgttaattcttcaggtctataaagcactttacagtttacaaa

SEQ ID NO: 7891 - DNA, 837 bp, Homo sapiens
  source 1..837: mol_type = unassigned DNA
tttctcaatctatatttgaggatgatcctgaatttggatccttttcaaagggaaagttcaccaggaaactgtctgcatagactccctcccatgggaagtaaactctggatcttgtctgagcctgcagacctgagactccctcaatgtgtctttccctctaggtcctgtgcctcatcactgctcctgtcaccatgattctgtccagccagcaggatgcagcctttgcctttgcctctcttgccatagttttctcctcctatatcactcttgttgtgctctttgtgcccaagatgcgcaggctgatcacccgaggggaatggcagtcggaggcgcaggacaccatgaagacagggtcatcgaccaacaacaacgaggaggagaagtcccggctgttggagaaggagaaccgtgaactggaaaagatcattgctgagaaagaggagcgtgtctctgaactgcgccatcaactccagtctcggcagcagctccgctcccggcgccacccaccgacacccccagaaccctctgggggcctgcccaggggaccccctgagccccccgaccggcttagctgtgatgggagtcgagtgcatttgctttataagtgagggtagggtgagggaggacaggccagtagggggagggaaagggagaggggaagggcaggggactcaggaagcagggggtccccatccccagctgggaagaacatgctatccaatctcatctcttgtaaatacatgtccccctgtgagttctgggctgatttgggtctctcatacctctgggaaacagacctttttctctcttactgcttcatgtaattttgtatcacct

SEQ ID NO: 7892 - DNA, 3523 bp, Homo sapiens
  source 1..3523: mol_type = unassigned DNA
ctcctcctcctcccctccgtcggtcagtcagtccgcgaggagagtccgcggtggcggcgacggtggcgagagccgcgggggccgtaggaagccaaccttccctgcttctccggggccctcgccccctcctccccacaaaatcagggatggaggcgcctccccggcaccctcttagcagccctccccaggaaaagtgtcccccctgagctcctaacgctccccaacagctacccctgccccccacgccatggggcccggggccccttttgcccgggtggggtggccactgccgcttctggttgtgatggcggcaggggtggctccggtgtgggcctcccactccccccatctcccgcggcctcactcgcgggtccccccgcacccctcctcagaacggcgcgcagtgtacatcggggcactgtttcccatgagcgggggctggccagggggccaggcctgccagcccgcggtggagatggcgctggaggacgtgaatagccgcagggacatcctgccggactatgagctcaagctcatccaccacgacagcaagtgtgatccaggccaagccaccaagtacctatatgagctgctctacaacgaccctatcaagatcatccttatgcctggctgcagctctgtctccacgctggtggctgaggctgctaggatgtggaacctcattgtgctttcctatggctccagctcaccagccctgtcaaaccggcagcgtttccccactttcttccgaacgcacccatcagccacactccacaaccctacccgcgtgaaactctttgaaaagtggggctggaagaagattgctaccatccagcagaccactgaggtcttcacttcgactctggacgacctggaggaacgagtgaaggaggctggaattgagattactttccgccagagtttcttctcagatccagctgtgcccgtcaaaaacctgaagcgccaggatgcccgaatcatcgtgggacttttctatgagactgaagcccggaaagttttttgtgaggtgtacaaggagcgtctctttgggaagaagtacgtctggttcctcattgggtggtatgctgacaattggttcaagatctacgacccttctatcaactgcacagtggatgagatgactgaggcggtggagggccacatcacaactgagattgtcatgctgaatcctgccaatacccgcagcatttccaacatgacatcccaggaatttgtggagaaactaaccaagcgactgaaaagacaccctgaggagacaggaggcttccaggaggcaccgctggcctatgatgccatctgggccttggcactggccctgaacaagacatctggaggaggcggccgttctggtgtgcgcctggaggacttcaactacaacaaccagaccattaccgaccaaatctaccgggcaatgaactcttcgtcctttgagggtgtctctggccatgtggtgtttgatgccagcggctctcggatggcatggacgcttatcgagcagcttcagggtggcagctacaagaagattggctactatgacagcaccaaggatgatctttcctggtccaaaacagataaatggattggagggtcccccccagctgaccagaccctggtcatcaagacattccgcttcctgtcacagaaactctttatctccgtctcagttctctccagcctgggcattgtcctagctgttgtctgtctgtcctttaacatctacaactcacatgtccgttatatccagaactcacagcccaacctgaacaacctgactgctgtgggctgctcactggctttagctgctgtcttccccctggggctcgatggttaccacattgggaggaaccagtttcctttcgtctgccaggcccgcctctggctcctgggcctgggctttagtctgggctacggttccatgttcaccaagatttggtgggtccacacggtcttcacaaagaaggaagaaaagaaggagtggaggaagactctggaaccctggaagctgtatgccacagtgggcctgctggtgggcatggatgtcctcactctcgccatctggcagatcgtggaccctctgcaccggaccattgagacatttgccaaggaggaacctaaggaagatattgacgtctctattctgccccagctggagcattgcagctccaggaagatgaatacatggcttggcattttctatggttacaaggggctgctgctgctgctgggaatcttccttgcttatgagaccaagagtgtgtccactgagaagatcaatgatcaccgggctgtgggcatggctatctacaatgtggcagtcctgtgcctcatcactgctcctgtcaccatgattctgtccagccagcaggatgcagcctttgcctttgcctctcttgccatagttttctcctcctatatcactcttgttgtgctctttgtgcccaagatgcgcaggctgatcacccgaggggaatggcagtcggaggcgcaggacaccatgaagacagggtcatcgaccaacaacaacgaggaggagaagtcccggctgttggagaaggagaaccgtgaactggaaaagatcattgctgagaaagaggagcgtgtctctgaactgcgccatcaactccagtctcggcagcagctccgctcccggcgccacccaccgacacccccagaaccctctgggggcctgcccaggggaccccctgagccccccgaccggcttagctgtgatgggagtcgagtgcatttgctttataagtgagggtgcatgtccgttccgaggaatgggatttaatgacctttgatgccaacccatatgacagcgtgaaaaaaatcaaagaacatgtccggtctaagaccaaggttcctgtgcaggaccaggttcttttgctgggctccaagatcttaaagccacggagaagcctctcatcttatggcattgacaaagagaagaccatccaccttaccctgaaagtggtgaagcccagtgatgaggagctgcccttgtttcttgtggagtcaggtgatgaggcaaagaggcacctcctccaggtgcgaaggtccagctcagtggcacaagtgaaagcaatgatcgagactaagacgggtataatccctgagacccagattgtgacttgcaatggaaagagactggaagatgggaagatgatggcagattacggcatcagaaagggcaacttactcttcctggcatgttattgtattggagggtgaccaccctgggcatggggtgttggcaggggtcaaaaagcttatttcttttaatctcttactcaacgaacacatcttctgatgatttcccaaaattaatgagaatgagatgagtagagtaagatttgggtgggatgggtaggatgaagtatattgcccaactctatgtttctttgattctaacacaattaattaagtgacatgatttttactaatgtattactgagactagtaaataaatttttaaggcaaaatagagcattcaaagcca

SEQ ID NO: 7893 - DNA, 4220 bp, Homo sapiens
  source 1..4220: mol_type = unassigned DNA
gaagggaggggggagcggggaggagcggccgggcctggggccttgaggcccggggagagccggggagccgggcccgcgcgccgagatgttgctgctgctgctactggcgccactcttcctccgccccccgggcgcgggcggggcgcagacccccaacgccacctcagaaggttgccagatcatacacccgccctgggaagggggcatcaggtaccggggcctgactcgggaccaggtgaaggctatcaacttcctgccagtggactatgagattgagtatgtgtgccggggggagcgcgaggtggtggggcccaaggtccgcaagtgcctggccaacggctcctggacagatatggacacacccagccgctgtgtccgaatctgctccaagtcttatttgaccctggaaaatgggaaggttttcctgacgggtggggacctcccagctctggacggagcccgggtggatttccggtgtgaccccgacttccatctgtgaatcgaacgccacactcagaacggcgcgcagtgtacatcggggcactgtttcccatgagcgggggctggccagggggccaggcctgccagcccgcggtggagatggcgctggaggacgtgaatagccgcagggacatcctgccggactatgagctcaagctcatccaccacgacagcaagtgtgatccaggccaagccaccaagtacctatatgagctgctctacaacgaccctatcaagatcatccttatgcctggctgcagctctgtctccacgctggtggctgaggctgctaggatgtggaacctcattgtgctttcctatggctccagctcaccagccctgtcaaaccggcagcgtttccccactttcttccgaacgcacccatcagccacactccacaaccctacccgcgtgaaactctttgaaaagtggggctggaagaagattgctaccatccagcagaccactgaggtcttcacttcgactctggacgacctggaggaacgagtgaaggaggctggaattgagattactttccgccagagtttcttctcagatccagctgtgcccgtcaaaaacctgaagcgccaggatgcccgaatcatcgtgggacttttctatgagactgaagcccggaaagttttttgtgaggtgtacaaggagcgtctctttgggaagaagtacgtctggttcctcattgggtggtatgctgacaattggttcaagatctacgacccttctatcaactgcacagtggatgagatgactgaggcggtggagggccacatcacaactgagattgtcatgctgaatcctgccaatacccgcagcatttccaacatgacatcccaggaatttgtggagaaactaaccaagcgactgaaaagacaccctgaggagacaggaggcttccaggaggcaccgctggcctatgatgccatctgggccttggcactggccctgaacaagacatctggaggaggcggccgttctggtgtgcgcctggaggacttcaactacaacaaccagaccattaccgaccaaatctaccgggcaatgaactcttcgtcctttgagggtgtctctggccatgtggtgtttgatgccagcggctctcggatggcatggacgcttatcgagcagcttcagggtggcagctacaagaagattggctactatgacagcaccaaggatgatctttcctggtccaaaacagataaatggattggagggtcccccccagctgaccagaccctggtcatcaagacattccgcttcctgtcacagaaactctttatctccgtctcagttctctccagcctgggcattgtcctagctgttgtctgtctgtcctttaacatctacaactcacatgtccgttatatccagaactcacagcccaacctgaacaacctgactgctgtgggctgctcactggctttagctgctgtcttccccctggggctcgatggttaccacattgggaggaaccagtttcctttcgtctgccaggcccgcctctggctcctgggcctgggctttagtctgggctacggttccatgttcaccaagatttggtgggtccacacggtcttcacaaagaaggaagaaaagaaggagtggaggaagactctggaaccctggaagctgtatgccacagtgggcctgctggtgggcatggatgtcctcactctcgccatctggcagatcgtggaccctctgcaccggaccattgagacatttgccaaggaggaacctaaggaagatattgacgtctctattctgccccagctggagcattgcagctccaggaagatgaatacatggcttggcattttctatggttacaaggggctgctgctgctgctgggaatcttccttgcttatgagaccaagagtgtgtccactgagaagatcaatgatcaccgggctgtgggcatggctatctacaatgtggcagtcctgtgcctcatcactgctcctgtcaccatgattctgtccagccagcaggatgcagcctttgcctttgcctctcttgccatagttttctcctcctatatcactcttgttgtgctctttgtgcccaagatgcgcaggctgatcacccgaggggaatggcagtcggaggcgcaggacaccatgaagacagggtcatcgaccaacaacaacgaggaggagaagtcccggctgttggagaaggagaaccgtgaactggaaaagatcattgctgagaaagaggagcgtgtctctgaactgcgccatcaactccagtctcggcagcagctccgctcccggcgccacccaccgacacccccagaaccctctgggggcctgcccaggggaccccctgagccccccgaccggcttagctgtgatgggagtcgagtgcatttgctttataagtgagggtagggtgagggaggacaggccagtagggggagggaaagggagaggggaagggcaggggactcaggaagcagggggtccccatccccagctgggaagaacatgctatccaatctcatctcttgtaaatacatgtccccctgtgagttctgggctgatttgggtctctcatacctctgggaaacagacctttttctctcttactgcttcatgtaattttgtatcacctcttcacaatttagttcgtacctggcttgaagctgctcactgctcacacgctgcctcctcagcagcctcactgcatctttctcttcccatgcaacaccctcttctagttaccacggcaacccctgcagctcctctgcctttgtgctctgttcctgtccagcaggggtctcccaacaagtgctctttccaccccaaaggggcctctccttttctccactgtcataatctctttccatcttacttgcccttctatactttctcacatgtggctccccctgaattttgcttcctttgggagctcattcttttcgccaaggctcacatgctccttgcctctgctctgtgcactcacgctcagcacacatgcatcctcccctctcctgcgtgtgcccactgaacatgctcatgtgtacacacgcttttcccgtatgctttcttcatgttcagtcacatgtgctctcgggtgccctgcattcacagctacgtgtgcccctctcatggtcatgggtctgcccttgagcgtgtttgggtaggcatgtgcaatttgtctagcatgctgagtcatgtctttcctatttgcacacgtccatgtttatccatgtactttccctgtgtaccctccatgtaccttgtgtactttcttcccttaaatcatggtattcttctgacagagccatatgtaccctaccctgcacattgttatgcacttttccccaattcatgtttggtggggccatccacaccctctccttgtcacagaatctccatttctgctcagattccccccatctccattgcattcatgtactaccctcagtctacactcacaatcatcttctcccaagactgctcccttttgttttgtgtttttttgaggggaattaaggaaaaataagtgggggcaggtttggagagctgcttccagtggatagttgatgagaatcctgaccaaaggaaggcacccttgactgttgggatagacagatggacctatggggtgggaggtggtgtccctttcacactgtggtgtctcttggggaaggatctccccgaatctcaataaaccagtgaacagtgtgactcgg

SEQ ID NO: 7894 - DNA, 1802 bp, Homo sapiens
  source 1..1802: mol_type = unassigned DNA
ttatatccagaactcacagcccaacctgaacaacctgactgctgtgggctgctcactggctttagctgctgtcttccccctggggctcgatggttaccacattgggaggaaccagtttcctttcgtctgccaggcccgcctctggctcctgggcctgggctttagtctgggctacggttccatgttcaccaagatttggtgggtccacacggtcttcacaaagaaggaagaaaagaaggagtggaggaagactctggaaccctggaagctgtatgccacagtgggcctgctggtgggcatggatgtcctcactctcgccatctggcagatcgtggaccctctgcaccggaccattgagacatttgccaaggaggaacctaaggaagatattgacgtctctattctgccccagctggagcattgcagctccaggaagatgaatacatggcttgctgtgatgggagtcgagtgcatttgctttataagtgagggtagggtgagggaggacaggccagtagggggagggaaagggagaggggaagggcaggggactcaggaagcagggggtccccatccccagctgggaagaacatgctatccaatctcatctcttgtaaatacatgtccccctgtgagttctgggctgatttgggtctctcatacctctgggaaacagacctttttctctcttactgcttcatgtaattttgtatcacctcttcacaatttagttcgtacctggcttgaagctgctcactgctcacacgctgcctcctcagcagcctcactgcatctttctcttcccatgcaacaccctcttctagttaccacggcaacccctgcagctcctctgcctttgtgctctgttcctgtccagcaggggtctcccaacaagtgctctttccaccccaaaggggcctctccttttctccactgtcataatctctttccatcttacttgcccttctatactttctcacatgtggctccccctgaattttgcttcctttgggagctcattcttttcgccaaggctcacatgctccttgcctctgctctgtgcactcacgctcagcacacatgcatcctcccctctcctgcgtgtgcccactgaacatgctcatgtgtacacacgcttttcccgtatgctttcttcatgttcagtcacatgtgctctcgggtgccctgcattcacagctacgtgtgcccctctcatggtcatgggtctgcccttgagcgtgtttgggtaggcatgtgcaatttgtctagcatgctgagtcatgtctttcctatttgcacacgtccatgtttatccatgtactttccctgtgtaccctccatgtaccttgtgtactttcttcccttaaatcatggtattcttctgacagagccatatgtaccctaccctgcacattgttatgcacttttccccaattcatgtttggtggggccatccacaccctctccttgtcacagaatctccatttctgctcagattccccccatctccattgcattcatgtactaccctcagtctacactcacaatcatcttctcccaagactgctcccttttgttttgtgtttttttgaggggaattaaggaaaaataagtgggggcaggtttggagagctgcttccagtggatagttgatgagaatcctgaccaaaggaaggcacccttgactgttgggatagacagatggacctatggggtgggaggtggtgtccctttcacactgtggtgtctcttggggaaggatctccccgaatctcaataaaccagtgaacagtgtgactcgg

SEQ ID NO: 7895 - DNA, 1252 bp, Homo sapiens
  source 1..1252: mol_type = unassigned DNA
ggctgccgccgccccggggaagaagagacaggggtggggtttgggggaagcgagagaggaggggagagaccctggccaggctggagcctggattcgaggggaggagggacgggaggaggagaaaggtggaggagaagggaggggggagcggggaggagcggccgggcctggggccttgaggcccggggagagccggggagccgggcccgcgcgccgagatgttgctgctgctgctactggcgccactcttcctccgccccccgggcgcgggcggggcgcagacccccaacgccacctcagaaggttgccagatcatacacccgccctgggaagggggcatcaggtaccggggcctgactcgggaccaggtgaaggctatcaacttcctgccagtggactatgagattgagtatgtgtgccggggggagcgcgaggtggtggggcccaaggtccgcaagtgcctggccaacggctcctggacagatatggacacacccagccgctgtgtccgaatctgctccaagtcttatttgaccctggaaaatgggaaggttttcctgacgggtggggacctcccagctctggacggagcccgggtggatttccggtgtgaccccgacttccatctggtgggcagctcccggagcatctgtagtcagggccagtggagcacccccaagccccactgccagggtgaggggaacagctgcctgcatgcagctgatgaggacgcttgtgtgaggatgggagtggggtgggaatggataatgggaaagaatggagagctataaaaatgtgggggaggacactggaaaggggagatgaaagtccctttttcctccatcacctgcctcaaacttcctcttgcagtccccggtatcctctgtaggttgggggcttccttcctttaccttttaaaaaaatcttcctgctcccgattcttagacctcacgttttctcttttcctttatgaatctcacctctctcaccttcttcaggtttaaatactccaattttccctttctctaaacttagaaatttccatgcatcaccctcttctagaattcatccctcaccattccttatataattgatttattgtaaagactcagaaataaatcaaacattctactaagaaaaattgagaaggggagctctgggggtggaaacatattagggtaaaagacttaaaattggaggcagcattatcagaagatgaagaacaactcagggatggggtgggaagaagaca

SEQ ID NO: 7896 - DNA, 407 bp, Homo sapiens
  source 1..407: mol_type = unassigned DNA
gatgccagcggctctcggatggcatggacgcttatcgagcagcttcagggtggcagctacaagaagattggctactatgacagcaccaaggatgatctttcctggtccaaaacagataaatggattgttatatccagaactcacagcccaacctgaacaacctgactgctgtgggctgctcactggctttagctgctgtcttccccctggggctcgatggttaccacattgggaggaaccagtttcctttcgtctgccaggtgaggaggtggtgggcaaattccttacaggatgtgactctcccacccgtctcaggagcaccttccatgatttatgattctctgcccttcctcctcagctttccctgactcttgtccctgttctttccttctagcatcacccctctg

SEQ ID NO: 7897 - DNA, 1739 bp, Homo sapiens
  source 1..1739: mol_type = unassigned DNA
agatgttgctgctgctgctactggcgccactcttcctccgccccccgggcgcgggcggggcgcagacccccaacgccacctcagaaggttgccagatcatacacccgccctgggaagggggcatcaggtaccggggcctgactcgggaccaggtgaaggctatcaacttcctgccagtggactatgagattgagtatgtgtgccggggggagcgcgaggtggtggggcccaaggtccgcaagtgcctggccaacggctcctggacagatatggacacacccagccgctgtgtccgaatctgctccaagtcttatttgaccctggaaaatgggaaggttttcctgacgggtggggacctcccagctctggacggagcccgggtggatttccggtgtgaccccgacttccatctggtgggcagctcccggagcatctgtagtcagggccagtggagcacccccaagccccactgccaggtgaatcgaacgccacactcagaacggcgcgcagtgtacatcggggcactgtttcccatgagcgggggctggccagggggccaggcctgccagcccgcggtggagatggcgctggaggacgtgaatagccgcagggacatcctgccggactatgagctcaagctcatccaccacgacagcaagtgtgatccaggccaagccaccaagtacctatatgagctgctctacaacgaccctatcaagatcatccttatgcctggctgcagctctgtctccacgctggtggctgaggctgctaggatgtggaacctcattgtgctttcctatggctccagctcaccagccctgtcaaaccggcagcgtttccccactttcttccgaacgcacccatcagccacactccacaaccctacccgcgtgaaactctttgaaaagtggggctggaagaagattgctaccatccagcagaccactgaggtcttcacttcgactctggacgacctggaggaacgagtgaaggaggctggaattgagattactttccgccagagtttcttctcagatccagctgtgcccgtcaaaaacctgaagcgccaggatgcccgaatcatcgtgggacttttctatgagactgaagcccggaaagttttttgtgaggtgtacaaggagcgtctctttgggaagaagtacgtctggttcctcattgggtggtatgctgacaattggttcaagatctacgacccttctatcaactgcacagtggatgagatgactgaggcggtggagggccacatcacaactgagattgtcatgctgaatcctgccaatacccgcagcatttccaacatgacatcccaggaatttgtggagaaactaaccaagcgactgaaaagacaccctgaggagacaggaggcttccaggaggcaccgctggcctatgatgccatctgggccttggcactggccctgaacaagacatctggaggaggcggccgttctggtgtgcgcctggaggacttcaactacaacaaccagaccattaccgaccaaatctaccgggcaatgaactcttcgtcctttgagggtgtctctggccatgtggtgtttgatgccagcggctctcggatggcatggacgcttatcgagcagcttcagggtggcagctacaagaagattggctactatgacagcaccaaggatgatctttcctggtccaaaacagataaatggattgttatatccagaactcacagcccaacctga

SEQ ID NO: 7898 - DNA, 3506 bp, Homo sapiens
  source 1..3506: mol_type = unassigned DNA
ctcctcctcctcccctccgtcggtcagtcagtccgcgaggagagtccgcggtggcggcgacggtggcgagagccgcgggggccgtaggaagccaaccttccctgcttctccggggccctcgccccctcctccccacaaaatcagggatggaggcgcctccccggcaccctcttagcagccctccccaggaaaagtgtcccccctgagctcctaacgctccccaacagctacccctgccccccacgccatggggcccggggccccttttgcccgggtggggtggccactgccgcttctggttgtgatggcggcaggggtggctccggtgtgggcctcccactccccccatctcccgcggcctcactcgcgggtccccccgcacccctcctcagaacggcgcgcagtgtacatcggggcactgtttcccatgagcgggggctggccagggggccaggcctgccagcccgcggtggagatggcgctggaggacgtgaatagccgcagggacatcctgccggactatgagctcaagctcatccaccacgacagcaagtgtgatccaggccaagccaccaagtacctatatgagctgctctacaacgaccctatcaagatcatccttatgcctggctgcagctctgtctccacgctggtggctgaggctgctaggatgtggaacctcattgtgctttcctatggctccagctcaccagccctgtcaaaccggcagcgtttccccactttcttccgaacgcacccatcagccacactccacaaccctacccgcgtgaaactctttgaaaagtggggctggaagaagattgctaccatccagcagaccactgaggtcttcacttcgactctggacgacctggaggaacgagtgaaggaggctggaattgagattactttccgccagagtttcttctcagatccagctgtgcccgtcaaaaacctgaagcgccaggatgcccgaatcatcgtgggacttttctatgagactgaagcccggaaagttttttgtgaggtgtacaaggagcgtctctttgggaagaagtacgtctggttcctcattgggtggtatgctgacaattggttcaagatctacgacccttctatcaactgcacagtggatgagatgactgaggcggtggagggccacatcacaactgagattgtcatgctgaatcctgccaatacccgcagcatttccaacatgacatcccaggaatttgtggagaaactaaccaagcgactgaaaagacaccctgaggagacaggaggcttccaggaggcaccgctggcctatgatgccatctgggccttggcactggccctgaacaagacatctggaggaggcggccgttctggtgtgcgcctggaggacttcaactacaacaaccagaccattaccgaccaaatctaccgggcaatgaactcttcgtcctttgagggtgtctctggccatgtggtgtttgatgccagcggctctcggatggcatggacgcttatcgagcagcttcagggtggcagctacaagaagattggctactatgacagcaccaaggatgatctttcctggtccaaaacagataaatggattggagggtcccccccagctgaccagaccctggtcatcaagacattccgcttcctgtcacagaaactctttatctccgtctcagttctctccagcctgggcattgtcctagctgttgtctgtctgtcctttaacatctacaactcacatgtccgttatatccagaactcacagcccaacctgaacaacctgactgctgtgggctgctcactggctttagctgctgtcttccccctggggctcgatggttaccacattgggaggaaccagtttcctttcgtctgccaggcccgcctctggctcctgggcctgggctttagtctgggctacggttccatgttcaccaagatttggtgggtccacacggtcttcacaaagaaggaagaaaagaaggagtggaggaagactctggaaccctggaagctgtatgccacagtgggcctgctggtgggcatggatgtcctcactctcgccatctggcagatcgtggaccctctgcaccggaccattgagacatttgccaaggaggaacctaaggaagatattgacgtctctattctgccccagctggagcattgcagctccaggaagatgaatacatggcttggcattttctatggttacaaggggctgctgctgctgctgggaatcttccttgcttatgagaccaagagtgtgtccactgagaagatcaatgatcaccgggctgtgggcatggctatctacaatgtggcagtcctgtgcctcatcactgctcctgtcaccatgattctgtccagccagcaggatgcagcctttgcctttgcctctcttgccatagttttctcctcctatatcactcttgttgtgctctttgtgcccaagatgcgcaggctgatcacccgaggggaatggcagtcggaggcgcaggacaccatgaagacagggtcatcgaccaacaacaacgaggaggagaagtcccggctgttggagaaggagaaccgtgaactggaaaagatcattgctgagaaagaggagcgtgtctctgaactgcgccatcaactccagtctcggcagcagctccgctcccggcgccacccaccgacacccccagaaccctctgggggcctgcccaggggaccccctgagccccccgaccggcttagctgtgatgggagtcgagtgcatttgctttataagtgagggtgcatgtccgttccgaggaatgggatttaatgacctttgatgccaacccatatgacagcgtgaaaaaaatcaaagaacatgtccggtctaagaccaaggttcctgtgcaggaccaggttcttttgctgggctccaagatcttaaagccacggagaagcctctcatcttatggcattgacaaagagaagaccatccaccttaccctgaaagtggtgaagcccagtgatgaggagctgcccttgtttcttgtggagtcaggtgatgaggcaaagaggcacctcctccaggtgcgaaggtccagctcagtggcacaagtgaaagcaatgatcgagactaagacgggtataatccctgagacccagattgtgacttgcaatggaaagagactggaagatgggaagatgatggcagattacggcatcagaaagggcaacttactcttcctggcatgttattgtattggagggtgaccaccctgggcatggggtgttggcaggggtcaaaaagcttatttcttttaatctcttactcaacgaacacatcttctgatgatttcccaaaattaatgagaatgagatgagtagagtaagatttgggtgggatgggtaggatgaagtatattgcccaactctatgtttctttgattctaacacaattaattaagtgacatgatttttactaatgtattactgagactagtaaataaatttttaaggcaaaa

SEQ ID NO: 7899 - DNA, 4286 bp, Homo sapiens
  source 1..4286: mol_type = unassigned DNA
gggagctctccctggtccccggcgccgcctccttccctcccggctccccgctccccgctcccgtggctgccgccgccccggggaagaagagacaggggtggggtttgggggaagcgagagaggaggggagagaccctggccaggctggagcctggattcgaggggaggagggacgggaggaggagaaaggtggaggagaagggaggggggagcggggaggagcggccgggcctggggccttgaggcccggggagagccggggagccgggcccgcgcgccgagatgttgctgctgctgctactggcgccactcttcctccgccccccgggcgcgggcggggcgcagacccccaacgccacctcagaaggttgccagatcatacacccgccctgggaagggggcatcaggtaccggggcctgactcgggaccaggtgaaggctatcaacttcctgccagtggactatgagattgagtatgtgtgccggggggagcgcgaggtggtggggcccaaggtccgcaagtgcctggccaacggctcctggacagatatggacacacccagccgctgtggcaccctcccctcagaaacgcaggcttctgctctccccggtcttcagcatggacaggtgtgggagggggctggggatcaggccagggaagctgggcgccagtggtaactcttctctgatccccgtctttcctgctgccagtgaatcgaacgccacactcagaacggcgcgcagtgtacatcggggcactgtttcccatgagcgggggctggccagggggccaggcctgccagcccgcggtggagatggcgctggaggacgtgaatagccgcagggacatcctgccggactatgagctcaagctcatccaccacgacagcaagtgtgatccaggccaagccaccaagtacctatatgagctgctctacaacgaccctatcaagatcatccttatgcctggctgcagctctgtctccacgctggtggctgaggctgctaggatgtggaacctcattgtgctttcctatggctccagctcaccagccctgtcaaaccggcagcgtttccccactttcttccgaacgcacccatcagccacactccacaaccctacccgcgtgaaactctttgaaaagtggggctggaagaagattgctaccatccagcagaccactgaggtcttcacttcgactctggacgacctggaggaacgagtgaaggaggctggaattgagattactttccgccagagtttcttctcagatccagctgtgcccgtcaaaaacctgaagcgccaggatgcccgaatcatcgtgggacttttctatgagactgaagcccggaaagttttttgtgaggtgtacaaggagcgtctctttgggaagaagtacgtctggttcctcattgggtggtatgctgacaattggttcaagatctacgacccttctatcaactgcacagtggatgagatgactgaggcggtggagggccacatcacaactgagattgtcatgctgaatcctgccaatacccgcagcatttccaacatgacatcccaggaatttgtggagaaactaaccaagcgactgaaaagacaccctgaggagacaggaggcttccaggaggcaccgctggcctatgatgccatctgggccttggcactggccctgaacaagacatctggaggaggcggccgttctggtgtgcgcctggaggacttcaactacaacaaccagaccattaccgaccaaatctaccgggcaatgaactcttcgtcctttgagggtgtctctggccatgtggtgtttgatgccagcggctctcggatggcatggacgcttatcgagcagcttcagggtggcagctacaagaagattggctactatgacagcaccaaggatgatctttcctggtccaaaacagataaatggattgttatatccagaactcacagcccaacctgaacaacctgactgctgtgggctgctcactggctttagctgctgtcttccccctggggctcgatggttaccacattgggaggaaccagtttcctttcgtctgccaggcccgcctctggctcctgggcctgggctttagtctgggctacggttccatgttcaccaagatttggtgggtccacacggtcttcacaaagaaggaagaaaagaaggagtggaggaagactctggaaccctggaagctgtatgccacagtgggcctgctggtgggcatggatgtcctcactctcgccatctggcagatcgtggaccctctgcaccggaccattgagacatttgccaaggaggaacctaaggaagatattgacgtctctattctgccccagctggagcattgcagctccaggaagatgaatacatggcttggcattttctatggttacaaggggctgctgctgctgctgggaatcttccttgcttatgagaccaagagtgtgtccactgagaagatcaatgatcaccgggctgtgggcatggctatctacaatgtggcagtcctgtgcctcatcactgctcctgtcaccatgattctgtccagccagcaggatgcagcctttgcctttgcctctcttgccatagttttctcctcctatatcactcttgttgtgctctttgtgcccaagatgcgcaggctgatcacccgaggggaatggcagtcggaggcgcaggacaccatgaagacagggtcatcgaccaacaacaacgaggaggagaagtcccggctgttggagaaggagaaccgtgaactggaaaagatcattgctgagaaagaggagcgtgtctctgaactgcgccatcaactccagtctcggcagcagctccgctcccggcgccacccaccgacacccccagaaccctctgggggcctgcccaggggaccccctgagccccccgaccggcttagctgtgatgggagtcgagtgcatttgctttataagtgagggtagggtgagggaggacaggccagtagggggagggaaagggagaggggaagggcaggggactcaggaagcagggggtccccatccccagctgggaagaacatgctatccaatctcatctcttgtaaatacatgtccccctgtgagttctgggctgatttgggtctctcatacctctgggaaacagacctttttctctcttactgcttcatgtaattttgtatcacctcttcacaatttagttcgtacctggcttgaagctgctcactgctcacacgctgcctcctcagcagcctcactgcatctttctcttcccatgcaacaccctcttctagttaccacggcaacccctgcagctcctctgcctttgtgctctgttcctgtccagcaggggtctcccaacaagtgctctttccaccccaaaggggcctctccttttctccactgtcataatctctttccatcttacttgcccttctatactttctcacatgtggctccccctgaattttgcttcctttgggagctcattcttttcgccaaggctcacatgctccttgcctctgctctgtgcactcacgctcagcacacatgcatcctcccctctcctgcgtgtgcccactgaacatgctcatgtgtacacacgcttttcccgtatgctttcttcatgttcagtcacatgtgctctcgggtgccctgcattcacagctacgtgtgcccctctcatggtcatgggtctgcccttgagcgtgtttgggtaggcatgtgcaatttgtctagcatgctgagtcatgtctttcctatttgcacacgtccatgtttatccatgtactttccctgtgtaccctccatgtaccttgtgtactttcttcccttaaatcatggtattcttctgacagagccatatgtaccctaccctgcacattgttatgcacttttccccaattcatgtttggtggggccatccacaccctctccttgtcacagaatctccatttctgctcagattccccccatctccattgcattcatgtactaccctcagtctacactcacaatcatcttctcccaagactgctcccttttgttttgtgtttttttgaggggaattaaggaaaaataagtgggggcaggtttggagagctgcttccagtggatagttgatgagaatcctgaccaaaggaaggcacccttgactgttgggatagacagatggacctatggggtgggaggtggtgtccctttcacactgtggtgtctcttggggaaggatctccccgaatctcaataaaccagtgaacagtgtgactcggca

SEQ ID NO: 7900 - DNA, 4299 bp, Homo sapiens; identical to SEQ ID NO: 7887
  source 1..4299: mol_type = unassigned DNA

SEQ ID NO: 7901 - DNA, 4104 bp, Homo sapiens
  source 1..4104: mol_type = unassigned DNA
acatctccctcctgctcctcctcctcccctccgtcggtcagtcagtccgcgaggagagtccgcggtggcggcgacggtggcgagagccgcgggggccgtaggaagccaaccttccctgcttctccggggccctcgccccctcctccccacaaaatcagggatggaggcgcctccccggcaccctcttagcagccctccccaggaaaagtgtcccccctgagctcctaacgctccccaacagctacccctgccccccacgccatggggcccggggccccttttgcccgggtggggtggccactgccgcttctggttgtgatggcggcaggggtggctccggtgtgggcctcccactccccccatctcccgcggcctcactcgcgggtccccccgcacccctcctcagaacggcgcgcagtgtacatcggggcactgtttcccatgagcgggggctggccagggggccaggcctgccagcccgcggtggagatggcgctggaggacgtgaatagccgcagggacatcctgccggactatgagctcaagctcatccaccacgacagcaagtgtgatccaggccaagccaccaagtacctatatgagctgctctacaacgaccctatcaagatcatccttatgcctggctgcagctctgtctccacgctggtggctgaggctgctaggatgtggaacctcattgtgctttcctatggctccagctcaccagccctgtcaaaccggcagcgtttccccactttcttccgaacgcacccatcagccacactccacaaccctacccgcgtgaaactctttgaaaagtggggctggaagaagattgctaccatccagcagaccactgaggtcttcacttcgactctggacgacctggaggaacgagtgaaggaggctggaattgagattactttccgccagagtttcttctcagatccagctgtgcccgtcaaaaacctgaagcgccaggatgcccgaatcatcgtgggacttttctatgagactgaagcccggaaagttttttgtgaggtgtacaaggagcgtctctttgggaagaagtacgtctggttcctcattgggtggtatgctgacaattggttcaagatctacgacccttctatcaactgcacagtggatgagatgactgaggcggtggagggccacatcacaactgagattgtcatgctgaatcctgccaatacccgcagcatttccaacatgacatcccaggaatttgtggagaaactaaccaagcgactgaaaagacaccctgaggagacaggaggcttccaggaggcaccgctggcctatgatgccatctgggccttggcactggccctgaacaagacatctggaggaggcggccgttctggtgtgcgcctggaggacttcaactacaacaaccagaccattaccgaccaaatctaccgggcaatgaactcttcgtcctttgagggtgtctctggccatgtggtgtttgatgccagcggctctcggatggcatggacgcttatcgagcagcttcagggtggcagctacaagaagattggctactatgacagcaccaaggatgatctttcctggtccaaaacagataaatggattggagggtcccccccagctgaccagaccctggtcatcaagacattccgcttcctgtcacagaaactctttatctccgtctcagttctctccagcctgggcattgtcctagctgttgtctgtctgtcctttaacatctacaactcacatgtccgttatatccagaactcacagcccaacctgaacaacctgactgctgtgggctgctcactggctttagctgctgtcttccccctggggctcgatggttaccacattgggaggaaccagtttcctttcgtctgccaggcccgcctctggctcctgggcctgggctttagtctgggctacggttccatgttcaccaagatttggtgggtccacacggtcttcacaaagaaggaagaaaagaaggagtggaggaagactctggaaccctggaagctgtatgccacagtgggcctgctggtgggcatggatgtcctcactctcgccatctggcagatcgtggaccctctgcaccggaccattgagacatttgccaaggaggaacctaaggaagatattgacgtctctattctgccccagctggagcattgcagctccaggaagatgaatacatggcttggcattttctatggttacaaggggctgctgctgctgctgggaatcttccttgcttatgagaccaagagtgtgtccactgagaagatcaatgatcaccgggctgtgggcatggctatctacaatgtggcagtcctgtgcctcatcactgctcctgtcaccatgattctgtccagccagcaggatgcagcctttgcctttgcctctcttgccatagttttctcctcctatatcactcttgttgtgctctttgtgcccaagatgcgcaggctgatcacccgaggggaatggcagtcggaggcgcaggacaccatgaagacagggtcatcgaccaacaacaacgaggaggagaagtcccggctgttggagaaggagaaccgtgaactggaaaagatcattgctgagaaagaggagcgtgtctctgaactgcgccatcaactccagtctcggcagcagctccgctcccggcgccacccaccgacacccccagaaccctctgggggcctgcccaggggaccccctgagccccccgaccggcttagctgtgatgggagtcgagtgcatttgctttataagtgagggtagggtgagggaggacaggccagtagggggagggaaagggagaggggaagggcaggggactcaggaagcagggggtccccatccccagctgggaagaacatgctatccaatctcatctcttgtaaatacatgtccccctgtgagttctgggctgatttgggtctctcatacctctgggaaacagacctttttctctcttactgcttcatgtaattttgtatcacctcttcacaatttagttcgtacctggcttgaagctgctcactgctcacacgctgcctcctcagcagcctcactgcatctttctcttcccatgcaacaccctcttctagttaccacggcaacccctgcagctcctctgcctttgtgctctgttcctgtccagcaggggtctcccaacaagtgctctttccaccccaaaggggcctctccttttctccactgtcataatctctttccatcttacttgcccttctatactttctcacatgtggctccccctgaattttgcttcctttgggagctcattcttttcgccaaggctcacatgctccttgcctctgctctgtgcactcacgctcagcacacatgcatcctcccctctcctgcgtgtgcccactgaacatgctcatgtgtacacacgcttttcccgtatgctttcttcatgttcagtcacatgtgctctcgggtgccctgcattcacagctacgtgtgcccctctcatggtcatgggtctgcccttgagcgtgtttgggtaggcatgtgcaatttgtctagcatgctgagtcatgtctttcctatttgcacacgtccatgtttatccatgtactttccctgtgtaccctccatgtaccttgtgtactttcttcccttaaatcatggtattcttctgacagagccatatgtaccctaccctgcacattgttatgcacttttccccaattcatgtttggtggggccatccacaccctctccttgtcacagaatctccatttctgctcagattccccccatctccattgcattcatgtactaccctcagtctacactcacaatcatcttctcccaagactgctcccttttgttttgtgtttttttgaggggaattaaggaaaaataagtgggggcaggtttggagagctgcttccagtggatagttgatgagaatcctgaccaaaggaaggcacccttgactgttgggatagacagatggacctatggggtgggaggtggtgtccctttcacactgtggtgtctcttggggaaggatctccccgaatctcaataaaccagtgaacagtgtga

SEQ ID NO: 7902 - DNA, 4212 bp, Homo sapiens
  source 1..4212: mol_type = unassigned DNA
gaagggaggggggagcggggaggagcggccgggcctggggccttgaggcccggggagagccggggagccgggcccgcgcgccgagatgttgctgctgctgctactggcgccactcttcctccgccccccgggcgcgggcggggcgcagacccccaacgccacctcagaaggttgccagatcatacacccgccctgggaagggggcatcaggtaccggggcctgactcgggaccaggtgaaggctatcaacttcctgccagtggactatgagattgagtatgtgtgccggggggagcgcgaggtggtggggcccaaggtccgcaagtgcctggccaacggctcctggacagatatggacacacccagccgctgtgtccgaatctgctccaagtcttatttgaccctggaaaatgggaaggttttcctgacgggtggggacctcccagctctggacggagcccgggtggatttccggtgtgaccccgacttccatctgtgaatcgaacgccacactcagaacggcgcgcagtgtacatcggggcactgtttcccatgagcgggggctggccagggggccaggcctgccagcccgcggtggagatggcgctggaggacgtgaatagccgcagggacatcctgccggactatgagctcaagctcatccaccacgacagcaagtgtgatccaggccaagccaccaagtacctatatgagctgctctacaacgaccctatcaagatcatccttatgcctggctgcagctctgtctccacgctggtggctgaggctgctaggatgtggaacctcattgtgctttcctatggctccagctcaccagccctgtcaaaccggcagcgtttccccactttcttccgaacgcacccatcagccacactccacaaccctacccgcgtgaaactctttgaaaagtggggctggaagaagattgctaccatccagcagaccactgaggtcttcacttcgactctggacgacctggaggaacgagtgaaggaggctggaattgagattactttccgccagagtttcttctcagatccagctgtgcccgtcaaaaacctgaagcgccaggatgcccgaatcatcgtgggacttttctatgagactgaagcccggaaagttttttgtgaggtgtacaaggagcgtctctttgggaagaagtacgtctggttcctcattgggtggtatgctgacaattggttcaagatctacgacccttctatcaactgcacagtggatgagatgactgaggcggtggagggccacatcacaactgagattgtcatgctgaatcctgccaatacccgcagcatttccaacatgacatcccaggaatttgtggagaaactaaccaagcgactgaaaagacaccctgaggagacaggaggcttccaggaggcaccgctggcctatgatgccatctgggccttggcactggccctgaacaagacatctggaggaggcggccgttctggtgtgcgcctggaggacttcaactacaacaaccagaccattaccgaccaaatctaccgggcaatgaactcttcgtcctttgagggtgtctctggccatgtggtgtttgatgccagcggctctcggatggcatggacgcttatcgagcagcttcagggtggcagctacaagaagattggctactatgacagcaccaaggatgatctttcctggtccaaaacagataaatggattggagggtcccccccagctgaccagaccctggtcatcaagacattccgcttcctgtcacagaaactctttatctccgtctcagttctctccagcctgggcattgtcctagctgttgtctgtctgtcctttaacatctacaactcacatgtccgttatatccagaactcacagcccaacctgaacaacctgactgctgtgggctgctcactggctttagctgctgtcttccccctggggctcgatggttaccacattgggaggaaccagtttcctttcgtctgccaggcccgcctctggctcctgggcctgggctttagtctgggctacggttccatgttcaccaagatttggtgggtccacacggtcttcacaaagaaggaagaaaagaaggagtggaggaagactctggaaccctggaagctgtatgccacagtgggcctgctggtgggcatggatgtcctcactctcgccatctggcagatcgtggaccctctgcaccggaccattgagacatttgccaaggaggaacctaaggaagatattgacgtctctattctgccccagctggagcattgcagctccaggaagatgaatacatggcttggcattttctatggttacaaggggctgctgctgctgctgggaatcttccttgcttatgagaccaagagtgtgtccactgagaagatcaatgatcaccgggctgtgggcatggctatctacaatgtggcagtcctgtgcctcatcactgctcctgtcaccatgattctgtccagccagcaggatgcagcctttgcctttgcctctcttgccatagttttctcctcctatatcactcttgttgtgctctttgtgcccaagatgcgcaggctgatcacccgaggggaatggcagtcggaggcgcaggacaccatgaagacagggtcatcgaccaacaacaacgaggaggagaagtcccggctgttggagaaggagaaccgtgaactggaaaagatcattgctgagaaagaggagcgtgtctctgaactgcgccatcaactccagtctcggcagcagctccgctcccggcgccacccaccgacacccccagaaccctctgggggcctgcccaggggaccccctgagccccccgaccggcttagctgtgatgggagtcgagtgcatttgctttataagtgagggtagggtgagggaggacaggccagtagggggagggaaagggagaggggaagggcaggggactcaggaagcagggggtccccatccccagctgggaagaacatgctatccaatctcatctcttgtaaatacatgtccccctgtgagttctgggctgatttgggtctctcatacctctgggaaacagacctttttctctcttactgcttcatgtaattttgtatcacctcttcacaatttagttcgtacctggcttgaagctgctcactgctcacacgctgcctcctcagcagcctcactgcatctttctcttcccatgcaacaccctcttctagttaccacggcaacccctgcagctcctctgcctttgtgctctgttcctgtccagcaggggtctcccaacaagtgctctttccaccccaaaggggcctctccttttctccactgtcataatctctttccatcttacttgcccttctatactttctcacatgtggctccccctgaattttgcttcctttgggagctcattcttttcgccaaggctcacatgctccttgcctctgctctgtgcactcacgctcagcacacatgcatcctcccctctcctgcgtgtgcccactgaacatgctcatgtgtacacacgcttttcccgtatgctttcttcatgttcagtcacatgtgctctcgggtgccctgcattcacagctacgtgtgcccctctcatggtcatgggtctgcccttgagcgtgtttgggtaggcatgtgcaatttgtctagcatgctgagtcatgtctttcctatttgcacacgtccatgtttatccatgtactttccctgtgtaccctccatgtaccttgtgtactttcttcccttaaatcatggtattcttctgacagagccatatgtaccctaccctgcacattgttatgcacttttccccaattcatgtttggtggggccatccacaccctctccttgtcacagaatctccatttctgctcagattccccccatctccattgcattcatgtactaccctcagtctacactcacaatcatcttctcccaagactgctcccttttgttttgtgtttttttgaggggaattaaggaaaaataagtgggggcaggtttggagagctgcttccagtggatagttgatgagaatcctgaccaaaggaaggcacccttgactgttgggatagacagatggacctatggggtgggaggtggtgtccctttcacactgtggtgtctcttggggaaggatctccccgaatctcaataaaccagtgaacagtg

SEQ ID NO: 7903 - DNA, 4527 bp, Homo sapiens
  source 1..4527: mol_type = unassigned DNA
ccctctcttccccccgccctgccttcccttgcaccctccttcttccctccgcccgggagctctccctggtccccggcgccgcctccttccctcccggctccccgctccccgctcccgtggctgccgccgccccggggaagaagagacaggggtggggtttgggggaagcgagagaggaggggagagaccctggccaggctggagcctggattcgaggggaggagggacgggaggaggagaaaggtggaggagaagggaggggggagcggggaggagcggccgggcctggggccttgaggcccggggagagccggggagccgggcccgcgcgccgagatgttgctgctgctgctactggcgccactcttcctccgccccccgggcgcgggcggggcgcagacccccaacgccacctcagaaggttgccagatcatacacccgccctgggaagggggcatcaggtaccggggcctgactcgggaccaggtgaaggctatcaacttcctgccagtggactatgagattgagtatgtgtgccggggggagcgcgaggtggtggggcccaaggtccgcaagtgcctggccaacggctcctggacagatatggacacacccagccgctgtgtccgaatctgctccaagtcttatttgaccctggaaaatgggaaggttttcctgacgggtggggacctcccagctctggacggagcccgggtggatttccggtgtgaccccgacttccatctggtgggcagctcccggagcatctgtagtcagggccagtggagcacccccaagccccactgccaggtgaatcgaacgccacactcagaacggcgcgcagtgtacatcggggcactgtttcccatgagcgggggctggccagggggccaggcctgccagcccgcggtggagatggcgctggaggacgtgaatagccgcagggacatcctgccggactatgagctcaagctcatccaccacgacagcaagtgtgatccaggccaagccaccaagtacctatatgagctgctctacaacgaccctatcaagatcatccttatgcctggctgcagctctgtctccacgctggtggctgaggctgctaggatgtggaacctcattgtgctttcctatggctccagctcaccagccctgtcaaaccggcagcgtttccccactttcttccgaacgcacccatcagccacactccacaaccctacccgcgtgaaactctttgaaaagtggggctggaagaagattgctaccatccagcagaccactgaggtcttcacttcgactctggacgacctggaggaacgagtgaaggaggctggaattgagattactttccgccagagtttcttctcagatccagctgtgcccgtcaaaaacctgaagcgccaggatgcccgaatcatcgtgggacttttctatgagactgaagcccggaaagttttttgtgaggtgtacaaggagcgtctctttgggaagaagtacgtctggttcctcattgggtggtatgctgacaattggttcaagatctacgacccttctatcaactgcacagtggatgagatgactgaggcggtggagggccacatcacaactgagattgtcatgctgaatcctgccaatacccgcagcatttccaacatgacatcccaggaatttgtggagaaactaaccaagcgactgaaaagacaccctgaggagacaggaggcttccaggaggcaccgctggcctatgatgccatctgggccttggcactggccctgaacaagacatctggaggaggcggccgttctggtgtgcgcctggaggacttcaactacaacaaccagaccattaccgaccaaatctaccgggcaatgaactcttcgtcctttgagggtgtctctggccatgtggtgtttgatgccagcggctctcggatggcatggacgcttatcgagcagcttcagggtggcagctacaagaagattggctactatgacagcaccaaggatgatctttcctggtccaaaacagataaatggattggagggtcccccccagctgaccagaccctggtcatcaagacattccgcttcctgtcacagaaactctttatctccgtctcagttctctccagcctgggcattgtcctagctgttgtctgtctgtcctttaacatctacaactcacatgtccgttatatccagaactcacagcccaacctgaacaacctgactgctgtgggctgctcactggctttagctgctgtcttccccctggggctcgatggttaccacattgggaggaaccagtttcctttcgtctgccaggcccgcctctggctcctgggcctgggctttagtctgggctacggttccatgttcaccaagatttggtgggtccacacggtcttcacaaagaaggaagaaaagaaggagtggaggaagactctggaaccctggaagctgtatgccacagtgggcctgctggtgggcatggatgtcctcactctcgccatctggcagatcgtggaccctctgcaccggaccattgagacatttgccaaggaggaacctaaggaagatattgacgtctctattctgccccagctggagcattgcagctccaggaagatgaatacatggcttggcattttctatggttacaaggggctgctgctgctgctgggaatcttccttgcttatgagaccaagagtgtgtccactgagaagatcaatgatcaccgggctgtgggcatggctatctacaatgtggcagtcctgtgcctcatcactgctcctgtcaccatgattctgtccagccagcaggatgcagcctttgcctttgcctctcttgccatagttttctcctcctatatcactcttgttgtgctctttgtgcccaagatgcgcaggctgatcacccgaggggaatggcagtcggaggcgcaggacaccatgaagacagggtcatcgaccaacaacaacgaggaggagaagtcccggctgttggagaaggagaaccgtgaactggaaaagatcattgctgagaaagaggagcgtgtctctgaactgcgccatcaactccagtctcggcagcagctccgctcccggcgccacccaccgacacccccagaaccctctgggggcctgcccaggggaccccctgagccccccgaccggcttagctgtgatgggagtcgagtgcatttgctttataagtgagggtagggtgagggaggacaggccagtagggggagggaaagggagaggggaagggcaggggactcaggaagcagggggtccccatccccagctgggaagaacatgctatccaatctcatctcttgtaaatacatgtccccctgtgagttctgggctgatttgggtctctcatacctctgggaaacagacctttttctctcttactgcttcatgtaattttgtatcacctcttcacaatttagttcgtacctggcttgaagctgctcactgctcacacgctgcctcctcagcagcctcactgcatctttctcttcccatgcaacaccctcttctagttaccacggcaacccctgcagctcctctgcctttgtgctctgttcctgtccagcaggggtctcccaacaagtgctctttccaccccaaaggggcctctccttttctccactgtcataatctctttccatcttacttgcccttctatactttctcacatgtggctccccctgaattttgcttcctttgggagctcattcttttcgccaaggctcacatgctccttgcctctgctctgtgcactcacgctcagcacacatgcatcctcccctctcctgcgtgtgcccactgaacatgctcatgtgtacacacgcttttcccgtatgctttcttcatgttcagtcacatgtgctctcgggtgccctgcattcacagctacgtgtgcccctctcatggtcatgggtctgcccttgagcgtgtttgggtaggcatgtgcaatttgtctagcatgctgagtcatgtctttcctatttgcacacgtccatgtttatccatgtactttccctgtgtaccctccatgtaccttgtgtactttcttcccttaaatcatggtattcttctgacagagccatatgtaccctaccctgcacattgttatgcacttttccccaattcatgtttggtggggccatccacaccctctccttgtcacagaatctccatttctgctcagattccccccatctccattgcattcatgtactaccctcagtctacactcacaatcatcttctcccaagactgctcccttttgttttgtgtttttttgaggggaattaaggaaaaataagtgggggcaggtttggagagctgcttccagtggatagttgatgagaatcctgaccaaaggaaggcacccttgactgttgggatagacagatggacctatggggtgggaggtggtgtccctttcacactgtggtgtctcttggggaaggatctccccgaatctcaataaaccagtgaacagtg

SEQ ID NO: 7904 - DNA, 837 bp, Homo sapiens; identical to SEQ ID NO: 7891
  source 1..837: mol_type = unassigned DNA

SEQ ID NO: 7905 - DNA, 2364 bp, Homo sapiens; identical to SEQ ID NO: 7888
  source 1..2364: mol_type = unassigned DNA; mol_type = unassigned DNA

SEQ ID NO: 7906 - DNA, 579 bp, Homo sapiens
  source 1..579: mol_type = unassigned DNA; mol_type = unassigned DNA
cattatcttttagatcccccttggccttattagcattgttcgattcatggtcacaaattgcaaacctaccctctgcctggaaagccaccttcccacctgtagggtaagggtgaggcatgtgtggcccagactggcctatttctagatattcaacaagcccttgcctgactgacagcagcttgccaccattgctttcctgtgtgaatcccaggaaaaagtgatgtggtctgggcaagttgggtggacataagggataggggacacagggtgaggtttgctaggtcagaggggttggattggagaggagggccccctttccatttcagagtaggtgaagggcagagaggggatggggattgagtgaggagcattgtggtccttgttgctcaagtgactctctcctgccatcctaggcattttctatggttacaaggggctgctgctgctgctgggaatcttccttgcttatgagaccaagagtgtgtccactgagaagatcaatgatcaccgggctgtgggcatggctatctacaatgtggcagtcctgtgcctcatcactgctcctgtcaccatgattct

SEQ ID NO: 7907 - DNA, 486 bp, Homo sapiens; identical to SEQ ID NO: 7890
  source 1..486: mol_type = unassigned DNA; mol_type = unassigned DNA

SEQ ID NO: 7908 - DNA, 582 bp, Homo sapiens
  source 1..582: mol_type = unassigned DNA; mol_type = unassigned DNA
aagagtctcgtaggtccttccaagcatccttagggcctcaggtgaaaataaaatcagatacaaccatgcaaagctctagggaagtgggaagttgaaaatgcctaggatcagctctttggctacctgtggtcactccttttattgtcgtctgcccaggtggcagctacaagaagattggctactatgacagcaccaaggatgatctttcctggtccaaaacagataaatggattggagggtcccccccagctgaccagaccctggtcatcaagacattccgcttcctgtcacagaaactctttatctccgtctcagttctctccagcctgggcattgtcctagctgttgtctgtctgtcctttaacatctacaactcacatgtccgttatatccagaactcacagcccaacctgaacaacctgactgctgtgggctgctcactggctttagctgctgtcttccccctggggctcgatggttaccacattgggaggaaccagtttcctttcgtctgccaggcccgcctctggctcctgggcctgggctttagtctgggctacggttccatgttcaccaagattt

SEQ ID NO: 7909 - DNA, 407 bp, Homo sapiens; identical to SEQ ID NO: 7896
  source 1..407: mol_type = unassigned DNA; mol_type = unassigned DNA

SEQ ID NO: 7910 - DNA, 749 bp, Homo sapiens
  source 1..749: mol_type = unassigned DNA; mol_type = unassigned DNA
tttgcctcttgaggttgacatcatgctgtctgtcccagtccttgccttgtcttttcctggttcctttatgtttctttaccccatctttgccttcagtggtaggagtgggtgaatggagtggcttcccccacacagagcctcagcaggggctcaccattcaccttcccacttggaatccacatcctaagaccagatgccttcccgaactcctcacttcagggacagaagctgttgaaggaaggttcagaatggctgcttctttgctctatctgagtattgctctgaaatccccagttaacctctctggtctttattccctcatgcaccccgtgtttttccaacttgttttttattcccacccaagactctggacgacctggaggaacgagtgaaggaggctggaattgagattactttccgccagagtttcttctcagatccagctgtgcccgtcaaaaacctgaagcgccaggatgcccgaatcatcgtgggacttttctatgagactgaagcccggaaagttttttgtgaggtgtacaaggagcgtctctttgggaagaagtacgtctggttcctcattgggtggtatgctgacaattggttcaagatctacgacccttctatcaactgcacagtggatgagatgactgaggcggtggagggccacatcacaactgagattgtcatgctgaatcctgccaatacccgcagcatttccaacatgacatcccaggaatttgtggagaaac

SEQ ID NO: 7911 - DNA, 659 bp, Homo sapiens; identical to SEQ ID NO: 7889
  source 1..659: mol_type = unassigned DNA

SEQ ID NO: 7912 - DNA, 825 bp, Homo sapiens
  source 1..825: mol_type = unassigned DNA
ctcttggtccccaggctgagcccggtcggagcctgcgaggcaaccggcaagaggtcgagtagtctccgggtgcgggccgcgccggcggggctcggtccagtcctcatggccgcctctcacttagatgttgctgctgctgctactggcgccactcttcctccgccccccgggcgcgggcggggcgcagacccccaacgccacctcagaaggttgccagatcatacacccgccctgggaagggggcatcaggtaccggggcctgactcgggaccaggtgaaggctatcaacttcctgccagtggactatgagattgagtatgtgtgccggggggagcgcgaggtggtggggcccaaggtccgcaagtgcctggccaacggctcctggacagatatggacacacccagccgctgtgtgtgatccaggccaagccaccaagtacctatatgagctgctctacaacgaccctatcaagatcatccttatgcctggctgcagctctgtctccacgctggtggctgaggctgctaggatgtggaacctcattgtgctttcctatggctccagctcaccagccctgtcaaaccggcagcgtttccccactttcttccgaacgcacccatcagccacactccacaaccctacccgcgtgaaactctttgaaaagtggggctggaagaagattgctaccatccagcagaccactgaggtcttcacttcgactctggacgacctggaggaacgagtgaaggaggctggaattgagattactttccgccagagtttcttctcagatccagctgtgcccgtcaaaaacctgaagcgcc

SEQ ID NO: 7913 - DNA, 871 bp, Homo sapiens
  source 1..871: mol_type = unassigned DNA
gaggtcgagtagtctccgggtgcgggccgcgccggcggggctcggtccagtcctcatggccgcctctcacttagatgttgctgctgctgctactggcgccactcttcctccgccccccgggcgcgggcggggcgcagacccccaacgccacctcagaaggttgccagatcatacacccgccctgggaagggggcatcaggtaccggggcctgactcgggaccaggtgaaggctatcaacttcctgccagtggactatgagattgagtatgtgtgccggggggagcgcgaggtggtggggcccaaggtccgcaagtgcctggccaacggctcctggacagatatggacacacccagccgctgtgtccgaatctgctccaagtcttatttgaccctggaaaatgggaaggttttcctgacgggtggggacctcccagctctggacggagcccgggtggatttccggtgtgaccccgacttccatctggtgggcagctcccggagcatctgtagtcagggccagtggagcacccccaagccccactgccagggcaccctcccctcagaaacgcaggcttctgctctccccggtcttcagcatggacaggtgtgggagggggctggggatcaggccagggaagctgggcgccagtggtaactcttctctgatccccgtctttcctgctgccagtgaatcgaacgccacactcagaacggcgcgcagtgtacatcggggcactgtttcccatgagcgggggctggccagggggccaggcctgccagcccgcggtggagatggcgctggaggacgtgaatagccgcagggacatcctgccggactatgagctcaagctcatccaccacgacagcaag

SEQ ID NO: 7914 - DNA, 1252 bp, Homo sapiens; identical to SEQ ID NO: 7895
  source 1..1252: mol_type = unassigned DNA

SEQ ID NO: 7915 - DNA, 609 bp, Homo sapiens
  source 1..609: mol_type = unassigned DNA
acacacacacccctccacttcaaggtatagccaagagcttctggagccgtcaaaaaggtctgtacctgctgtctttagagcttccagtttgcccttggtcaagaaatactgtttgctaggctctgctggagtacatcagatgttgctgctgctgctactggcgccactcttcctccgccccccgggcgcgggcggggcgcagacccccaacgccacctcagaaggttgccagatcatacacccgccctgggaagggggcatcaggtaccggggcctgactcgggaccaggtgaaggctatcaacttcctgccagtggactatgagattgagtatgtgtgccggggggagcgcgaggtggtggggcccaaggtccgcaagtgcctggccaacggctcctggacagatatggacacacccagccgctgtgtccgaatctgctccaagtcttatttgaccctggaaaatgggaaggttttcctgacgggtggggacctcccagctctggacggagcccgggtggatttccggtgtgaccccgacttccatctggtgggcagctcccggagcatctgtagtcagggccagtggagcacccccaagccccactg

SEQ ID NO: 7916 - DNA, 487 bp, Homo sapiens
  source 1..487: mol_type = unassigned DNA
agtgggcgcagggcccagctgggggaagcggggctgggggagaggaggaaccgcggggatggaatcggggagcgctgaggcggccgatgccgggagcgtggatgttgctgctgctgctactggcgccactcttcctccgccccccgggcgcgggcggggcgcagacccccaacgccacctcagaaggttgccagatcatacacccgccctgggaagggggcatcaggtaccggggcctgactcgggaccaggtgaaggctatcaacttcctgccagtggactatgagattgagtatgtgtgccggggggagcgcgaggtggtggggcccaaggtccgcaagtgcctggccaacggctcctggacagatatggacacacccagccgctgtgtccgaatctgctccaagtcttatttgaccctggaaaatgggaaggttttcctgacgggtggggacctcccagctctggacggagcccgggtggattt

SEQ ID NO: 7917 - DNA, 1739 bp, Homo sapiens; identical to SEQ ID NO: 7897
  source 1..1739: mol_type = unassigned DNA

SEQ ID NO: 7918 - DNA, 4510 bp, Homo sapiens
  source 1..4510: mol_type = unassigned DNA
cccttgcaccctccttcttccctccgcccgggagctctccctggtccccggcgccgcctccttccctcccggctccccgctccccgctcccgtggctgccgccgccccggggaagaagagacaggggtggggtttgggggaagcgagagaggaggggagagaccctggccaggctggagcctggattcgaggggaggagggacgggaggaggagaaaggtggaggagaagggaggggggagcggggaggagcggccgggcctggggccttgaggcccggggagagccggggagccgggcccgcgcgccgagatgttgctgctgctgctactggcgccactcttcctccgccccccgggcgcgggcggggcgcagacccccaacgccacctcagaaggttgccagatcatacacccgccctgggaagggggcatcaggtaccggggcctgactcgggaccaggtgaaggctatcaacttcctgccagtggactatgagattgagtatgtgtgccggggggagcgcgaggtggtggggcccaaggtccgcaagtgcctggccaacggctcctggacagatatggacacacccagccgctgtgtccgaatctgctccaagtcttatttgaccctggaaaatgggaaggttttcctgacgggtggggacctcccagctctggacggagcccgggtggatttccggtgtgaccccgacttccatctggtgggcagctcccggagcatctgtagtcagggccagtggagcacccccaagccccactgccaggtgaatcgaacgccacactcagaacggcgcgcagtgtacatcggggcactgtttcccatgagcgggggctggccagggggccaggcctgccagcccgcggtggagatggcgctggaggacgtgaatagccgcagggacatcctgccggactatgagctcaagctcatccaccacgacagcaagtgtgatccaggccaagccaccaagtacctatatgagctgctctacaacgaccctatcaagatcatccttatgcctggctgcagctctgtctccacgctggtggctgaggctgctaggatgtggaacctcattgtgctttcctatggctccagctcaccagccctgtcaaaccggcagcgtttccccactttcttccgaacgcacccatcagccacactccacaaccctacccgcgtgaaactctttgaaaagtggggctggaagaagattgctaccatccagcagaccactgaggtcttcacttcgactctggacgacctggaggaacgagtgaaggaggctggaattgagattactttccgccagagtttcttctcagatccagctgtgcccgtcaaaaacctgaagcgccaggatgcccgaatcatcgtgggacttttctatgagactgaagcccggaaagttttttgtgaggtgtacaaggagcgtctctttgggaagaagtacgtctggttcctcattgggtggtatgctgacaattggttcaagatctacgacccttctatcaactgcacagtggatgagatgactgaggcggtggagggccacatcacaactgagattgtcatgctgaatcctgccaatacccgcagcatttccaacatgacatcccaggaatttgtggagaaactaaccaagcgactgaaaagacaccctgaggagacaggaggcttccaggaggcaccgctggcctatgatgccatctgggccttggcactggccctgaacaagacatctggaggaggcggccgttctggtgtgcgcctggaggacttcaactacaacaaccagaccattaccgaccaaatctaccgggcaatgaactcttcgtcctttgagggtgtctctggccatgtggtgtttgatgccagcggctctcggatggcatggacgcttatcgagcagcttcagggtggcagctacaagaagattggctactatgacagcaccaaggatgatctttcctggtccaaaacagataaatggattggagggtcccccccagctgaccagaccctggtcatcaagacattccgcttcctgtcacagaaactctttatctccgtctcagttctctccagcctgggcattgtcctagctgttgtctgtctgtcctttaacatctacaactcacatgtccgttatatccagaactcacagcccaacctgaacaacctgactgctgtgggctgctcactggctttagctgctgtcttccccctggggctcgatggttaccacattgggaggaaccagtttcctttcgtctgccaggcccgcctctggctcctgggcctgggctttagtctgggctacggttccatgttcaccaagatttggtgggtccacacggtcttcacaaagaaggaagaaaagaaggagtggaggaagactctggaaccctggaagctgtatgccacagtgggcctgctggtgggcatggatgtcctcactctcgccatctggcagatcgtggaccctctgcaccggaccattgagacatttgccaaggaggaacctaaggaagatattgacgtctctattctgccccagctggagcattgcagctccaggaagatgaatacatggcttggcattttctatggttacaaggggctgctgctgctgctgggaatcttccttgcttatgagaccaagagtgtgtccactgagaagatcaatgatcaccgggctgtgggcatggctatctacaatgtggcagtcctgtgcctcatcactgctcctgtcaccatgattctgtccagccagcaggatgcagcctttgcctttgcctctcttgccatagttttctcctcctatatcactcttgttgtgctctttgtgcccaagatgcgcaggctgatcacccgaggggaatggcagtcggaggcgcaggacaccatgaagacagggtcatcgaccaacaacaacgaggaggagaagtcccggctgttggagaaggagaaccgtgaactggaaaagatcattgctgagaaagaggagcgtgtctctgaactgcgccatcaactccagtctcggcagcagctccgctcccggcgccacccaccgacacccccagaaccctctgggggcctgcccaggggaccccctgagccccccgaccggcttagctgtgatgggagtcgagtgcatttgctttataagtgagggtagggtgagggaggacaggccagtagggggagggaaagggagaggggaagggcaggggactcaggaagcagggggtccccatccccagctgggaagaacatgctatccaatctcatctcttgtaaatacatgtccccctgtgagttctgggctgatttgggtctctcatacctctgggaaacagacctttttctctcttactgcttcatgtaattttgtatcacctcttcacaatttagttcgtacctggcttgaagctgctcactgctcacacactgcctcctcagcagcctcactgcatctttctcttcccatgcaacaccctcttctagttaccacggcaacccctgcagctcctctgcctttgtgctctgttcctgtccagcaggggtctcccaacaagtgctctttccaccccaaaggggcctctccttttctccactgtcataatctctttccatcttacttgcccttctatactttctcacatgtggctccccctgaattttgcttcctttgggagctcattcttttcgccaaggctcacatgctccttgcctctgctctgtgcactcacgctcagcacacatgcatcctcccctctcctgcgtgtgcccactgaacatgctcatgtgtacacacgcttttcccgtatgctttcttcatgttcagtcacatgtgctctcgggtgccctgcattcacagctacgtgtgcccctctcatggtcatgggtctgcccttgagcgtgtttgggtaggcatgtgcaatttgtctagcatgctgagtcatgtctttcctatttgcacacgtccatgtttatccatgtactttccctgtgtaccctccatgtaccttgtgtactttcttcccttaaatcatggtattcttctgacagagccatatgtaccctaccctgcacattgttatgcacttttccccaattcatgtttggtggggccatccacaccctctccttgtcacagaatctccatttctgctcagattccccccatctccattgcattcatgtactaccctcagtctacactcacaatcatcttctcccaagactgctcccttttgttttgtgtttttttgaggggaattaaggaaaaataagtgggggcaggtttggagagctgcttccagtggatagttgatgagaatcctgaccaaaggaaggcacccttgactgttgggatagacagatggacctatggggtgggaggtggtgtccctttcacactgtggtgtctcttggggaaggatctccccgaatctcaataaaccagtgaacagtgtgactcgg

SEQ ID NO: 7919 - DNA, 4070 bp, Homo sapiens
  source 1..4070: mol_type = unassigned DNA
agtcagtccgcgaggagagtccgcggtggcggcgacggtggcgagagccgcgggggccgtaggaagccaaccttccctgcttctccggggccctcgccccctcctccccacaaaatcagggatggaggcgcctccccggcaccctcttagcagccctccccaggaaaagtgtcccccctgagctcctaacgctccccaacagctacccctgccccccacgccatggggcccggggccccttttgcccgggtggggtggccactgccgcttctggttgtgatggcggcaggggtggctccggtgtgggcctcccactccccccatctcccgcggcctcactcgcgggtccccccgcacccctcctcagaacggcgcgcagtgtacatcggggcactgtttcccatgagcgggggctggccagggggccaggcctgccagcccgcggtggagatggcgctggaggacgtgaatagccgcagggacatcctgccggactatgagctcaagctcatccaccacgacagcaagtgtgatccaggccaagccaccaagtacctatatgagctgctctacaacgaccctatcaagatcatccttatgcctggctgcagctctgtctccacgctggtggctgaggctgctaggatgtggaacctcattgtgctttcctatggctccagctcaccagccctgtcaaaccggcagcgtttccccactttcttccgaacgcacccatcagccacactccacaaccctacccgcgtgaaactctttgaaaagtggggctggaagaagattgctaccatccagcagaccactgaggtcttcacttcgactctggacgacctggaggaacgagtgaaggaggctggaattgagattactttccgccagagtttcttctcagatccagctgtgcccgtcaaaaacctgaagcgccaggatgcccgaatcatcgtgggacttttctatgagactgaagcccggaaagttttttgtgaggtgtacaaggagcgtctctttgggaagaagtacgtctggttcctcattgggtggtatgctgacaattggttcaagatctacgacccttctatcaactgcacagtggatgagatgactgaggcggtggagggccacatcacaactgagattgtcatgctgaatcctgccaatacccgcagcatttccaacatgacatcccaggaatttgtggagaaactaaccaagcgactgaaaagacaccctgaggagacaggaggcttccaggaggcaccgctggcctatgatgccatctgggccttggcactggccctgaacaagacatctggaggaggcggccgttctggtgtgcgcctggaggacttcaactacaacaaccagaccattaccgaccaaatctaccgggcaatgaactcttcgtcctttgagggtgtctctggccatgtggtgtttgatgccagcggctctcggatggcatggacgcttatcgagcagcttcagggtggcagctacaagaagattggctactatgacagcaccaaggatgatctttcctggtccaaaacagataaatggattggagggtcccccccagctgaccagaccctggtcatcaagacattccgcttcctgtcacagaaactctttatctccgtctcagttctctccagcctgggcattgtcctagctgttgtctgtctgtcctttaacatctacaactcacatgtccgttatatccagaactcacagcccaacctgaacaacctgactgctgtgggctgctcactggctttagctgctgtcttccccctggggctcgatggttaccacattgggaggaaccagtttcctttcgtctgccaggcccgcctctggctcctgggcctgggctttagtctgggctacggttccatgttcaccaagatttggtgggtccacacggtcttcacaaagaaggaagaaaagaaggagtggaggaagactctggaaccctggaagctgtatgccacagtgggcctgctggtgggcatggatgtcctcactctcgccatctggcagatcgtggaccctctgcaccggaccattgagacatttgccaaggaggaacctaaggaagatattgacgtctctattctgccccagctggagcattgcagctccaggaagatgaatacatggcttggcattttctatggttacaaggggctgctgctgctgctgggaatcttccttgcttatgagaccaagagtgtgtccactgagaagatcaatgatcaccgggctgtgggcatggctatctacaatgtggcagtcctgtgcctcatcactgctcctgtcaccatgattctgtccagccagcaggatgcagcctttgcctttgcctctcttgccatagttttctcctcctatatcactcttgttgtgctctttgtgcccaagatgcgcaggctgatcacccgaggggaatggcagtcggaggcgcaggacaccatgaagacagggtcatcgaccaacaacaacgaggaggagaagtcccggctgttggagaaggagaaccgtgaactggaaaagatcattgctgagaaagaggagcgtgtctctgaactgcgccatcaactccagtctcggcagcagctccgctcccggcgccacccaccgacacccccagaaccctctgggggcctgcccaggggaccccctgagccccccgaccggcttagctgtgatgggagtcgagtgcatttgctttataagtgagggtagggtgagggaggacaggccagtagggggagggaaagggagaggggaagggcaggggactcaggaagcagggggtccccatccccagctgggaagaacatgctatccaatctcatctcttgtaaatacatgtccccctgtgagttctgggctgatttgggtctctcatacctctgggaaacagacctttttctctcttactgcttcatgtaattttgtatcacctcttcacaatttagttcgtacctggcttgaagctgctcactgctcacacactgcctcctcagcagcctcactgcatctttctcttcccatgcaacaccctcttctagttaccacggcaacccctgcagctcctctgcctttgtgctctgttcctgtccagcaggggtctcccaacaagtgctctttccaccccaaaggggcctctccttttctccactgtcataatctctttccatcttacttgcccttctatactttctcacatgtggctccccctgaattttgcttcctttgggagctcattcttttcgccaaggctcacatgctccttgcctctgctctgtgcactcacgctcagcacacatgcatcctcccctctcctgcgtgtgcccactgaacatgctcatgtgtacacacgcttttcccgtatgctttcttcatgttcagtcacatgtgctctcgggtgccctgcattcacagctacgtgtgcccctctcatggtcatgggtctgcccttgagcgtgtttgggtaggcatgtgcaatttgtctagcatgctgagtcatgtctttcctatttgcacacgtccatgtttatccatgtactttccctgtgtaccctccatgtaccttgtgtactttcttcccttaaatcatggtattcttctgacagagccatatgtaccctaccctgcacattgttatgcacttttccccaattcatgtttggtggggccatccacaccctctccttgtcacagaatctccatttctgctcagattccccccatctccattgcattcatgtactaccctcagtctacactcacaatcatcttctcccaagactgctcccttttgttttgtgtttttttgaggggaattaaggaaaaataagtgggggcaggtttggagagctgcttccagtggatagttgatgagaatcctgaccaaaggaaggcacccttgactgttgggatagacagatggacctatggggtgggaggtggtgtccctttcacactgtggtgtctcttggggaaggatctccccgaatctcaataaaccagtgaacagtgtgactcgg

SEQ ID NO: 7920 - DNA, 4299 bp, Homo sapiens
  source 1..4299: mol_type = unassigned DNA
gcccgggagctctccctggtccccggcgccgcctccttccctcccggctccccgctccccgctcccgtggctgccgccgccccggggaagaagagacaggggtggggtttgggggaagcgagagaggaggggagagaccctggccaggctggagcctggattcgaggggaggagggacgggaggaggagaaaggtggaggagaagggaggggggagcggggaggagcggccgggcctggggccttgaggcccggggagagccggggagccgggcccgcgcgccgagatgttgctgctgctgctactggcgccactcttcctccgccccccgggcgcgggcggggcgcagacccccaacgccacctcagaaggttgccagatcatacacccgccctgggaagggggcatcaggtaccggggcctgactcgggaccaggtgaaggctatcaacttcctgccagtggactatgagattgagtatgtgtgccggggggagcgcgaggtggtggggcccaaggtccgcaagtgcctggccaacggctcctggacagatatggacacacccagccgctgtgtgaatcgaacgccacactcagaacggcgcgcagtgtacatcggggcactgtttcccatgagcgggggctggccagggggccaggcctgccagcccgcggtggagatggcgctggaggacgtgaatagccgcagggacatcctgccggactatgagctcaagctcatccaccacgacagcaagtgtgatccaggccaagccaccaagtacctatatgagctgctctacaacgaccctatcaagatcatccttatgcctggctgcagctctgtctccacgctggtggctgaggctgctaggatgtggaacctcattgtgctttcctatggctccagctcaccagccctgtcaaaccggcagcgtttccccactttcttccgaacgcacccatcagccacactccacaaccctacccgcgtgaaactctttgaaaagtggggctggaagaagattgctaccatccagcagaccactgaggtcttcacttcgactctggacgacctggaggaacgagtgaaggaggctggaattgagattactttccgccagagtttcttctcagatccagctgtgcccgtcaaaaacctgaagcgccaggatgcccgaatcatcgtgggacttttctatgagactgaagcccggaaagttttttgtgaggtgtacaaggagcgtctctttgggaagaagtacgtctggttcctcattgggtggtatgctgacaattggttcaagatctacgacccttctatcaactgcacagtggatgagatgactgaggcggtggagggccacatcacaactgagattgtcatgctgaatcctgccaatacccgcagcatttccaacatgacatcccaggaatttgtggagaaactaaccaagcgactgaaaagacaccctgaggagacaggaggcttccaggaggcaccgctggcctatgatgccatctgggccttggcactggccctgaacaagacatctggaggaggcggccgttctggtgtgcgcctggaggacttcaactacaacaaccagaccattaccgaccaaatctaccgggcaatgaactcttcgtcctttgagggtgtctctggccatgtggtgtttgatgccagcggctctcggatggcatggacgcttatcgagcagcttcagggtggcagctacaagaagattggctactatgacagcaccaaggatgatctttcctggtccaaaacagataaatggattggagggtcccccccagctgaccagaccctggtcatcaagacattccgcttcctgtcacagaaactctttatctccgtctcagttctctccagcctgggcattgtcctagctgttgtctgtctgtcctttaacatctacaactcacatgtccgttatatccagaactcacagcccaacctgaacaacctgactgctgtgggctgctcactggctttagctgctgtcttccccctggggctcgatggttaccacattgggaggaaccagtttcctttcgtctgccaggcccgcctctggctcctgggcctgggctttagtctgggctacggttccatgttcaccaagatttggtgggtccacacggtcttcacaaagaaggaagaaaagaaggagtggaggaagactctggaaccctggaagctgtatgccacagtgggcctgctggtgggcatggatgtcctcactctcgccatctggcagatcgtggaccctctgcaccggaccattgagacatttgccaaggaggaacctaaggaagatattgacgtctctattctgccccagctggagcattgcagctccaggaagatgaatacatggcttggcattttctatggttacaaggggctgctgctgctgctgggaatcttccttgcttatgagaccaagagtgtgtccactgagaagatcaatgatcaccgggctgtgggcatggctatctacaatgtggcagtcctgtgcctcatcactgctcctgtcaccatgattctgtccagccagcaggatgcagcctttgcctttgcctctcttgccatagttttctcctcctatatcactcttgttgtgctctttgtgcccaagatgcgcaggctgatcacccgaggggaatggcagtcggaggcgcaggacaccatgaagacagggtcatcgaccaacaacaacgaggaggagaagtcccggctgttggagaaggagaaccgtgaactggaaaagatcattgctgagaaagaggagcgtgtctctgaactgcgccatcaactccagtctcggcagcagctccgctcccggcgccacccaccgacacccccagaaccctctgggggcctgcccaggggaccccctgagccccccgaccggcttagctgtgatgggagtcgagtgcatttgctttataagtgagggtagggtgagggaggacaggccagtagggggagggaaagggagaggggaagggcaggggactcaggaagcagggggtccccatccccagctgggaagaacatgctatccaatctcatctcttgtaaatacatgtccccctgtgagttctgggctgatttgggtctctcatacctctgggaaacagacctttttctctcttactgcttcatgtaattttgtatcacctcttcacaatttagttcgtacctggcttgaagctgctcactgctcacacactgcctcctcagcagcctcactgcatctttctcttcccatgcaacaccctcttctagttaccacggcaacccctgcagctcctctgcctttgtgctctgttcctgtccagcaggggtctcccaacaagtgctctttccaccccaaaggggcctctccttttctccactgtcataatctctttccatcttacttgcccttctatactttctcacatgtggctccccctgaattttgcttcctttgggagctcattcttttcgccaaggctcacatgctccttgcctctgctctgtgcactcacgctcagcacacatgcatcctcccctctcctgcgtgtgcccactgaacatgctcatgtgtacacacgcttttcccgtatgctttcttcatgttcagtcacatgtgctctcgggtgccctgcattcacagctacgtgtgcccctctcatggtcatgggtctgcccttgagcgtgtttgggtaggcatgtgcaatttgtctagcatgctgagtcatgtctttcctatttgcacacgtccatgtttatccatgtactttccctgtgtaccctccatgtaccttgtgtactttcttcccttaaatcatggtattcttctgacagagccatatgtaccctaccctgcacattgttatgcacttttccccaattcatgtttggtggggccatccacaccctctccttgtcacagaatctccatttctgctcagattccccccatctccattgcattcatgtactaccctcagtctacactcacaatcatcttctcccaagactgctcccttttgttttgtgtttttttgaggggaattaaggaaaaataagtgggggcaggtttggagagctgcttccagtggatagttgatgagaatcctgaccaaaggaaggcacccttgactgttgggatagacagatggacctatggggtgggaggtggtgtccctttcacactgtggtgtctcttggggaaggatctccccgaatctcaataaaccagtgaacagtgtgactcgg

SEQ ID NO: 7921 - DNA, 2364 bp, Homo sapiens; identical to SEQ ID NO: 7888
  source 1..2364: mol_type = unassigned DNA

SEQ ID NO: 7922 - DNA, 659 bp, Homo sapiens; identical to SEQ ID NO: 7889
  source 1..659: mol_type = unassigned DNA

SEQ ID NO: 7923 - DNA, 407 bp, Homo sapiens; identical to SEQ ID NO: 7896
  source 1..407: mol_type = unassigned DNA; mol_type = unassigned DNA

SEQ ID NO: 7924 - DNA, 837 bp, Homo sapiens; identical to SEQ ID NO: 7891
  source 1..837: mol_type = unassigned DNA

SEQ ID NO: 7925 - DNA, 486 bp, Homo sapiens; identical to SEQ ID NO: 7890
  source 1..486: mol_type = unassigned DNA

SEQ ID NO: 7926 - DNA, 4220 bp, Homo sapiens
  source 1..4220: mol_type = unassigned DNA
gaagggaggggggagcggggaggagcggccgggcctggggccttgaggcccggggagagccggggagccgggcccgcgcgccgagatgttgctgctgctgctactggcgccactcttcctccgccccccgggcgcgggcggggcgcagacccccaacgccacctcagaaggttgccagatcatacacccgccctgggaagggggcatcaggtaccggggcctgactcgggaccaggtgaaggctatcaacttcctgccagtggactatgagattgagtatgtgtgccggggggagcgcgaggtggtggggcccaaggtccgcaagtgcctggccaacggctcctggacagatatggacacacccagccgctgtgtccgaatctgctccaagtcttatttgaccctggaaaatgggaaggttttcctgacgggtggggacctcccagctctggacggagcccgggtggatttccggtgtgaccccgacttccatctgtgaatcgaacgccacactcagaacggcgcgcagtgtacatcggggcactgtttcccatgagcgggggctggccagggggccaggcctgccagcccgcggtggagatggcgctggaggacgtgaatagccgcagggacatcctgccggactatgagctcaagctcatccaccacgacagcaagtgtgatccaggccaagccaccaagtacctatatgagctgctctacaacgaccctatcaagatcatccttatgcctggctgcagctctgtctccacgctggtggctgaggctgctaggatgtggaacctcattgtgctttcctatggctccagctcaccagccctgtcaaaccggcagcgtttccccactttcttccgaacgcacccatcagccacactccacaaccctacccgcgtgaaactctttgaaaagtggggctggaagaagattgctaccatccagcagaccactgaggtcttcacttcgactctggacgacctggaggaacgagtgaaggaggctggaattgagattactttccgccagagtttcttctcagatccagctgtgcccgtcaaaaacctgaagcgccaggatgcccgaatcatcgtgggacttttctatgagactgaagcccggaaagttttttgtgaggtgtacaaggagcgtctctttgggaagaagtacgtctggttcctcattgggtggtatgctgacaattggttcaagatctacgacccttctatcaactgcacagtggatgagatgactgaggcggtggagggccacatcacaactgagattgtcatgctgaatcctgccaatacccgcagcatttccaacatgacatcccaggaatttgtggagaaactaaccaagcgactgaaaagacaccctgaggagacaggaggcttccaggaggcaccgctggcctatgatgccatctgggccttggcactggccctgaacaagacatctggaggaggcggccgttctggtgtgcgcctggaggacttcaactacaacaaccagaccattaccgaccaaatctaccgggcaatgaactcttcgtcctttgagggtgtctctggccatgtggtgtttgatgccagcggctctcggatggcatggacgcttatcgagcagcttcagggtggcagctacaagaagattggctactatgacagcaccaaggatgatctttcctggtccaaaacagataaatggattggagggtcccccccagctgaccagaccctggtcatcaagacattccgcttcctgtcacagaaactctttatctccgtctcagttctctccagcctgggcattgtcctagctgttgtctgtctgtcctttaacatctacaactcacatgtccgttatatccagaactcacagcccaacctgaacaacctgactgctgtgggctgctcactggctttagctgctgtcttccccctggggctcgatggttaccacattgggaggaaccagtttcctttcgtctgccaggcccgcctctggctcctgggcctgggctttagtctgggctacggttccatgttcaccaagatttggtgggtccacacggtcttcacaaagaaggaagaaaagaaggagtggaggaagactctggaaccctggaagctgtatgccacagtgggcctgctggtgggcatggatgtcctcactctcgccatctggcagatcgtggaccctctgcaccggaccattgagacatttgccaaggaggaacctaaggaagatattgacgtctctattctgccccagctggagcattgcagctccaggaagatgaatacatggcttggcattttctatggttacaaggggctgctgctgctgctgggaatcttccttgcttatgagaccaagagtgtgtccactgagaagatcaatgatcaccgggctgtgggcatggctatctacaatgtggcagtcctgtgcctcatcactgctcctgtcaccatgattctgtccagccagcaggatgcagcctttgcctttgcctctcttgccatagttttctcctcctatatcactcttgttgtgctctttgtgcccaagatgcgcaggctgatcacccgaggggaatggcagtcggaggcgcaggacaccatgaagacagggtcatcgaccaacaacaacgaggaggagaagtcccggctgttggagaaggagaaccgtgaactggaaaagatcattgctgagaaagaggagcgtgtctctgaactgcgccatcaactccagtctcggcagcagctccgctcccggcgccacccaccgacacccccagaaccctctgggggcctgcccaggggaccccctgagccccccgaccggcttagctgtgatgggagtcgagtgcatttgctttataagtgagggtagggtgagggaggacaggccagtagggggagggaaagggagaggggaagggcaggggactcaggaagcagggggtccccatccccagctgggaagaacatgctatccaatctcatctcttgtaaatacatgtccccctgtgagttctgggctgatttgggtctctcatacctctgggaaacagacctttttctctcttactgcttcatgtaattttgtatcacctcttcacaatttagttcgtacctggcttgaagctgctcactgctcacacactgcctcctcagcagcctcactgcatctttctcttcccatgcaacaccctcttctagttaccacggcaacccctgcagctcctctgcctttgtgctctgttcctgtccagcaggggtctcccaacaagtgctctttccaccccaaaggggcctctccttttctccactgtcataatctctttccatcttacttgcccttctatactttctcacatgtggctccccctgaattttgcttcctttgggagctcattcttttcgccaaggctcacatgctccttgcctctgctctgtgcactcacgctcagcacacatgcatcctcccctctcctgcgtgtgcccactgaacatgctcatgtgtacacacgcttttcccgtatgctttcttcatgttcagtcacatgtgctctcgggtgccctgcattcacagctacgtgtgcccctctcatggtcatgggtctgcccttgagcgtgtttgggtaggcatgtgcaatttgtctagcatgctgagtcatgtctttcctatttgcacacgtccatgtttatccatgtactttccctgtgtaccctccatgtaccttgtgtactttcttcccttaaatcatggtattcttctgacagagccatatgtaccctaccctgcacattgttatgcacttttccccaattcatgtttggtggggccatccacaccctctccttgtcacagaatctccatttctgctcagattccccccatctccattgcattcatgtactaccctcagtctacactcacaatcatcttctcccaagactgctcccttttgttttgtgtttttttgaggggaattaaggaaaaataagtgggggcaggtttggagagctgcttccagtggatagttgatgagaatcctgaccaaaggaaggcacccttgactgttgggatagacagatggacctatggggtgggaggtggtgtccctttcacactgtggtgtctcttggggaaggatctccccgaatctcaataaaccagtgaacagtgtgactcgg

SEQ ID NO: 7927 - DNA, 3523 bp, Homo sapiens
  source 1..3523: mol_type = unassigned DNA
ctcctcctcctcccctccgtcggtcagtcagtccgcgaggagagtccgcggtggcggcgacggtggcgagagccgcgggggccgtaggaagccaaccttccctgcttctccggggccctcgccccctcctccccacaaaatcagggatggaggcgcctccccggcaccctcttagcagccctccccaggaaaagtgtcccccctgagctcctaacgctccccaacagctacccctgccccccacgccatggggcccggggccccttttgcccgggtggggtggccactgccgcttctggttgtgatggcggcaggggtggctccggtgtgggcctcccactccccccatctcccgcggcctcactcgcgggtccccccgcacccctcctcagaacggcgcgcagtgtacatcggggcactgtttcccatgagcgggggctggccagggggccaggcctgccagcccgcggtggagatggcgctggaggacgtgaatagccgcagggacatcctgccggactatgagctcaagctcatccaccacgacagcaagtgtgatccaggccaagccaccaagtacctatatgagctgctctacaacgaccctatcaagatcatccttatgcctggctgcagctctgtctccacgctggtggctgaggctgctaggatgtggaacctcattgtgctttcctatggctccagctcaccagccctgtcaaaccggcagcgtttccccactttcttccgaacgcacccatcagccacactccacaaccctacccgcgtgaaactctttgaaaagtggggctggaagaagattgctaccatccagcagaccactgaggtcttcacttcgactctggacgacctggaggaacgagtgaaggaggctggaattgagattactttccgccagagtttcttctcagatccagctgtgcccgtcaaaaacctgaagcgccaggatgcccgaatcatcgtgggacttttctatgagactgaagcccggaaagttttttgtgaggtgtacaaggagcgtctctttgggaagaagtacgtctggttcctcattgggtggtatgctgacaattggttcaagatctacgacccttctatcaactgcacagtggatgagatgactgaggcggtggagggccacatcacaactgagattgtcatgctgaatcctgccaatacccgcagcatttccaacatgacatcccaggaatttgtggagaaactaaccaagcgactgaaaagacaccctgaggagacaggaggcttccaggaggcaccgctggcctatgatgccatctgggccttggcactggccctgaacaagacatctggaggaggcggccgttctggtgtgcgcctggaggacttcaactacaacaaccagaccattaccgaccaaatctaccgggcaatgaactcttcgtcctttgagggtgtctctggccatgtggtgtttgatgccagcggctctcggatggcatggacgcttatcgagcagcttcagggtggcagctacaagaagattggctactatgacagcaccaaggatgatctttcctggtccaaaacagataaatggattggagggtcccccccagctgaccagaccctggtcatcaagacattccgcttcctgtcacagaaactctttatctccgtctcagttctctccagcctgggcattgtcctagctgttgtctgtctgtcctttaacatctacaactcacatgtccgttatatccagaactcacagcccaacctgaacaacctgactgctgtgggctgctcactggctttagctgctgtcttccccctggggctcgatggttaccacattgggaggaaccagtttcctttcgtctgccaggcccgcctctggctcctgggcctgggctttagtctgggctacggttccatgttcaccaagatttggtgggtccacacggtcttcacaaagaaggaagaaaagaaggagtggaggaagactctggaaccctggaagctgtatgccacagtgggcctgctggtgggcatggatgtcctcactctcgccatctggcagatcgtggaccctctgcaccggaccattgagacatttgccaaggaggaacctaaggaagatattgacgtctctattctgccccagctggagcattgcagctccaggaagatgaatacatggcttggcattttctatggttacaaggggctgctgctgctgctgggaatcttccttgcttatgagaccaagagtgtgtccactgagaagatcaatgatcaccgggctgtgggcatggctatctacaatgtggcagtcctgtgcctcatcactgctcctgtcaccatgattctgtccagccagcaggatgcagcctttgcctttgcctctcttgccatagttttctcctcctatatcactcttgttgtgctctttgtgcccaagatgcgcaggctgatcacccgaggggaatggcagtcggaggcgcaggacaccatgaagacagggtcatcgaccaacaacaacgaggaggagaagtcccggctgttggagaaggagaaccgtgaactggaaaagatcattgctgagaaagaggagcgtgtctctgaactgcgccatcaactccagtctcggcagcagctccgctcccggcgccacccaccgacacccccagaaccctctgggggcctgcccaggggaccccctgagccccccgaccggcttagctgtgatgggagtcgagtgcatttgctttataagtgagggtgcatgtccgttccgaggaatgggatttaatgacctttgatgccaacccatatgacagcgtgaaaaaaatcaaagaacatgtccggtctaagaccaaggttcctgtgcaggaccaggttcttttgctgggctccaagatcttaaagccacggagaagcctctcatcttatggcactgacaaagagaagaccatccaccttaccctgaaagtggtgaagcccagtgatgaggagctgcccttgtttcttgtggagtcaggtgatgaggcaaagaggcacctcctccaggtgcgaaggtccagctcagtggcacaagtgaaagcaatgatcgagactaagacgggtataatccctgagacccagattgtgacttgcaatggaaagagactggaagatgggaagatgatggcagattacggcatcagaaagggcaacttactcttcctggcatcttattgtattggagggtgaccaccctggggatggggtgttggcaggggtcaaaaagcttatttcttttaatctcttactcaacgaacacatcttctgatgatttcccaaaattaatgagaatgagatgagtagagtaagatttgggtgggatgggtaggatgaagtatattgcccaactctatgtttctttgattctaacacaattaattaagtgacatgatttttactaatgtattactgagactagtaaataaatttttaaggcaaaatagagcattcaaagcca

SEQ ID NO: 7928 - DNA, 1802 bp, Homo sapiens
  source 1..1802: mol_type = unassigned DNA
ttatatccagaactcacagcccaacctgaacaacctgactgctgtgggctgctcactggctttagctgctgtcttccccctggggctcgatggttaccacattgggaggaaccagtttcctttcgtctgccaggcccgcctctggctcctgggcctgggctttagtctgggctacggttccatgttcaccaagatttggtgggtccacacggtcttcacaaagaaggaagaaaagaaggagtggaggaagactctggaaccctggaagctgtatgccacagtgggcctgctggtgggcatggatgtcctcactctcgccatctggcagatcgtggaccctctgcaccggaccattgagacatttgccaaggaggaacctaaggaagatattgacgtctctattctgccccagctggagcattgcagctccaggaagatgaatacatggcttgctgtgatgggagtcgagtgcatttgctttataagtgagggtagggtgagggaggacaggccagtagggggagggaaagggagaggggaagggcaggggactcaggaagcagggggtccccatccccagctgggaagaacatgctatccaatctcatctcttgtaaatacatgtccccctgtgagttctgggctgatttgggtctctcatacctctgggaaacagacctttttctctcttactgcttcatgtaattttgtatcacctcttcacaatttagttcgtacctggcttgaagctgctcactgctcacacactgcctcctcagcagcctcactgcatctttctcttcccatgcaacaccctcttctagttaccacggcaacccctgcagctcctctgcctttgtgctctgttcctgtccagcaggggtctcccaacaagtgctctttccaccccaaaggggcctctccttttctccactgtcataatctctttccatcttacttgcccttctatactttctcacatgtggctccccctgaattttgcttcctttgggagctcattcttttcgccaaggctcacatgctccttgcctctgctctgtgcactcacgctcagcacacatgcatcctcccctctcctgcgtgtgcccactgaacatgctcatgtgtacacacgcttttcccgtatgctttcttcatgttcagtcacatgtgctctcgggtgccctgcattcacagctacgtgtgcccctctcatggtcatgggtctgcccttgagcgtgtttgggtaggcatgtgcaatttgtctagcatgctgagtcatgtctttcctatttgcacacgtccatgtttatccatgtactttccctgtgtaccctccatgtaccttgtgtactttcttcccttaaatcatggtattcttctgacagagccatatgtaccctaccctgcacattgttatgcacttttccccaattcatgtttggtggggccatccacaccctctccttgtcacagaatctccatttctgctcagattccccccatctccattgcattcatgtactaccctcagtctacactcacaatcatcttctcccaagactgctcccttttgttttgtgtttttttgaggggaattaaggaaaaataagtgggggcaggtttggagagctgcttccagtggatagttgatgagaatcctgaccaaaggaaggcacccttgactgttgggatagacagatggacctatggggtgggaggtggtgtccctttcacactgtggtgtctcttggggaaggatctccccgaatctcaataaaccagtgaacagtgtgactcgg

SEQ ID NO: 7929 - DNA, 1252 bp, Homo sapiens; identical to SEQ ID NO: 7895
  source 1..1252: mol_type = unassigned DNA

SEQ ID NO: 7930 - DNA, 1739 bp, Homo sapiens; identical to SEQ ID NO: 7897
  source 1..1739: mol_type = unassigned DNA

SEQ ID NO: 7931 - DNA, 4509 bp, Homo sapiens
  source 1..4509: mol_type = unassigned DNA
cccttgcaccctccttcttccctccgcccgggagctctccctggtccccggcgccgcctccttccctcccggctccccgctccccgctcccgtggctgccgccgccccggggaagaagagacaggggtggggtttgggggaagcgagagaggaggggagagaccctggccaggctggagcctggattcgaggggaggagggacgggaggaggagaaaggtggaggagaagggaggggggagcggggaggagcggccggcctggggccttgaggcccggggagagccggggagccgggcccgcgcgccgagatgttgctgctgctgctactggcgccactcttcctccgccccccgggcgcgggcggggcgcagacccccaacgccacctcagaaggttgccagatcatacacccgccctgggaagggggcatcaggtaccggggcctgactcgggaccaggtgaaggctatcaacttcctgccagtggactatgagattgagtatgtgtgccggggggagcgcgaggtggtggggcccaaggtccgcaagtgcctggccaacggctcctggacagatatggacacacccagccgctgtgtccgaatctgctccaagtcttatttgaccctggaaaatgggaaggttttcctgacgggtggggacctcccagctctggacggagcccgggtggatttccggtgtgaccccgacttccatctggtgggcagctcccggagcatctgtagtcagggccagtggagcacccccaagccccactgccaggtgaatcgaacgccacactcagaacggcgcgcagtgtacatcggggcactgtttcccatgagcgggggctggccagggggccaggcctgccagcccgcggtggagatggcgctggaggacgtgaatagccgcagggacatcctgccggactatgagctcaagctcatccaccacgacagcaagtgtgatccaggccaagccaccaagtacctatatgagctgctctacaacgaccctatcaagatcatccttatgcctggctgcagctctgtctccacgctggtggctgaggctgctaggatgtggaacctcattgtgctttcctatggctccagctcaccagccctgtcaaaccggcagcgtttccccactttcttccgaacgcacccatcagccacactccacaaccctacccgcgtgaaactctttgaaaagtggggctggaagaagattgctaccatccagcagaccactgaggtcttcacttcgactctggacgacctggaggaacgagtgaaggaggctggaattgagattactttccgccagagtttcttctcagatccagctgtgcccgtcaaaaacctgaagcgccaggatgcccgaatcatcgtgggacttttctatgagactgaagcccggaaagttttttgtgaggtgtacaaggagcgtctctttgggaagaagtacgtctggttcctcattgggtggtatgctgacaattggttcaagatctacgacccttctatcaactgcacagtggatgagatgactgaggcggtggagggccacatcacaactgagattgtcatgctgaatcctgccaatacccgcagcatttccaacatgacatcccaggaatttgtggagaaactaaccaagcgactgaaaagacaccctgaggagacaggaggcttccaggaggcaccgctggcctatgatgccatctgggccttggcactggccctgaacaagacatctggaggaggcggccgttctggtgtgcgcctggaggacttcaactacaacaaccagaccattaccgaccaaatctaccgggcaatgaactcttcgtcctttgagggtgtctctggccatgtggtgtttgatgccagcggctctcggatggcatggacgcttatcgagcagcttcagggtggcagctacaagaagattggctactatgacagcaccaaggatgatctttcctggtccaaaacagataaatggattggagggtcccccccagctgaccagaccctggtcatcaagacattccgcttcctgtcacagaaactctttatctccgtctcagttctctccagcctgggcattgtcctagctgttgtctgtctgtcctttaacatctacaactcacatgtccgttatatccagaactcacagcccaacctgaacaacctgactgctgtgggctgctcactggctttagctgctgtcttccccctggggctcgatggttaccacattgggaggaaccagttccctttcgtctgccaggcccgcctctggctcctgggcctgggctttagtctgggctacggttccatgttcaccaagatttggtgggtccacacggtcttcacaaagaaggaagaaaagaaggagtggaggaagactctggaaccctggaagctgtatgccacagtgggcctgctggtgggcatggatgtcctcactctcgccatctggcagatcgtggaccctctgcaccggaccattgagacatttgccaaggaggaacctaaggaagatattgacgtctctattctgccccagctggagcattgcagctccaggaagatgaatacatggcttggcattttctatggttacaaggggctgctgctgctgctgggaatcttccttgcttatgagaccaagagtgtgtccactgagaagatcaatgatcaccgggctgtgggcatggctatctacaatgtggcagtcctgtgcctcatcactgctcctgtcaccatgattctgtccagccagcaggatgcagcctttgcctttgcctctcttgccatagttttctcctcctatatcactcttgttgtgctctttgtgcccaagatgcgcaggctgatcacccgaggggaatggcagtcggaggcgcaggacaccatgaagacagggtcatcgaccaacaacaacgaggaggagaagtcccggctgttggagaaggagaaccgtgaactggaaaagatcattgctgagaaagaggagcgtgtctctgaactgcgccatcaactccagtctcggcagcagctccgctcccggcgccacccaccgacacccccagaaccctctgggggcctgcccaggggaccccctgagccccccgaccggcttagctgtgatgggagtcgagtgcatttgctttataagtgagggtagggtgagggaggacaggccagtagggggagggaaagggagaggggaagggcaggggactcaggaagcagggggtccccatccccagctgggaagaacatgctatccaatctcatctcttgtaaatacatgtccccctgtgagttctgggctgatttgggtctctcatacctctgggaaacagacctttttctctcttactgcttcatgtaattttgtatcacctcttcacaatttagttcgtacctggcttgaagctgctcactgctcacacgctgcctcctcagcagcctcactgcatctttctcttcccatgcaacaccctcttctagttaccacggcaacccctgcagctcctctgcctttgtgctctgttcctgtccagcaggggtctcccaacaagtgctctttccaccccaaaggggcctctccttttctccactgtcataatctctttccatcttacttgcccttccatactttctcacatgtggctccccctgaattttgcttcctttgggagctcattcttttcgccaaggctcacatgctccttgcctctgctctgtgcactcacgctcagcacacatgcatcctcccctctcctgcgtgtgcccactgaacatgctcatgtgtacacacgcttttcccgtatgctttcttcatgttcagtcacatgtgctctcgggtgccctgcattcacagctacgtgtgcccctctcatggtcatgggtctgcccttgagcgtgtttgggtaggcatgtgcaatttgtctagcatgctgagtcatgtctttcctatttgcacacgtccatgtttatccatgtactttccctgtgtaccctccatgtaccttgtgtactttcttcccttaaatcatggtattcttctgacagagccatatgtaccctaccctgcacattgttatgcacttttccccaattcatgtttggtggggccatccacaccctctccttgtcacagaatctccatttctgctcagattccccccatctccattgcattcatgtactaccctcagtctacactcacaatcatcttctcccaagactgctcccttttgttttgtgtttttttgaggggaattaaggaaaaataagtgggggcaggtttggagagctgcttccagtggatagttgatgagaatcctgaccaaaggaaggcacccttgactgttgggatagacagatggacctatggggtgggaggtggtgtccctttcacactgtggtgtctcttggggaaggatctccccgaatctcaataaaccagtgaacagtgtgactcgg

SEQ ID NO: 7932 - DNA, 4070 bp, Homo sapiens
  source 1..4070: mol_type = unassigned DNA
agtcagtccgcgaggagagtccgcggtggcggcgacggtggcgagagccgcgggggccgtaggaagccaaccttccctgcttctccggggccctcgccccctcctccccacaaaatcagggatggaggcgcctccccggcaccctcttagcagccctccccaggaaaagtgtcccccctgagctcctaacgctccccaacagctacccctgccccccacgccatggggcccggggccccttttgcccgggtggggtggccactgccgcttctggttgtgatggcggcaggggtggctccggtgtgggcctcccactccccccatctcccgcggcctcactcgcgggtccccccgcacccctcctcagaacggcgcgcagtgtacatcggggcactgtttcccatgagcgggggctggccagggggccaggcctgccagcccgcggtggagatggcgctggaggacgtgaatagccgcagggacatcctgccggactatgagctcaagctcatccaccacgacagcaagtgtgatccaggccaagccaccaagtacctatatgagctgctctacaacgaccctatcaagatcatccttatgcctggctgcagctctgtctccacgctggtggctgaggctgctaggatgtggaacctcattgtgctttcctatggctccagctcaccagccctgtcaaaccggcagcgtttccccactttcttccgaacgcacccatcagccacactccacaaccctacccgcgtgaaactctttgaaaagtggggctggaagaagattgctaccatccagcagaccactgaggtcttcacttcgactctggacgacctggaggaacgagtgaaggaggctggaattgagattactttccgccagagtttcttctcagatccagctgtgcccgtcaaaaacctgaagcgccaggatgcccgaatcatcgtgggacttttctatgagactgaagcccggaaagttttttgtgaggtgtacaaggagcgtctctttgggaagaagtacgtctggttcctcattgggtggtatgctgacaattggttcaagatctacgacccttctatcaactgcacagtggatgagatgactgaggcggtggagggccacatcacaactgagattgtcatgctgaatcctgccaatacccgcagcatttccaacatgacatcccaggaatttgtggagaaactaaccaagcgactgaaaagacaccctgaggagacaggaggcttccaggaggcaccgctggcctatgatgccatctgggccttggcactggccctgaacaagacatctggaggaggcggccgttctggtgtgcgcctggaggacttcaactacaacaaccagaccattaccgaccaaatctaccgggcaatgaactcttcgtcctttgagggtgtctctggccatgtggtgtttgatgccagcggctctcggatggcatggacgcttatcgagcagcttcagggtggcagctacaagaagattggctactatgacagcaccaaggatgatctttcctggtccaaaacagataaatggattggagggtcccccccagctgaccagaccctggtcatcaagacattccgcttcctgtcacagaaactctttatctccgtctcagttctctccagcctgggcattgtcctagctgttgtctgtctgtcctttaacatctacaactcacatgtccgttatatccagaactcacagcccaacctgaacaacctgactgctgtgggctgctcactggctttagctgctgtcttccccctggggctcgatggttaccacattgggaggaaccagttccctttcgtctgccaggcccgcctctggctcctgggcctgggctttagtctgggctacggttccatgttcaccaagatttggtgggtccacacggtcttcacaaagaaggaagaaaagaaggagtggaggaagactctggaaccctggaagctgtatgccacagtgggcctgctggtgggcatggatgtcctcactctcgccatctggcagatcgtggaccctctgcaccggaccattgagacatttgccaaggaggaacctaaggaagatattgacgtctctattctgccccagctggagcattgcagctccaggaagatgaatacatggcttggcattttctatggttacaaggggctgctgctgctgctgggaatcttccttgcttatgagaccaagagtgtgtccactgagaagatcaatgatcaccgggctgtgggcatggctatctacaatgtggcagtcctgtgcctcatcactgctcctgtcaccatgattctgtccagccagcaggatgcagcctttgcctttgcctctcttgccatagttttctcctcctatatcactcttgttgtgctctttgtgcccaagatgcgcaggctgatcacccgaggggaatggcagtcggaggcgcaggacaccatgaagacagggtcatcgaccaacaacaacgaggaggagaagtcccggctgttggagaaggagaaccgtgaactggaaaagatcattgctgagaaagaggagcgtgtctctgaactgcgccatcaactccagtctcggcagcagctccgctcccggcgccacccaccgacacccccagaaccctctgggggcctgcccaggggaccccctgagccccccgaccggcttagctgtgatgggagtcgagtgcatttgctttataagtgagggtagggtgagggaggacaggccagtagggggagggaaagggagaggggaagggcaggggactcaggaagcagggggtccccatccccagctgggaagaacatgctatccaatctcatctcttgtaaatacatgtccccctgtgagttctgggctgatttgggtctctcatacctctgggaaacagacctttttctctcttactgcttcatgtaattttgtatcacctcttcacaatttagttcgtacctggcttgaagctgctcactgctcacacgctgcctcctcagcagcctcactgcatctttctcttcccatgcaacaccctcttctagttaccacggcaacccctgcagctcctctgcctttgtgctctgttcctgtccagcaggggtctcccaacaagtgctctttccaccccaaaggggcctctccttttctccactgtcataatctctttccatcttacttgcccttccatactttctcacatgtggctccccctgaattttgcttcctttgggagctcattcttttcgccaaggctcacatgctccttgcctctgctctgtgcactcacgctcagcacacatgcatcctcccctctcctgcgtgtgcccactgaacatgctcatgtgtacacacgcttttcccgtatgctttcttcatgttcagtcacatgtgctctcgggtgccctgcattcacagctacgtgtgcccctctcatggtcatgggtctgcccttgagcgtgtttgggtaggcatgtgcaatttgtctagcatgctgagtcatgtctttcctatttgcacacgtccatgtttatccatgtactttccctgtgtaccctccatgtaccttgtgtactttcttcccttaaatcatggtattcttctgacagagccatatgtaccctaccctgcacattgttatgcacttttccccaattcatgtttggtggggccatccacaccctctccttgtcacagaatctccatttctgctcagattccccccatctccattgcattcatgtactaccctcagtctacactcacaatcatcttctcccaagactgctcccttttgttttgtgtttttttgaggggaattaaggaaaaataagtgggggcaggtttggagagctgcttccagtggatagttgatgagaatcctgaccaaaggaaggcacccttgactgttgggatagacagatggacctatggggtgggaggtggtgtccctttcacactgtggtgtctcttggggaaggatctccccgaatctcaataaaccagtgaacagtgtgactcgg

SEQ ID NO: 7933 - DNA, 4298 bp, Homo sapiens
  source 1..4298: mol_type = unassigned DNA
gcccgggagctctccctggtccccggcgccgcctccttccctcccggctccccgctccccgctcccgtggctgccgccgccccggggaagaagagacaggggtggggtttgggggaagcgagagaggaggggagagaccctggccaggctggagcctggattcgaggggaggagggacgggaggaggagaaaggtggaggagaagggaggggggagcggggaggagcggccggcctggggccttgaggcccggggagagccggggagccgggcccgcgcgccgagatgttgctgctgctgctactggcgccactcttcctccgccccccgggcgcgggcggggcgcagacccccaacgccacctcagaaggttgccagatcatacacccgccctgggaagggggcatcaggtaccggggcctgactcgggaccaggtgaaggctatcaacttcctgccagtggactatgagattgagtatgtgtgccggggggagcgcgaggtggtggggcccaaggtccgcaagtgcctggccaacggctcctggacagatatggacacacccagccgctgtgtgaatcgaacgccacactcagaacggcgcgcagtgtacatcggggcactgtttcccatgagcgggggctggccagggggccaggcctgccagcccgcggtggagatggcgctggaggacgtgaatagccgcagggacatcctgccggactatgagctcaagctcatccaccacgacagcaagtgtgatccaggccaagccaccaagtacctatatgagctgctctacaacgaccctatcaagatcatccttatgcctggctgcagctctgtctccacgctggtggctgaggctgctaggatgtggaacctcattgtgctttcctatggctccagctcaccagccctgtcaaaccggcagcgtttccccactttcttccgaacgcacccatcagccacactccacaaccctacccgcgtgaaactctttgaaaagtggggctggaagaagattgctaccatccagcagaccactgaggtcttcacttcgactctggacgacctggaggaacgagtgaaggaggctggaattgagattactttccgccagagtttcttctcagatccagctgtgcccgtcaaaaacctgaagcgccaggatgcccgaatcatcgtgggacttttctatgagactgaagcccggaaagttttttgtgaggtgtacaaggagcgtctctttgggaagaagtacgtctggttcctcattgggtggtatgctgacaattggttcaagatctacgacccttctatcaactgcacagtggatgagatgactgaggcggtggagggccacatcacaactgagattgtcatgctgaatcctgccaatacccgcagcatttccaacatgacatcccaggaatttgtggagaaactaaccaagcgactgaaaagacaccctgaggagacaggaggcttccaggaggcaccgctggcctatgatgccatctgggccttggcactggccctgaacaagacatctggaggaggcggccgttctggtgtgcgcctggaggacttcaactacaacaaccagaccattaccgaccaaatctaccgggcaatgaactcttcgtcctttgagggtgtctctggccatgtggtgtttgatgccagcggctctcggatggcatggacgcttatcgagcagcttcagggtggcagctacaagaagattggctactatgacagcaccaaggatgatctttcctggtccaaaacagataaatggattggagggtcccccccagctgaccagaccctggtcatcaagacattccgcttcctgtcacagaaactctttatctccgtctcagttctctccagcctgggcattgtcctagctgttgtctgtctgtcctttaacatctacaactcacatgtccgttatatccagaactcacagcccaacctgaacaacctgactgctgtgggctgctcactggctttagctgctgtcttccccctggggctcgatggttaccacattgggaggaaccagttccctttcgtctgccaggcccgcctctggctcctgggcctgggctttagtctgggctacggttccatgttcaccaagatttggtgggtccacacggtcttcacaaagaaggaagaaaagaaggagtggaggaagactctggaaccctggaagctgtatgccacagtgggcctgctggtgggcatggatgtcctcactctcgccatctggcagatcgtggaccctctgcaccggaccattgagacatttgccaaggaggaacctaaggaagatattgacgtctctattctgccccagctggagcattgcagctccaggaagatgaatacatggcttggcattttctatggttacaaggggctgctgctgctgctgggaatcttccttgcttatgagaccaagagtgtgtccactgagaagatcaatgatcaccgggctgtgggcatggctatctacaatgtggcagtcctgtgcctcatcactgctcctgtcaccatgattctgtccagccagcaggatgcagcctttgcctttgcctctcttgccatagttttctcctcctatatcactcttgttgtgctctttgtgcccaagatgcgcaggctgatcacccgaggggaatggcagtcggaggcgcaggacaccatgaagacagggtcatcgaccaacaacaacgaggaggagaagtcccggctgttggagaaggagaaccgtgaactggaaaagatcattgctgagaaagaggagcgtgtctctgaactgcgccatcaactccagtctcggcagcagctccgctcccggcgccacccaccgacacccccagaaccctctgggggcctgcccaggggaccccctgagccccccgaccggcttagctgtgatgggagtcgagtgcatttgctttataagtgagggtagggtgagggaggacaggccagtagggggagggaaagggagaggggaagggcaggggactcaggaagcagggggtccccatccccagctgggaagaacatgctatccaatctcatctcttgtaaatacatgtccccctgtgagttctgggctgatttgggtctctcatacctctgggaaacagacctttttctctcttactgcttcatgtaattttgtatcacctcttcacaatttagttcgtacctggcttgaagctgctcactgctcacacgctgcctcctcagcagcctcactgcatctttctcttcccatgcaacaccctcttctagttaccacggcaacccctgcagctcctctgcctttgtgctctgttcctgtccagcaggggtctcccaacaagtgctctttccaccccaaaggggcctctccttttctccactgtcataatctctttccatcttacttgcccttccatactttctcacatgtggctccccctgaattttgcttcctttgggagctcattcttttcgccaaggctcacatgctccttgcctctgctctgtgcactcacgctcagcacacatgcatcctcccctctcctgcgtgtgcccactgaacatgctcatgtgtacacacgcttttcccgtatgctttcttcatgttcagtcacatgtgctctcgggtgccctgcattcacagctacgtgtgcccctctcatggtcatgggtctgcccttgagcgtgtttgggtaggcatgtgcaatttgtctagcatgctgagtcatgtctttcctatttgcacacgtccatgtttatccatgtactttccctgtgtaccctccatgtaccttgtgtactttcttcccttaaatcatggtattcttctgacagagccatatgtaccctaccctgcacattgttatgcacttttccccaattcatgtttggtggggccatccacaccctctccttgtcacagaatctccatttctgctcagattccccccatctccattgcattcatgtactaccctcagtctacactcacaatcatcttctcccaagactgctcccttttgttttgtgtttttttgaggggaattaaggaaaaataagtgggggcaggtttggagagctgcttccagtggatagttgatgagaatcctgaccaaaggaaggcacccttgactgttgggatagacagatggacctatggggtgggaggtggtgtccctttcacactgtggtgtctcttggggaaggatctccccgaatctcaataaaccagtgaacagtgtgactcgg

SEQ ID NO: 7934 - DNA, 2364 bp, Homo sapiens
  source 1..2364: mol_type = unassigned DNA
atgttgctgctgctgctactggcgccactcttcctccgccccccgggcgcgggcggggcgcagacccccaacgccacctcagaaggttgccagatcatacacccgccctgggaagggggcatcaggtaccggggcctgactcgggaccaggtgaaggctatcaacttcctgccagtggactatgagattgagtatgtgtgccggggggagcgcgaggtggtggggcccaaggtccgcaagtgcctggccaacggctcctggacagatatggacacacccagccgctgtgtccgaatctgctccaagtcttatttgaccctggaaaatgggaaggttttcctgacgggtggggacctcccagctctggacggagcccgggtggatttccggtgtgaccccgacttccatctggtgggcagctcccggagcatctgtagtcagggccagtggagcacccccaagccccactgccaggtgaatcgaacgccacactcagaacggcgcgcagtgtacatcggggcactgtttcccatgagcgggggctggccagggggccaggcctgccagcccgcggtggagatggcgctggaggacgtgaatagccgcagggacatcctgccggactatgagctcaagctcatccaccacgacagcaagtgtgatccaggccaagccaccaagtacctatatgagctgctctacaacgaccctatcaagatcatccttatgcctggctgcagctctgtctccacgctggtggctgaggctgctaggatgtggaacctcattgtgctttcctatggctccagctcaccagccctgtcaaaccggcagcgtttccccactttcttccgaacgcacccatcagccacactccacaaccctacccgcgtgaaactctttgaaaagtggggctggaagaagattgctaccatccagcagaccactgaggtcttcacttcgactctggacgacctggaggaacgagtgaaggaggctggaattgagattactttccgccagagtttcttctcagatccagctgtgcccgtcaaaaacctgaagcgccaggatgcccgaatcatcgtgggacttttctatgagactgaagcccggaaagttttttgtgaggtgtacaaggagcgtctctttgggaagaagtacgtctggttcctcattgggtggtatgctgacaattggttcaagatctacgacccttctatcaactgcacagtggatgagatgactgaggcggtggagggccacatcacaactgagattgtcatgctgaatcctgccaatacccgcagcatttccaacatgacatcccaggaatttgtggagaaactaaccaagcgactgaaaagacaccctgaggagacaggaggcttccaggaggcaccgctggcctatgatgccatctgggccttggcactggccctgaacaagacatctggaggaggcggccgttctggtgtgcgcctggaggacttcaactacaacaaccagaccattaccgaccaaatctaccgggcaatgaactcttcgtcctttgagggtgtctctggccatgtggtgtttgatgccagcggctctcggatggcatggacgcttatcgagcagcttcagggtggcagctacaagaagattggctactatgacagcaccaaggatgatctttcctggtccaaaacagataaatggattgttatatccagaactcacagcccaacctgaacaacctgactgctgtgggctgctcactggctttagctgctgtcttccccctggggctcgatggttaccacattgggaggaaccagttccctttcgtctgccaggcccgcctctggctcctgggcctgggctttagtctgggctacggttccatgttcaccaagatttggtgggtccacacggtcttcacaaagaaggaagaaaagaaggagtggaggaagactctggaaccctggaagctgtatgccacagtgggcctgctggtgggcatggatgtcctcactctcgccatctggcagatcgtggaccctctgcaccggaccattgagacatttgccaaggaggaacctaaggaagatattgacgtctctattctgccccagctggagcattgcagctccaggaagatgaatacatggcttggcattttctatggttacaaggggctgctgctgctgctgggaatcttccttgcttatgagaccaagagtgtgtccactgagaagatcaatgatcaccgggctgtgggcatggctatctacaatgtggcagtcctgtgcctcatcactgctcctgtcaccatgattctgtccagccagcaggatgcagcctttgcctttgcctctc

SEQ ID NO: 7935 - DNA, 659 bp, Homo sapiens; identical to SEQ ID NO: 7889
  source 1..659: mol_type = unassigned DNA

SEQ ID NO: 7936 - DNA, 486 bp, Homo sapiens; identical to SEQ ID NO: 7890
  source 1..486: mol_type = unassigned DNA

SEQ ID NO: 7937 - DNA, 837 bp, Homo sapiens; identical to SEQ ID NO: 7891
  source 1..837: mol_type = unassigned DNA

SEQ ID NO: 7938 - DNA, 3523 bp, Homo sapiens
  source 1..3523: mol_type = unassigned DNA
ctcctcctcctcccctccgtcggtcagtcagtccgcgaggagagtccgcggtggcggcgacggtggcgagagccgcgggggccgtaggaagccaaccttccctgcttctccggggccctcgccccctcctccccacaaaatcagggatggaggcgcctccccggcaccctcttagcagccctccccaggaaaagtgtcccccctgagctcctaacgctccccaacagctacccctgccccccacgccatggggcccggggccccttttgcccgggtggggtggccactgccgcttctggttgtgatggcggcaggggtggctccggtgtgggcctcccactccccccatctcccgcggcctcactcgcgggtccccccgcacccctcctcagaacggcgcgcagtgtacatcggggcactgtttcccatgagcgggggctggccagggggccaggcctgccagcccgcggtggagatggcgctggaggacgtgaatagccgcagggacatcctgccggactatgagctcaagctcatccaccacgacagcaagtgtgatccaggccaagccaccaagtacctatatgagctgctctacaacgaccctatcaagatcatccttatgcctggctgcagctctgtctccacgctggtggctgaggctgctaggatgtggaacctcattgtgctttcctatggctccagctcaccagccctgtcaaaccggcagcgtttccccactttcttccgaacgcacccatcagccacactccacaaccctacccgcgtgaaactctttgaaaagtggggctggaagaagattgctaccatccagcagaccactgaggtcttcacttcgactctggacgacctggaggaacgagtgaaggaggctggaattgagattactttccgccagagtttcttctcagatccagctgtgcccgtcaaaaacctgaagcgccaggatgcccgaatcatcgtgggacttttctatgagactgaagcccggaaagttttttgtgaggtgtacaaggagcgtctctttgggaagaagtacgtctggttcctcattgggtggtatgctgacaattggttcaagatctacgacccttctatcaactgcacagtggatgagatgactgaggcggtggagggccacatcacaactgagattgtcatgctgaatcctgccaatacccgcagcatttccaacatgacatcccaggaatttgtggagaaactaaccaagcgactgaaaagacaccctgaggagacaggaggcttccaggaggcaccgctggcctatgatgccatctgggccttggcactggccctgaacaagacatctggaggaggcggccgttctggtgtgcgcctggaggacttcaactacaacaaccagaccattaccgaccaaatctaccgggcaatgaactcttcgtcctttgagggtgtctctggccatgtggtgtttgatgccagcggctctcggatggcatggacgcttatcgagcagcttcagggtggcagctacaagaagattggctactatgacagcaccaaggatgatctttcctggtccaaaacagataaatggattggagggtcccccccagctgaccagaccctggtcatcaagacattccgcttcctgtcacagaaactctttatctccgtctcagttctctccagcctgggcattgtcctagctgttgtctgtctgtcctttaacatctacaactcacatgtccgttatatccagaactcacagcccaacctgaacaacctgactgctgtgggctgctcactggctttagctgctgtcttccccctggggctcgatggttaccacattgggaggaaccagttccctttcgtctgccaggcccgcctctggctcctgggcctgggctttagtctgggctacggttccatgttcaccaagatttggtgggtccacacggtcttcacaaagaaggaagaaaagaaggagtggaggaagactctggaaccctggaagctgtatgccacagtgggcctgctggtgggcatggatgtcctcactctcgccatctggcagatcgtggaccctctgcaccggaccattgagacatttgccaaggaggaacctaaggaagatattgacgtctctattctgccccagctggagcattgcagctccaggaagatgaatacatggcttggcattttctatggttacaaggggctgctgctgctgctgggaatcttccttgcttatgagaccaagagtgtgtccactgagaagatcaatgatcaccgggctgtgggcatggctatctacaatgtggcagtcctgtgcctcatcactgctcctgtcaccatgattctgtccagccagcaggatgcagcctttgcctttgcctctcttgccatagttttctcctcctatatcactcttgttgtgctctttgtgcccaagatgcgcaggctgatcacccgaggggaatggcagtcggaggcgcaggacaccatgaagacagggtcatcgaccaacaacaacgaggaggagaagtcccggctgttggagaaggagaaccgtgaactggaaaagatcattgctgagaaagaggagcgtgtctctgaactgcgccatcaactccagtctcggcagcagctccgctcccggcgccacccaccgacacccccagaaccctctgggggcctgcccaggggaccccctgagccccccgaccggcttagctgtgatgggagtcgagtgcatttgctttataagtgagggtgcatgtccgttccgaggaatgggatttaatgacctttgatgccaacccatatgacagcgtgaaaaaaatcaaagaacatgtccggtctaagaccaaggttcctgtgcaggaccaggttcttttgctgggctccaagatcttaaagccacggagaagcctctcatcttatggcactgacaaagagaagaccatccaccttaccctgaaagtggtgaagcccagtgatgaggagctgcccttgtttcttgtggagtcaggtgatgaggcaaagaggcacctcctccaggtgcgaaggtccagctcagtggcacaagtgaaagcaatgatcgagactaagacgggtataatccctgagacccagattgtgacttgcaatggaaagagactggaagatgggaagatgatggcagattacggcatcagaaagggcaacttactcttcctggcatcttattgtattggagggtgaccaccctggggatggggtgttggcaggggtcaaaaagcttatttcttttaatctcttactcaacgaacacatcttctgatgatttcccaaaattaatgagaatgagatgagtagagtaagatttgggtgggatgggtaggatgaagtatattgcccaactctatgtttctttgattctaacacaattaattaagtgacatgatttttactaatgtattactgagactagtaaataaatttttaaggcaaaatagagcattcaaagcca

SEQ ID NO: 7939 - DNA, 4219 bp, Homo sapiens
  source 1..4219: mol_type = unassigned DNA
gaagggaggggggagcggggaggagcggccggcctggggccttgaggcccggggagagccggggagccgggcccgcgcgccgagatgttgctgctgctgctactggcgccactcttcctccgccccccgggcgcgggcggggcgcagacccccaacgccacctcagaaggttgccagatcatacacccgccctgggaagggggcatcaggtaccggggcctgactcgggaccaggtgaaggctatcaacttcctgccagtggactatgagattgagtatgtgtgccggggggagcgcgaggtggtggggcccaaggtccgcaagtgcctggccaacggctcctggacagatatggacacacccagccgctgtgtccgaatctgctccaagtcttatttgaccctggaaaatgggaaggttttcctgacgggtggggacctcccagctctggacggagcccgggtggatttccggtgtgaccccgacttccatctgtgaatcgaacgccacactcagaacggcgcgcagtgtacatcggggcactgtttcccatgagcgggggctggccagggggccaggcctgccagcccgcggtggagatggcgctggaggacgtgaatagccgcagggacatcctgccggactatgagctcaagctcatccaccacgacagcaagtgtgatccaggccaagccaccaagtacctatatgagctgctctacaacgaccctatcaagatcatccttatgcctggctgcagctctgtctccacgctggtggctgaggctgctaggatgtggaacctcattgtgctttcctatggctccagctcaccagccctgtcaaaccggcagcgtttccccactttcttccgaacgcacccatcagccacactccacaaccctacccgcgtgaaactctttgaaaagtggggctggaagaagattgctaccatccagcagaccactgaggtcttcacttcgactctggacgacctggaggaacgagtgaaggaggctggaattgagattactttccgccagagtttcttctcagatccagctgtgcccgtcaaaaacctgaagcgccaggatgcccgaatcatcgtgggacttttctatgagactgaagcccggaaagttttttgtgaggtgtacaaggagcgtctctttgggaagaagtacgtctggttcctcattgggtggtatgctgacaattggttcaagatctacgacccttctatcaactgcacagtggatgagatgactgaggcggtggagggccacatcacaactgagattgtcatgctgaatcctgccaatacccgcagcatttccaacatgacatcccaggaatttgtggagaaactaaccaagcgactgaaaagacaccctgaggagacaggaggcttccaggaggcaccgctggcctatgatgccatctgggccttggcactggccctgaacaagacatctggaggaggcggccgttctggtgtgcgcctggaggacttcaactacaacaaccagaccattaccgaccaaatctaccgggcaatgaactcttcgtcctttgagggtgtctctggccatgtggtgtttgatgccagcggctctcggatggcatggacgcttatcgagcagcttcagggtggcagctacaagaagattggctactatgacagcaccaaggatgatctttcctggtccaaaacagataaatggattggagggtcccccccagctgaccagaccctggtcatcaagacattccgcttcctgtcacagaaactctttatctccgtctcagttctctccagcctgggcattgtcctagctgttgtctgtctgtcctttaacatctacaactcacatgtccgttatatccagaactcacagcccaacctgaacaacctgactgctgtgggctgctcactggctttagctgctgtcttccccctggggctcgatggttaccacattgggaggaaccagttccctttcgtctgccaggcccgcctctggctcctgggcctgggctttagtctgggctacggttccatgttcaccaagatttggtgggtccacacggtcttcacaaagaaggaagaaaagaaggagtggaggaagactctggaaccctggaagctgtatgccacagtgggcctgctggtgggcatggatgtcctcactctcgccatctggcagatcgtggaccctctgcaccggaccattgagacatttgccaaggaggaacctaaggaagatattgacgtctctattctgccccagctggagcattgcagctccaggaagatgaatacatggcttggcattttctatggttacaaggggctgctgctgctgctgggaatcttccttgcttatgagaccaagagtgtgtccactgagaagatcaatgatcaccgggctgtgggcatggctatctacaatgtggcagtcctgtgcctcatcactgctcctgtcaccatgattctgtccagccagcaggatgcagcctttgcctttgcctctcttgccatagttttctcctcctatatcactcttgttgtgctctttgtgcccaagatgcgcaggctgatcacccgaggggaatggcagtcggaggcgcaggacaccatgaagacagggtcatcgaccaacaacaacgaggaggagaagtcccggctgttggagaaggagaaccgtgaactggaaaagatcattgctgagaaagaggagcgtgtctctgaactgcgccatcaactccagtctcggcagcagctccgctcccggcgccacccaccgacacccccagaaccctctgggggcctgcccaggggaccccctgagccccccgaccggcttagctgtgatgggagtcgagtgcatttgctttataagtgagggtagggtgagggaggacaggccagtagggggagggaaagggagaggggaagggcaggggactcaggaagcagggggtccccatccccagctgggaagaacatgctatccaatctcatctcttgtaaatacatgtccccctgtgagttctgggctgatttgggtctctcatacctctgggaaacagacctttttctctcttactgcttcatgtaattttgtatcacctcttcacaatttagttcgtacctggcttgaagctgctcactgctcacacgctgcctcctcagcagcctcactgcatctttctcttcccatgcaacaccctcttctagttaccacggcaacccctgcagctcctctgcctttgtgctctgttcctgtccagcaggggtctcccaacaagtgctctttccaccccaaaggggcctctccttttctccactgtcataatctctttccatcttacttgcccttccatactttctcacatgtggctccccctgaattttgcttcctttgggagctcattcttttcgccaaggctcacatgctccttgcctctgctctgtgcactcacgctcagcacacatgcatcctcccctctcctgcgtgtgcccactgaacatgctcatgtgtacacacgcttttcccgtatgctttcttcatgttcagtcacatgtgctctcgggtgccctgcattcacagctacgtgtgcccctctcatggtcatgggtctgcccttgagcgtgtttgggtaggcatgtgcaatttgtctagcatgctgagtcatgtctttcctatttgcacacgtccatgtttatccatgtactttccctgtgtaccctccatgtaccttgtgtactttcttcccttaaatcatggtattcttctgacagagccatatgtaccctaccctgcacattgttatgcacttttccccaattcatgtttggtggggccatccacaccctctccttgtcacagaatctccatttctgctcagattccccccatctccattgcattcatgtactaccctcagtctacactcacaatcatcttctcccaagactgctcccttttgttttgtgtttttttgaggggaattaaggaaaaataagtgggggcaggtttggagagctgcttccagtggatagttgatgagaatcctgaccaaaggaaggcacccttgactgttgggatagacagatggacctatggggtgggaggtggtgtccctttcacactgtggtgtctcttggggaaggatctccccgaatctcaataaaccagtgaacagtgtgactcgg

SEQ ID NO: 7940 - DNA, 1802 bp, Homo sapiens
  source 1..1802: mol_type = unassigned DNA
ttatatccagaactcacagcccaacctgaacaacctgactgctgtgggctgctcactggctttagctgctgtcttccccctggggctcgatggttaccacattgggaggaaccagttccctttcgtctgccaggcccgcctctggctcctgggcctgggctttagtctgggctacggttccatgttcaccaagatttggtgggtccacacggtcttcacaaagaaggaagaaaagaaggagtggaggaagactctggaaccctggaagctgtatgccacagtgggcctgctggtgggcatggatgtcctcactctcgccatctggcagatcgtggaccctctgcaccggaccattgagacatttgccaaggaggaacctaaggaagatattgacgtctctattctgccccagctggagcattgcagctccaggaagatgaatacatggcttgctgtgatgggagtcgagtgcatttgctttataagtgagggtagggtgagggaggacaggccagtagggggagggaaagggagaggggaagggcaggggactcaggaagcagggggtccccatccccagctgggaagaacatgctatccaatctcatctcttgtaaatacatgtccccctgtgagttctgggctgatttgggtctctcatacctctgggaaacagacctttttctctcttactgcttcatgtaattttgtatcacctcttcacaatttagttcgtacctggcttgaagctgctcactgctcacacgctgcctcctcagcagcctcactgcatctttctcttcccatgcaacaccctcttctagttaccacggcaacccctgcagctcctctgcctttgtgctctgttcctgtccagcaggggtctcccaacaagtgctctttccaccccaaaggggcctctccttttctccactgtcataatctctttccatcttacttgcccttccatactttctcacatgtggctccccctgaattttgcttcctttgggagctcattcttttcgccaaggctcacatgctccttgcctctgctctgtgcactcacgctcagcacacatgcatcctcccctctcctgcgtgtgcccactgaacatgctcatgtgtacacacgcttttcccgtatgctttcttcatgttcagtcacatgtgctctcgggtgccctgcattcacagctacgtgtgcccctctcatggtcatgggtctgcccttgagcgtgtttgggtaggcatgtgcaatttgtctagcatgctgagtcatgtctttcctatttgcacacgtccatgtttatccatgtactttccctgtgtaccctccatgtaccttgtgtactttcttcccttaaatcatggtattcttctgacagagccatatgtaccctaccctgcacattgttatgcacttttccccaattcatgtttggtggggccatccacaccctctccttgtcacagaatctccatttctgctcagattccccccatctccattgcattcatgtactaccctcagtctacactcacaatcatcttctcccaagactgctcccttttgttttgtgtttttttgaggggaattaaggaaaaataagtgggggcaggtttggagagctgcttccagtggatagttgatgagaatcctgaccaaaggaaggcacccttgactgttgggatagacagatggacctatggggtgggaggtggtgtccctttcacactgtggtgtctcttggggaaggatctccccgaatctcaataaaccagtgaacagtgtgactcgg

SEQ ID NO: 7941 - DNA, 1251 bp, Homo sapiens
  source 1..1251: mol_type = unassigned DNA
ggctgccgccgccccggggaagaagagacaggggtggggtttgggggaagcgagagaggaggggagagaccctggccaggctggagcctggattcgaggggaggagggacgggaggaggagaaaggtggaggagaagggaggggggagcggggaggagcggccggcctggggccttgaggcccggggagagccggggagccgggcccgcgcgccgagatgttgctgctgctgctactggcgccactcttcctccgccccccgggcgcgggcggggcgcagacccccaacgccacctcagaaggttgccagatcatacacccgccctgggaagggggcatcaggtaccggggcctgactcgggaccaggtgaaggctatcaacttcctgccagtggactatgagattgagtatgtgtgccggggggagcgcgaggtggtggggcccaaggtccgcaagtgcctggccaacggctcctggacagatatggacacacccagccgctgtgtccgaatctgctccaagtcttatttgaccctggaaaatgggaaggttttcctgacgggtggggacctcccagctctggacggagcccgggtggatttccggtgtgaccccgacttccatctggtgggcagctcccggagcatctgtagtcagggccagtggagcacccccaagccccactgccagggtgaggggaacagctgcctgcatgcagctgatgaggacgcttgtgtgaggatgggagtggggtgggaatggataatgggaaagaatggagagctataaaaatgtgggggaggacactggaaaggggagatgaaagtccctttttcctccatcacctgcctcaaacttcctcttgcagtccccggtatcctctgtaggttgggggcttccttcctttaccttttaaaaaaatcttcctgctcccgattcttagacctcacgttttctcttttcctttatgaatctcacctctctcaccttcttcaggtttaaatactccaattttccctttctctaaacttagaaatttccatgcatcaccctcttctagaattcatccctcaccattccttatataattgatttattgtaaagactcagaaataaatcaaacattctactaagaaaaattgagaaggggagctctgggggtggaaacatattagggtaaaagacttaaaattggaggcagcattatcagaagatgaagaacaactcagggatggggtgggaagaagaca

SEQ ID NO: 7942 - DNA, 407 bp, Homo sapiens
  source 1..407: mol_type = unassigned DNA
gatgccagcggctctcggatggcatggacgcttatcgagcagcttcagggtggcagctacaagaagattggctactatgacagcaccaaggatgatctttcctggtccaaaacagataaatggattgttatatccagaactcacagcccaacctgaacaacctgactgctgtgggctgctcactggctttagctgctgtcttccccctggggctcgatggttaccacattgggaggaaccagttccctttcgtctgccaggtgaggaggtggtgggcaaattccttacaggatgtgactctcccacccgtctcaggagcaccttccatgatttatgattctctgcccttcctcctcagctttccctgactcttgtccctgttctttccttctagcatcacccctctg

SEQ ID NO: 7943 - DNA, 1739 bp, Homo sapiens; identical to SEQ ID NO: 7897
  source 1..1739: mol_type = unassigned DNA

SEQ ID NO: 7944 - DNA, 4199 bp, Homo sapiens
  source 1..4199: mol_type = unassigned DNA
atgttgctgctgctgctactggcgccactcttcctccgccccccgggcgcgggcggggcgcagacccccaacgccacctcagaaggttgccagatcatacacccgccctgggaagggggcatcaggtaccggggcctgactcgggaccaggtgaaggctatcaacttcctgccagtggactatgagattgagtatgtgtgccggggggagcgcgaggtggtggggcccaaggtccgcaagtgcctggccaacggctcctggacagatatggacacacccagccgctgtgtccgaatctgctccaagtcttatttgaccctggaaaatgggaaggttttcctgacgggtggggacctcccagctctggacggagcccgggtggatttccggtgtgaccccgacttccatctggtgggcagctcccggagcatctgtagtcagggccagtggagcacccccaagccccactgccaggtgaatcgaacgccacactcagaacggcgcgcagtgtacatcggggcactgtttcccatgagcgggggctggccagggggccaggcctgccagcccgcggtggagatggcgctggaggacgtgaatagccgcagggacatcctgccggactatgagctcaagctcatccaccacgacagcaagtgtgatccaggccaagccaccaagtacctatatgagctgctctacaacgaccctatcaagatcatccttatgcctggctgcagctctgtctccacgctggtggctgaggctgctaggatgtggaacctcattgtgctttcctatggctccagctcaccagccctgtcaaaccggcagcgtttccccactttcttccgaacgcacccatcagccacactccacaaccctacccgcgtgaaactctttgaaaagtggggctggaagaagattgctaccatccagcagaccactgaggtcttcacttcgactctggacgacctggaggaacgagtgaaggaggctggaattgagattactttccgccagagtttcttctcagatccagctgtgcccgtcaaaaacctgaagcgccaggatgcccgaatcatcgtgggacttttctatgagactgaagcccggaaagttttttgtgaggtgtacaaggagcgtctctttgggaagaagtacgtctggttcctcattgggtggtatgctgacaattggttcaagatctacgacccttctatcaactgcacagtggatgagatgactgaggcggtggagggccacatcacaactgagattgtcatgctgaatcctgccaatacccgcagcatttccaacatgacatcccaggaatttgtggagaaactaaccaagcgactgaaaagacaccctgaggagacaggaggcttccaggaggcaccgctggcctatgatgccatctgggccttggcactggccctgaacaagacatctggaggaggcggccgttctggtgtgcgcctggaggacttcaactacaacaaccagaccattaccgaccaaatctaccgggcaatgaactcttcgtcctttgagggtgtctctggccatgtggtgtttgatgccagcggctctcggatggcatggacgcttatcgagcagcttcagggtggcagctacaagaagattggctactatgacagcaccaaggatgatctttcctggtccaaaacagataaatggattggagggtcccccccagctgaccagaccctggtcatcaagacattccgcttcctgtcacagaaactctttatctccgtctcagttctctccagcctgggcattgtcctagctgttgtctgtctgtcctttaacatctacaactcacatgtccgttatatccagaactcacagcccaacctgaacaacctgactgctgtgggctgctcactggctttagctgctgtcttccccctggggctcgatggttaccacattgggaggaaccagttccctttcgtctgccaggcccgcctctggctcctgggcctgggctttagtctgggctacggttccatgttcaccaagatttggtgggtccacacggtcttcacaaagaaggaagaaaagaaggagtggaggaagactctggaaccctggaagctgtatgccacagtgggcctgctggtgggcatggatgtcctcactctcgccatctggcagatcgtggaccctctgcaccggaccattgagacatttgccaaggaggaacctaaggaagatattgacgtctctattctgccccagctggagcattgcagctccaggaagatgaatacatggcttggcattttctatggttacaaggggctgctgctgctgctgggaatcttccttgcttatgagaccaagagtgtgtccactgagaagatcaatgatcaccgggctgtgggcatggctatctacaatgtggcagtcctgtgcctcatcactgctcctgtcaccatgattctgtccagccagcaggatgcagcctttgcctttgcctctcttgccatagttttctcctcctatatcactcttgttgtgctctttgtgcccaagatgcgcaggctgatcacccgaggggaatggcagtcggaggcgcaggacaccatgaagacagggtcatcgaccaacaacaacgaggaggagaagtcccggctgttggagaaggagaaccgtgaactggaaaagatcattgctgagaaagaggagcgtgtctctgaactgcgccatcaactccagtctcggcagcagctccgctcccggcgccacccaccgacacccccagaaccctctgggggcctgcccaggggaccccctgagccccccgaccggcttagctgtgatgggagtcgagtgcatttgctttataagtgagggtagggtgagggaggacaggccagtagggggagggaaagggagaggggaagggcaggggactcaggaagcagggggtccccatccccagctgggaagaacatgctatccaatctcatctcttgtaaatacatgtccccctgtgagttctgggctgatttgggtctctcatacctctgggaaacagacctttttctctcttactgcttcatgtaattttgtatcacctcttcacaatttagttcgtacctggcttgaagctgctcactgctcacacgctgcctcctcagcagcctcactgcatctttctcttcccatgcaacaccctcttctagttaccacggcaacccctgcagctcctctgcctttgtgctctgttcctgtccagcaggggtctcccaacaagtgctctttccaccccaaaggggcctctccttttctccactgtcataatctctttccatcttacttgcccttccatactttctcacatgtggctccccctgaattttgcttcctttgggagctcattcttttcgccaaggctcacatgctccttgcctctgctctgtgcactcacgctcagcacacatgcatcctcccctctcctgcgtgtgcccactgaacatgctcatgtgtacacacgcttttcccgtatgctttcttcatgttcagtcacatgtgctctcgggtgccctgcattcacagctacgtgtgcccctctcatggtcatgggtctgcccttgagcgtgtttgggtaggcatgtgcaatttgtctagcatgctgagtcatgtctttcctatttgcacacgtccatgtttatccatgtactttccctgtgtaccctccatgtaccttgtgtactttcttcccttaaatcatggtattcttctgacagagccatatgtaccctaccctgcacattgttatgcacttttccccaattcatgtttggtggggccatccacaccctctccttgtcacagaatctccatttctgctcagattccccccatctccattgcattcatgtactaccctcagtctacactcacaatcatcttctcccaagactgctcccttttgttttgtgtttttttgaggggaattaaggaaaaataagtgggggcaggtttggagagctgcttccagtggatagttgatgagaatcctgaccaaaggaaggcacccttgactgttgggatagacagatggacctatggggtgggaggtggtgtccctttcacactgtggtgtctcttggggaaggatctccccgaatctcaataaaccagtgaacagtgtgactcgg

SEQ ID NO: 7945 - DNA, 4510 bp, Homo sapiens; identical to SEQ ID NO: 7885
  source 1..4510: mol_type = unassigned DNA

SEQ ID NO: 7946 - DNA, 4070 bp, Homo sapiens; identical to SEQ ID NO: 7886
  source 1..4070: mol_type = unassigned DNA

SEQ ID NO: 7947 - DNA, 4299 bp, Homo sapiens; identical to SEQ ID NO: 7887
  source 1..4299: mol_type = unassigned DNA

SEQ ID NO: 7948 - DNA, 2364 bp, Homo sapiens; identical to SEQ ID NO: 7888
  source 1..2364: mol_type = unassigned DNA

SEQ ID NO: 7949 - DNA, 659 bp, Homo sapiens; identical to SEQ ID NO: 7889
  source 1..659: mol_type = unassigned DNA

SEQ ID NO: 7950 - DNA, 486 bp, Homo sapiens; identical to SEQ ID NO: 7890
  source 1..486: mol_type = unassigned DNA

SEQ ID NO: 7951 - DNA, 837 bp, Homo sapiens; identical to SEQ ID NO: 7891
  source 1..837: mol_type = unassigned DNA

SEQ ID NO: 7952 - DNA, 3523 bp, Homo sapiens
  source 1..3523: mol_type = unassigned DNA
ctcctcctcctcccctccgtcggtcagtcagtccgcgaggagagtccgcggtggcggcgacggtggcgagagccgcgggggccgtaggaagccaaccttccctgcttctccggggccctcgccccctcctccccacaaaatcagggatggaggcgcctccccggcaccctcttagcagccctccccaggaaaagtgtcccccctgagctcctaacgctccccaacagctacccctgccccccacgccatggggcccggggccccttttgcccgggtggggtggccactgccgcttctggttgtgatggcggcaggggtggctccggtgtgggcctcccactccccccatctcccgcggcctcactcgcgggtccccccgcacccctcctcagaacggcgcgcagtgtacatcggggcactgtttcccatgagcgggggctggccagggggccaggcctgccagcccgcggtggagatggcgctggaggacgtgaatagccgcagggacatcctgccggactatgagctcaagctcatccaccacgacagcaagtgtgatccaggccaagccaccaagtacctatatgagctgctctacaacgaccctatcaagatcatccttatgcctggctgcagctctgtctccacgctggtggctgaggctgctaggatgtggaacctcattgtgctttcctatggctccagctcaccagccctgtcaaaccggcagcgtttccccactttcttccgaacgcacccatcagccacactccacaaccctacccgcgtgaaactctttgaaaagtggggctggaagaagattgctaccatccagcagaccactgaggtcttcacttcgactctggacgacctggaggaacgagtgaaggaggctggaattgagattactttccgccagagtttcttctcagatccagctgtgcccgtcaaaaacctgaagcgccaggatgcccgaatcatcgtgggacttttctatgagactgaagcccggaaagttttttgtgaggtgtacaaggagcgtctctttgggaagaagtacgtctggttcctcattgggtggtatgctgacaattggttcaagatctacgacccttctatcaactgcacagtggatgagatgactgaggcggtggagggccacatcacaactgagattgtcatgctgaatcctgccaatacccgcagcatttccaacatgacatcccaggaatttgtggagaaactaaccaagcgactgaaaagacaccctgaggagacaggaggcttccaggaggcaccgctggcctatgatgccatctgggccttggcactggccctgaacaagacatctggaggaggcggccgttctggtgtgcgcctggaggacttcaactacaacaaccagaccattaccgaccaaatctaccgggcaatgaactcttcgtcctttgagggtgtctctggccatgtggtgtttgatgccagcggctctcggatggcatggacgcttatcgagcagcttcagggtggcagctacaagaagattggctactatgacagcaccaaggatgatctttcctggtccaaaacagataaatggattggagggtcccccccagctgaccagaccctggtcatcaagacattccgcttcctgtcacagaaactctttatctccgtctcagttctctccagcctgggcattgtcctagctgttgtctgtctgtcctttaacatctacaactcacatgtccgttatatccagaactcacagcccaacctgaacaacctgactgctgtgggctgctcactggctttagctgctgtcttccccctggggctcgatggttaccacattgggaggaaccagtttcctttcgtctgccaggcccgcctctggctcctgggcctgggctttagtctgggctacggttccatgttcaccaagatttggtgggtccacacggtcttcacaaagaaggaagaaaagaaggagtggaggaagactctggaaccctggaagctgtatgccacagtgggcctgctggtgggcatggatgtcctcactctcgccatctggcagatcgtggaccctctgcaccggaccattgagacatttgccaaggaggaacctaaggaagatattgacgtctctattctgccccagctggagcattgcagctccaggaagatgaatacatggcttggcattttctatggttacaaggggctgctgctgctgctgggaatcttccttgcttatgagaccaagagtgtgtccactgagaagatcaatgatcaccgggctgtgggcatggctatctacaatgtggcagtcctgtgcctcatcactgctcctgtcaccatgattctgtccagccagcaggatgcagcctttgcctttgcctctcttgccatagttttctcctcctatatcactcttgttgtgctctttgtgcccaagatgcgcaggctgatcacccgaggggaatggcagtcggaggcgcaggacaccatgaagacagggtcatcgaccaacaacaacgaggaggagaagtcccggctgttggagaaggagaaccgtgaactggaaaagatcattgctgagaaagaggagcgtgtctctgaactgcgccatcaactccagtctcggcagcagctccgctcccggcgccacccaccgacacccccagaaccctctgggggcctgcccaggggaccccctgagccccccgaccggcttagctgtgatgggagtcgagtgcatttgctttataagtgagggtgcatgtccgttccgaggaatgggatttaatgacctttgatgccaacccatatgacagcgtgaaaaaaatcaaagaacatgtccggtctaagaccaaggttcctgtgcaggaccaggttcttttgctgggctccaagatcttaaagccacggagaagcctctcatcttatggcattgacaaagagaagaccatccaccttaccctgaaagtggtgaagcccagtgatgaggagctgcccttgtttcttgtggagtcaggtgatgaggcaaagaggcacctcctccaggtgcgaaggtccagctcagtggcacaagtgaaagcaatgatcgagactaagacgggtataatccctgagacccagattgtgacttgcaatggaaagagactggaagatgggaagatgatggcagattacggcatcagaaagggcaacttactcttcctggcatcttattgtattggagggtgaccaccctggggatggggtgttggcaggggtcaaaaagcttatttcttttaatctcttactcaacgaacacatcttctgatgatttcccaaaattaatgagaatgagatgagtagagtaagatttgggtgggatgggtaggatgaagtatattgcccaactctatgtttctttgattctaacacaattaattaagtgacatgatttttactaatgtattactgagactagtaaataaatttttaaggcaaaatagagcattcaaagcca

SEQ ID NO: 7953 - DNA, 4220 bp, Homo sapiens; identical to SEQ ID NO: 7893
  source 1..4220: mol_type = unassigned DNA

SEQ ID NO: 7954 - DNA, 1802 bp, Homo sapiens; identical to SEQ ID NO: 7894
  source 1..1802: mol_type = unassigned DNA

SEQ ID NO: 7955 - DNA, 1252 bp, Homo sapiens; identical to SEQ ID NO: 7895
  source 1..1252: mol_type = unassigned DNA

SEQ ID NO: 7956 - DNA, 407 bp, Homo sapiens; identical to SEQ ID NO: 7896
  source 1..407: mol_type = unassigned DNA

SEQ ID NO: 7957 - DNA, 1739 bp, Homo sapiens; identical to SEQ ID NO: 7897
  source 1..1739: mol_type = unassigned DNA

SEQ ID NO: 7958 - DNA, 3523 bp, Homo sapiens
  source 1..3523: mol_type = unassigned DNA
ctcctcctcctcccctccgtcggtcagtcagtccgcgaggagagtccgcggtggcggcgacggtggcgagagccgcgggggccgtaggaagccaaccttccctgcttctccggggccctcgccccctcctccccacaaaatcagggatggaggcgcctccccggcaccctcttagcagccctccccaggaaaagtgtcccccctgagctcctaacgctccccaacagctacccctgccccccacgccatggggcccggggccccttttgcccgggtggggtggccactgccgcttctggttgtgatggcggcaggggtggctccggtgtgggcctcccactccccccatctcccgcggcctcactcgcgggtccccccgcacccctcctcagaacggcgcgcagtgtacatcggggcactgtttcccatgagcgggggctggccagggggccaggcctgccagcccgcggtggagatggcgctggaggacgtgaatagccgcagggacatcctgccggactatgagctcaagctcatccaccacgacagcaagtgtgatccaggccaagccaccaagtacctatatgagctgctctacaacgaccctatcaagatcatccttatgcctggctgcagctctgtctccacgctggtggctgaggctgctaggatgtggaacctcattgtgctttcctatggctccagctcaccagccctgtcaaaccggcagcgtttccccactttcttccgaacgcacccatcagccacactccacaaccctacccgcgtgaaactctttgaaaagtggggctggaagaagattgctaccatccagcagaccactgaggtcttcacttcgactctggacgacctggaggaacgagtgaaggaggctggaattgagattactttccgccagagtttcttctcagatccagctgtgcccgtcaaaaacctgaagcgccaggatgcccgaatcatcgtgggacttttctatgagactgaagcccggaaagttttttgtgaggtgtacaaggagcgtctctttgggaagaagtacgtctggttcctcattgggtggtatgctgacaattggttcaagatctacgacccttctatcaactgcacagtggatgagatgactgaggcggtggagggccacatcacaactgagattgtcatgctgaatcctgccaatacccgcagcatttccaacatgacatcccaggaatttgtggagaaactaaccaagcgactgaaaagacaccctgaggagacaggaggcttccaggaggcaccgctggcctatgatgccatctgggccttggcactggccctgaacaagacatctggaggaggcggccgttctggtgtgcgcctggaggacttcaactacaacaaccagaccattaccgaccaaatctaccgggcaatgaactcttcgtcctttgagggtgtctctggccatgtggtgtttgatgccagcggctctcggatggcatggacgcttatcgagcagcttcagggtggcagctacaagaagattggctactatgacagcaccaaggatgatctttcctggtccaaaacagataaatggattggagggtcccccccagctgaccagaccctggtcatcaagacattccgcttcctgtcacagaaactctttatctccgtctcagttctctccagcctgggcattgtcctagctgttgtctgtctgtcctttaacatctacaactcacatgtccgttatatccagaactcacagcccaacctgaacaacctgactgctgtgggctgctcactggctttagctgctgtcttccccctggggctcgatggttaccacattgggaggaaccagtttcctttcgtctgccaggcccgcctctggctcctgggcctgggctttagtctgggctacggttccatgttcaccaagatttggtgggtccacacggtcttcacaaagaaggaagaaaagaaggagtggaggaagactctggaaccctggaagctgtatgccacagtgggcctgctggtgggcatggatgtcctcactctcgccatctggcagatcgtggaccctctgcaccggaccattgagacatttgccaaggaggaacctaaggaagatattgacgtctctattctgccccagctggagcattgcagctccaggaagatgaatacatggcttggcattttctatggttacaaggggctgctgctgctgctgggaatcttccttgcttatgagaccaagagtgtgtccactgagaagatcaatgatcaccgggctgtgggcatggctatctacaatgtggcagtcctgtgcctcatcactgctcctgtcaccatgattctgtccagccagcaggatgcagcctttgcctttgcctctcttgccatagttttctcctcctatatcactcttgttgtgctctttgtgcccaagatgcgcaggctgatcacccgaggggaatggcagtcggaggcgcaggacaccatgaagacagggtcatcgaccaacaacaacgaggaggagaagtcccggctgttggagaaggagaaccgtgaactggaaaagatcattgctgagaaagaggagcgtgtctctgaactgcgccatcaactccagtctcggcagcagctccgctcccggcgccacccaccgacacccccagaaccctctgggggcctgcccaggggaccccctgagccccccgaccggcttagctgtgatgggagtcgagtgcatttgctttataagtgagggtgcatgtccgttccgaggaatgggatttaatgacctttgatgccaacccatatgacagcgtgaaaaaaatcaaagaacatgtccggtctaagaccaaggttcctgtgcaggaccaggttcttttgctgggctccaagatcttaaagccacggagaagcctctcatcttacggcattgacaaagagaagaccatccaccttaccctgaaagtggtgaagcccagtgatgaggagctgcccttgtttcttgtggagtcaggtgatgaggcaaagaggcacctcctccaggtgcgaaggtccagctcagtggcacaagtgaaagcaatgatcgagactaagacgggtataatccctgagacccagattgtgacttgcaatggaaagagactggaagatgggaagatgatggcagattacggcatcagaaagggcaacttactcttcctggcatcttattgtattggagggtgaccaccctgggcatggggtgttggcaggggtcaaaaagcttatttcttttaatctcttactcaacgaacacatcttctgatgatttcccaaaattaatgagaatgagatgagtagagtaagatttgggtgggatgggtaggatgaagtatattgcccaactctatgtttctttgattctaacacaattaattaagtgacatgatttttactaatgtattactgagactagtaaataaatttttaaggcaaaatagagcattcaaagcca

SEQ ID NO: 7959 - DNA, 1802 bp, Homo sapiens; identical to SEQ ID NO: 7894
  source 1..1802: mol_type = unassigned DNA; mol_type = unassigned DNA

SEQ ID NO: 7960 - DNA, 4220 bp, Homo sapiens; identical to SEQ ID NO: 7893
  source 1..4220: mol_type = unassigned DNA

SEQ ID NO: 7961 - DNA, 4299 bp, Homo sapiens; identical to SEQ ID NO: 7887
  source 1..4299: mol_type = unassigned DNA

SEQ ID NO: 7962 - DNA, 4510 bp, Homo sapiens; identical to SEQ ID NO: 7885
  source 1..4510: mol_type = unassigned DNA

SEQ ID NO: 7963 - DNA, 4065 bp, Homo sapiens
  source 1..4065: mol_type = unassigned DNA
agtcagtccgcgaggagagtccgcggtggcggcgacggtggcgagagccgcgggggccgtaggaagccaaccttccctgcttctccggggccctcgccccctcctccccacaaaatcagggatggaggcgcctccccggcaccctcttagcagccctccccaggaaaagtgtcccccctgagctcctaacgctccccaacagctacccctgccccccacgccatggggcccggggccccttttgcccgggtggggtggccactgccgcttctggttgtgatggcggcaggggtggctccggtgtgggcctcccactccccccatctcccgcggcctcactcgcgggtccccccgcacccctcctcagaacggcgcgcagtgtacatcggggcactgtttcccatgagcgggggctggccagggggccaggcctgccagcccgcggtggagatggcgctggaggacgtgaatagccgcagggacatcctgccggactatgagctcaagctcatccaccacgacagcaagtgtgatccaggccaagccaccaagtacctatatgagctgctctacaacgaccctatcaagatcatccttatgcctggctgcagctctgtctccacgctggtggctgaggctgctaggatgtggaacctcattgtgctttcctatggctccagctcaccagccctgtcaaaccggcagcgtttccccactttcttccgaacgcacccatcagccacactccacaaccctacccgcgtgaaactctttgaaaagtggggctggaagaagattgctaccatccagcagaccactgaggtcttcacttcgactctggacgacctggaggaacgagtgaaggaggctggaattgagattactttccgccagagtttcttctcagatccagctgtgcccgtcaaaaacctgaagcgccaggatgcccgaatcatcgtgggacttttctatgagactgaagcccggaaagttttttgtgaggtgtacaaggagcgtctctttgggaagaagtacgtctggttcctcattgggtggtatgctgacaattggttcaagatctacgacccttctatcaactgcacagtggatgagatgactgaggcggtggagggccacatcacaactgagattgtcatgctgaatcctgccaatacccgcagcatttccaacatgacatcccaggaatttgtggagaaactaaccaagcgactgaaaagacaccctgaggagacaggaggcttccaggaggcaccgctggcctatgatgccatctgggccttggcactggccctgaacaagacatctggaggaggcggccgttctggtgtgcgcctggaggacttcaactacaacaaccagaccattaccgaccaaatctaccgggcaatgaactcttcgtcctttgagggtgtctctggccatgtggtgtttgatgccagcggctctcggatggcatggacgcttatcgagcagcttcagggtggcagctacaagaagattggctactatgacagcaccaaggatgatctttcctggtccaaaacagataaatggattggagggtcccccccagctgaccagaccctggtcatcaagacattccgcttcctgtcacagaaactctttatctccgtctcagttctctccagcctgggcattgtcctagctgttgtctgtctgtcctttaacatctacaactcacatgtccgttatatccagaactcacagcccaacctgaacaacctgactgctgtgggctgctcactggctttagctgctgtcttccccctggggctcgatggttaccacattgggaggaaccagtttcctttcgtctgccaggcccgcctctggctcctgggcctgggctttagtctgggctacggttccatgttcaccaagatttggtgggtccacacggtcttcacaaagaaggaagaaaagaaggagtggaggaagactctggaaccctggaagctgtatgccacagtgggcctgctggtgggcatggatgtcctcactctcgccatctggcagatcgtggaccctctgcaccggaccattgagacatttgccaaggaggaacctaaggaagatattgacgtctctattctgccccagctggagcattgcagctccaggaagatgaatacatggcttggcattttctatggttacaaggggctgctgctgctgctgggaatcttccttgcttatgagaccaagagtgtgtccactgagaagatcaatgatcaccgggctgtgggcatggctatctacaatgtggcagtcctgtgcctcatcactgctcctgtcaccatgattctgtccagccagcaggatgcagcctttgcctttgcctctcttgccatagttttctcctcctatatcactcttgttgtgctctttgtgcccaagatgcgcaggctgatcacccgaggggaatggcagtcggaggcgcaggacaccatgaagacagggtcatcgaccaacaacaacgaggaggagaagtcccggctgttggagaaggagaaccgtgaactggaaaagatcattgctgagaaagaggagcgtgtctctgaactgcgccatcaactccagtctcggcagcagctccgctcccggcgccacccaccgacacccccagaaccctctgggggcctgcccaggggaccccctgagccccccgaccggcttagctgtgatgggagtcgagtgcatttgctttataagtgagggtagggtgagggaggacaggccagtagggggagggaaagggagaggggaagggcaggggactcaggaagcagggggtccccatccccagctgggaagaacatgctatccaatctcatctcttgtaaatacatgtccccctgtgagttctgggctgatttgggtctctcatacctctgggaaacagacctttttctctcttactgcttcatgtaattttgtatcacctcttcacaatttagttcgtacctggcttgaagctgctcactgctcacacgctgcctcctcagcagcctcactgcatctttctcttcccatgcaacaccctcttctagttaccacggcaacccctgcagctcctctgcctttgtgctctgttcctgtccagcaggggtctcccaacaagtgctctttccaccccaaaggggcctctccttttctccactgtcataatctctttccatcttacttgcccttctatactttctcacatgtggctccccctgaattttgcttcctttgggagctcattcttttcgccaaggctcacatgctccttgcctctgctctgtgcactcacgctcagcacacatgcatcctcccctctcctgcgtgtgcccactgaacatgctcatgtgtacacacgcttttcccgtatgctttcttcatgttcagtcacatgtgctctcgggtgccctgcattcacagctacgtgtgcccctctcatggtcatgggtctgcccttgagcgtgtttgggtaggcatgtgcaatttgtctagcatgctgagtcatgtctttcctatttgcacacgtccatgtttatccatgtactttccctgtgtaccctccatgtaccttgtgtactttcttcccttaaatcatggtattcttctgacagagccatatgtaccctaccctgcacattgttatgcacttttccccaattcatgtttggtggggccatccacaccctctccttgtcacagaatctccatttctgctcagattccccccatctccattgcattcatgtactaccctcagtctacactcacaatcatcttctcccaagactgctcccttttgttttgtgtttttttgaggggaattaaggaaaaataagtgggggcaggtttggagagctgcttccagtggatagttgatgagaatcctgaccaaaggaaggcacccttgactgttgggatagacagatggacctatggggtgggaggtggtgtccctttcacactgtggtgtctcttggggaaggatctccccgaatctcaataaaccagtgaacagtgtga

SEQ ID NO: 7964 - DNA, 837 bp, Homo sapiens; identical to SEQ ID NO: 7891
  source 1..837: mol_type = unassigned DNA

SEQ ID NO: 7965 - DNA, 2364 bp, Homo sapiens; identical to SEQ ID NO: 7888
  source 1..2364: mol_type = unassigned DNA

SEQ ID NO: 7966 - DNA, 486 bp, Homo sapiens; identical to SEQ ID NO: 7890
  source 1..486: mol_type = unassigned DNA

SEQ ID NO: 7967 - DNA, 407 bp, Homo sapiens; identical to SEQ ID NO: 7896
  source 1..407: mol_type = unassigned DNA

SEQ ID NO: 7968 - DNA, 659 bp, Homo sapiens; identical to SEQ ID NO: 7889
  source 1..659: mol_type = unassigned DNA

SEQ ID NO: 7969 - DNA, 1252 bp, Homo sapiens; identical to SEQ ID NO: 7895
  source 1..1252: mol_type = unassigned DNA

SEQ ID NO: 7970 - DNA, 1739 bp, Homo sapiens; identical to SEQ ID NO: 7897
  source 1..1739: mol_type = unassigned DNA

SEQ ID NO: 7971 - DNA, 4510 bp, Homo sapiens
  source 1..4510: mol_type = unassigned DNA
cccttgcaccctccttcttccctccgcccgggagctctccctggtccccggcgccgcctccttccctcccggctccccgctccccgctcccgtggctgccgccgccccggggaagaagagacaggggtggggtttgggggaagcgagagaggaggggagagaccctggccaggctggagcctggattcgaggggaggagggacgggaggaggagaaaggtggaggagaagggaggggggagcggggaggagcggccgggcctggggccttgaggcccggggagagccggggagccgggcccgcgcgccgagatgttgctgctgctgctactggcgccactcttcctccgccccccgggcgcgggcggggtgcagacccccaacgccacctcagaaggttgccagatcatacacccgccctgggaagggggcatcaggtaccggggcctgactcgggaccaggtgaaggctatcaacttcctgccagtggactatgagattgagtatgtgtgccggggggagcgcgaggtggtggggcccaaggtccgcaagtgcctggccaacggctcctggacagatatggacacacccagccgctgtgtccgaatctgctccaagtcttatttgaccctggaaaatgggaaggttttcctgacgggtggggacctcccagctctggacggagcccgggtggatttccggtgtgaccccgacttccatctggtgggcagctcccggagcatctgtagtcagggccagtggagcacccccaagccccactgccaggtgaatcgaacgccacactcagaacggcgcgcagtgtacatcggggcactgtttcccatgagcgggggctggccagggggccaggcctgccagcccgcggtggagatggcgctggaggacgtgaatagccgcagggacatcctgccggactatgagctcaagctcatccaccacgacagcaagtgtgatccaggccaagccaccaagtacctatatgagctgctctacaacgaccctatcaagatcatccttatgcctggctgcagctctgtctccacgctggtggctgaggctgctaggatgtggaacctcattgtgctttcctatggctccagctcaccagccctgtcaaaccggcagcgtttccccactttcttccgaacgcacccatcagccacactccacaaccctacccgcgtgaaactctttgaaaagtggggctggaagaagattgctaccatccagcagaccactgaggtcttcacttcgactctggacgacctggaggaacgagtgaaggaggctggaattgagattactttccgccagagtttcttctcagatccagctgtgcccgtcaaaaacctgaagcgccaggatgcccgaatcatcgtgggacttttctatgagactgaagcccggaaagttttttgtgaggtgtacaaggagcgtctctttgggaagaagtacgtctggttcctcattgggtggtatgctgacaattggttcaagatctacgacccttctatcaactgcacagtggatgagatgactgaggcggtggagggccacatcacaactgagattgtcatgctgaatcctgccaatacccgcagcatttccaacatgacatcccaggaatttgtggagaaactaaccaagcgactgaaaagacaccctgaggagacaggaggcttccaggaggcaccgctggcctatgatgccatctgggccttggcactggccctgaacaagacatctggaggaggcggccgttccggcgtgcgcctggaggacttcaactacaacaaccagaccattaccgaccaaatctaccgggcaatgaactcctcgtcctttgagggtgtctctggccatgtggtgtttgatgccagcggctctcggatggcatggacgcttatcgagcagcttcagggtggcagctacaagaagattggctactatgacagcaccaaggatgatctttcctggtccaaaacagataaatggattggagggtcccccccagctgaccagaccctggtcatcaagacattccgcttcctgtcacagaaactctttatctccgtctcagttctctccagcctgggcattgtcctagctgttgtctgtctgtcctttaacatctacaactcacatgtccgttatatccagaactcacagcccaacctgaacaacctgactgctgtgggctgctcactggctttagctgctgtcttccccctggggctcgatggttaccacattgggaggaaccagttccctttcgtctgccaggcccgcctctggctcctgggcctgggctttagtctgggctacggttccatgttcaccaagatttggtgggtccacacggtcttcacaaagaaggaagaaaagaaggagtggaggaagactctggaaccctggaagctgtatgccacagtgggcctgctggtgggcatggatgtcctcactctcgccatctggcagatcgtggaccctctgcaccggaccattgagacatttgccaaggaggaacctaaggaagatattgacgtctctattctgccccagctggagcattgcagctccaggaagatgaatacatggcttggcattttctatggttacaaggggctgctgctgctgctgggaatcttccttgcttatgagaccaagagtgtgtccactgagaagatcaatgatcaccgggctgtgggcatggctatctacaatgtggcagtcctgtgcctcatcactgctcctgtcaccatgattctgtccagccagcaggatgcagcctttgcctttgcctctcttgccatagttttctcctcctatatcactcttgttgtgctctttgtgcccaagatgcgcaggctgatcacccgaggggaatggcagtcggaggcgcaggacaccatgaagacagggtcatcgaccaacaacaacgaggaggagaagtcccggctgttggagaaggagaaccgtgaactggaaaagatcattgctgagaaagaggagcgtgtctctgaactgcgccatcaactccagtctcggcagcagctccgctcccggcgccacccaccgacacccccagaaccctctgggggcctgcccaggggaccccctgagccccccgaccggcttagctgtgatgggagtcgagtgcatttgctttataagtgagggtagggtgagggaggacaggccagtagggggagggaaagggagaggggaagggcaggggactcaggaagcagggggtccccatccccagctgggaagaacatgctatccaatctcatctcttgtaaatacatgtccccctgtgagttctgggctgatttgggtctctcatacctctgggaaacagacctttttctctcttactgcttcatgtaattttgtatcacctcttcacaatttagttcgtacctggcttgaagctgctcactgctcacacgctgcctcctcagcagcctcactgcatctttctcttcccatgcaacaccctcttctagttaccacggcaacccctgcagctcctctgcctttgtgctctgttcctgtccagcaggggtctcccaacaagtgctctttccaccccaaaggggcctctccttttctccactgtcataatctctttccatcttacttgcccttctatactttctcacatgtggctccccctgaattttgcttcctttgggagctcattcttttcgccaaggctcacatgctccttgcctctgctctgtgcactcacgctcagcacacatgcatcctcccctctcctgcgtgtgcccactgaacatgctcatgtgtacacacgcttttcccatatgctttcttcatgttcagtcacatgtgctctcgggtgccctgcattcacagctacgtgtgcccctctcatggtcatgggtctgcccttgagcgtgtttgggtaggcatgtgcaatttgtctagcatgctgagtcatgtctttcctatttgcacacgtccatgtttatccatgtactttccctgtgtaccctccatgtaccttgtgtactttcttcccttaaatcatggtattcttctgacagagccatatgtaccctaccctgcacattgttatgcacttttccccaattcatgtttggtggggccatccacaccctctccttgtcacagaatctccatttctgctcagattccccccatctccattgcattcatgtactaccctcagtctacactcacaatcatcttctcccaagactgctcccttttgttttgtgtttttttgaggggaattaaggaaaaataagtgggggcaggtttggagagctgcttccagtggatagttgatgagaatcctgaccaaaggaaggcacccttgactgttgggatagacagatggacctatggggtgggaggtggtgtccctttcacactgtggtgtctcttggggaaggatctccccgaatctcaataaaccagtgaacagtgtgactcgg

SEQ ID NO: 7972 - DNA, 4070 bp, Homo sapiens
  source 1..4070: mol_type = unassigned DNA
agtcagtccgcgaggagagtccgcggtggcggcgacggtggcgagagccgcgggggccgtaggaagccaaccttccctgcttctccggggccctcgccccctcctccccacaaaatcagggatggaggcgcctccccggcaccctcttagcagccctccccaggaaaagtgtcccccctgagctcctaacgctccccaacagctacccctgccccccacgccatggggcccggggccccttttgcccgggtggggtggccactgccgcttctggttgtgatggcggcaggggtggctccggtgtgggcctcccactccccccatctcccgcggcctcactcgcgggtccccccgcacccctcctcagaacggcgcgcagtgtacatcggggcactgtttcccatgagcgggggctggccagggggccaggcctgccagcccgcggtggagatggcgctggaggacgtgaatagccgcagggacatcctgccggactatgagctcaagctcatccaccacgacagcaagtgtgatccaggccaagccaccaagtacctatatgagctgctctacaacgaccctatcaagatcatccttatgcctggctgcagctctgtctccacgctggtggctgaggctgctaggatgtggaacctcattgtgctttcctatggctccagctcaccagccctgtcaaaccggcagcgtttccccactttcttccgaacgcacccatcagccacactccacaaccctacccgcgtgaaactctttgaaaagtggggctggaagaagattgctaccatccagcagaccactgaggtcttcacttcgactctggacgacctggaggaacgagtgaaggaggctggaattgagattactttccgccagagtttcttctcagatccagctgtgcccgtcaaaaacctgaagcgccaggatgcccgaatcatcgtgggacttttctatgagactgaagcccggaaagttttttgtgaggtgtacaaggagcgtctctttgggaagaagtacgtctggttcctcattgggtggtatgctgacaattggttcaagatctacgacccttctatcaactgcacagtggatgagatgactgaggcggtggagggccacatcacaactgagattgtcatgctgaatcctgccaatacccgcagcatttccaacatgacatcccaggaatttgtggagaaactaaccaagcgactgaaaagacaccctgaggagacaggaggcttccaggaggcaccgctggcctatgatgccatctgggccttggcactggccctgaacaagacatctggaggaggcggccgttccggcgtgcgcctggaggacttcaactacaacaaccagaccattaccgaccaaatctaccgggcaatgaactcctcgtcctttgagggtgtctctggccatgtggtgtttgatgccagcggctctcggatggcatggacgcttatcgagcagcttcagggtggcagctacaagaagattggctactatgacagcaccaaggatgatctttcctggtccaaaacagataaatggattggagggtcccccccagctgaccagaccctggtcatcaagacattccgcttcctgtcacagaaactctttatctccgtctcagttctctccagcctgggcattgtcctagctgttgtctgtctgtcctttaacatctacaactcacatgtccgttatatccagaactcacagcccaacctgaacaacctgactgctgtgggctgctcactggctttagctgctgtcttccccctggggctcgatggttaccacattgggaggaaccagttccctttcgtctgccaggcccgcctctggctcctgggcctgggctttagtctgggctacggttccatgttcaccaagatttggtgggtccacacggtcttcacaaagaaggaagaaaagaaggagtggaggaagactctggaaccctggaagctgtatgccacagtgggcctgctggtgggcatggatgtcctcactctcgccatctggcagatcgtggaccctctgcaccggaccattgagacatttgccaaggaggaacctaaggaagatattgacgtctctattctgccccagctggagcattgcagctccaggaagatgaatacatggcttggcattttctatggttacaaggggctgctgctgctgctgggaatcttccttgcttatgagaccaagagtgtgtccactgagaagatcaatgatcaccgggctgtgggcatggctatctacaatgtggcagtcctgtgcctcatcactgctcctgtcaccatgattctgtccagccagcaggatgcagcctttgcctttgcctctcttgccatagttttctcctcctatatcactcttgttgtgctctttgtgcccaagatgcgcaggctgatcacccgaggggaatggcagtcggaggcgcaggacaccatgaagacagggtcatcgaccaacaacaacgaggaggagaagtcccggctgttggagaaggagaaccgtgaactggaaaagatcattgctgagaaagaggagcgtgtctctgaactgcgccatcaactccagtctcggcagcagctccgctcccggcgccacccaccgacacccccagaaccctctgggggcctgcccaggggaccccctgagccccccgaccggcttagctgtgatgggagtcgagtgcatttgctttataagtgagggtagggtgagggaggacaggccagtagggggagggaaagggagaggggaagggcaggggactcaggaagcagggggtccccatccccagctgggaagaacatgctatccaatctcatctcttgtaaatacatgtccccctgtgagttctgggctgatttgggtctctcatacctctgggaaacagacctttttctctcttactgcttcatgtaattttgtatcacctcttcacaatttagttcgtacctggcttgaagctgctcactgctcacacgctgcctcctcagcagcctcactgcatctttctcttcccatgcaacaccctcttctagttaccacggcaacccctgcagctcctctgcctttgtgctctgttcctgtccagcaggggtctcccaacaagtgctctttccaccccaaaggggcctctccttttctccactgtcataatctctttccatcttacttgcccttctatactttctcacatgtggctccccctgaattttgcttcctttgggagctcattcttttcgccaaggctcacatgctccttgcctctgctctgtgcactcacgctcagcacacatgcatcctcccctctcctgcgtgtgcccactgaacatgctcatgtgtacacacgcttttcccatatgctttcttcatgttcagtcacatgtgctctcgggtgccctgcattcacagctacgtgtgcccctctcatggtcatgggtctgcccttgagcgtgtttgggtaggcatgtgcaatttgtctagcatgctgagtcatgtctttcctatttgcacacgtccatgtttatccatgtactttccctgtgtaccctccatgtaccttgtgtactttcttcccttaaatcatggtattcttctgacagagccatatgtaccctaccctgcacattgttatgcacttttccccaattcatgtttggtggggccatccacaccctctccttgtcacagaatctccatttctgctcagattccccccatctccattgcattcatgtactaccctcagtctacactcacaatcatcttctcccaagactgctcccttttgttttgtgtttttttgaggggaattaaggaaaaataagtgggggcaggtttggagagctgcttccagtggatagttgatgagaatcctgaccaaaggaaggcacccttgactgttgggatagacagatggacctatggggtgggaggtggtgtccctttcacactgtggtgtctcttggggaaggatctccccgaatctcaataaaccagtgaacagtgtgactcgg

SEQ ID NO: 7973 - DNA, 4299 bp, Homo sapiens
  source 1..4299: mol_type = unassigned DNA
gcccgggagctctccctggtccccggcgccgcctccttccctcccggctccccgctccccgctcccgtggctgccgccgccccggggaagaagagacaggggtggggtttgggggaagcgagagaggaggggagagaccctggccaggctggagcctggattcgaggggaggagggacgggaggaggagaaaggtggaggagaagggaggggggagcggggaggagcggccgggcctggggccttgaggcccggggagagccggggagccgggcccgcgcgccgagatgttgctgctgctgctactggcgccactcttcctccgccccccgggcgcgggcggggtgcagacccccaacgccacctcagaaggttgccagatcatacacccgccctgggaagggggcatcaggtaccggggcctgactcgggaccaggtgaaggctatcaacttcctgccagtggactatgagattgagtatgtgtgccggggggagcgcgaggtggtggggcccaaggtccgcaagtgcctggccaacggctcctggacagatatggacacacccagccgctgtgtgaatcgaacgccacactcagaacggcgcgcagtgtacatcggggcactgtttcccatgagcgggggctggccagggggccaggcctgccagcccgcggtggagatggcgctggaggacgtgaatagccgcagggacatcctgccggactatgagctcaagctcatccaccacgacagcaagtgtgatccaggccaagccaccaagtacctatatgagctgctctacaacgaccctatcaagatcatccttatgcctggctgcagctctgtctccacgctggtggctgaggctgctaggatgtggaacctcattgtgctttcctatggctccagctcaccagccctgtcaaaccggcagcgtttccccactttcttccgaacgcacccatcagccacactccacaaccctacccgcgtgaaactctttgaaaagtggggctggaagaagattgctaccatccagcagaccactgaggtcttcacttcgactctggacgacctggaggaacgagtgaaggaggctggaattgagattactttccgccagagtttcttctcagatccagctgtgcccgtcaaaaacctgaagcgccaggatgcccgaatcatcgtgggacttttctatgagactgaagcccggaaagttttttgtgaggtgtacaaggagcgtctctttgggaagaagtacgtctggttcctcattgggtggtatgctgacaattggttcaagatctacgacccttctatcaactgcacagtggatgagatgactgaggcggtggagggccacatcacaactgagattgtcatgctgaatcctgccaatacccgcagcatttccaacatgacatcccaggaatttgtggagaaactaaccaagcgactgaaaagacaccctgaggagacaggaggcttccaggaggcaccgctggcctatgatgccatctgggccttggcactggccctgaacaagacatctggaggaggcggccgttccggcgtgcgcctggaggacttcaactacaacaaccagaccattaccgaccaaatctaccgggcaatgaactcctcgtcctttgagggtgtctctggccatgtggtgtttgatgccagcggctctcggatggcatggacgcttatcgagcagcttcagggtggcagctacaagaagattggctactatgacagcaccaaggatgatctttcctggtccaaaacagataaatggattggagggtcccccccagctgaccagaccctggtcatcaagacattccgcttcctgtcacagaaactctttatctccgtctcagttctctccagcctgggcattgtcctagctgttgtctgtctgtcctttaacatctacaactcacatgtccgttatatccagaactcacagcccaacctgaacaacctgactgctgtgggctgctcactggctttagctgctgtcttccccctggggctcgatggttaccacattgggaggaaccagttccctttcgtctgccaggcccgcctctggctcctgggcctgggctttagtctgggctacggttccatgttcaccaagatttggtgggtccacacggtcttcacaaagaaggaagaaaagaaggagtggaggaagactctggaaccctggaagctgtatgccacagtgggcctgctggtgggcatggatgtcctcactctcgccatctggcagatcgtggaccctctgcaccggaccattgagacatttgccaaggaggaacctaaggaagatattgacgtctctattctgccccagctggagcattgcagctccaggaagatgaatacatggcttggcattttctatggttacaaggggctgctgctgctgctgggaatcttccttgcttatgagaccaagagtgtgtccactgagaagatcaatgatcaccgggctgtgggcatggctatctacaatgtggcagtcctgtgcctcatcactgctcctgtcaccatgattctgtccagccagcaggatgcagcctttgcctttgcctctcttgccatagttttctcctcctatatcactcttgttgtgctctttgtgcccaagatgcgcaggctgatcacccgaggggaatggcagtcggaggcgcaggacaccatgaagacagggtcatcgaccaacaacaacgaggaggagaagtcccggctgttggagaaggagaaccgtgaactggaaaagatcattgctgagaaagaggagcgtgtctctgaactgcgccatcaactccagtctcggcagcagctccgctcccggcgccacccaccgacacccccagaaccctctgggggcctgcccaggggaccccctgagccccccgaccggcttagctgtgatgggagtcgagtgcatttgctttataagtgagggtagggtgagggaggacaggccagtagggggagggaaagggagaggggaagggcaggggactcaggaagcagggggtccccatccccagctgggaagaacatgctatccaatctcatctcttgtaaatacatgtccccctgtgagttctgggctgatttgggtctctcatacctctgggaaacagacctttttctctcttactgcttcatgtaattttgtatcacctcttcacaatttagttcgtacctggcttgaagctgctcactgctcacacgctgcctcctcagcagcctcactgcatctttctcttcccatgcaacaccctcttctagttaccacggcaacccctgcagctcctctgcctttgtgctctgttcctgtccagcaggggtctcccaacaagtgctctttccaccccaaaggggcctctccttttctccactgtcataatctctttccatcttacttgcccttctatactttctcacatgtggctccccctgaattttgcttcctttgggagctcattcttttcgccaaggctcacatgctccttgcctctgctctgtgcactcacgctcagcacacatgcatcctcccctctcctgcgtgtgcccactgaacatgctcatgtgtacacacgcttttcccatatgctttcttcatgttcagtcacatgtgctctcgggtgccctgcattcacagctacgtgtgcccctctcatggtcatgggtctgcccttgagcgtgtttgggtaggcatgtgcaatttgtctagcatgctgagtcatgtctttcctatttgcacacgtccatgtttatccatgtactttccctgtgtaccctccatgtaccttgtgtactttcttcccttaaatcatggtattcttctgacagagccatatgtaccctaccctgcacattgttatgcacttttccccaattcatgtttggtggggccatccacaccctctccttgtcacagaatctccatttctgctcagattccccccatctccattgcattcatgtactaccctcagtctacactcacaatcatcttctcccaagactgctcccttttgttttgtgtttttttgaggggaattaaggaaaaataagtgggggcaggtttggagagctgcttccagtggatagttgatgagaatcctgaccaaaggaaggcacccttgactgttgggatagacagatggacctatggggtgggaggtggtgtccctttcacactgtggtgtctcttggggaaggatctccccgaatctcaataaaccagtgaacagtgtgactcgg

SEQ ID NO: 7974 - DNA, 2364 bp, Homo sapiens
  source 1..2364: mol_type = unassigned DNA
atgttgctgctgctgctactggcgccactcttcctccgccccccgggcgcgggcggggtgcagacccccaacgccacctcagaaggttgccagatcatacacccgccctgggaagggggcatcaggtaccggggcctgactcgggaccaggtgaaggctatcaacttcctgccagtggactatgagattgagtatgtgtgccggggggagcgcgaggtggtggggcccaaggtccgcaagtgcctggccaacggctcctggacagatatggacacacccagccgctgtgtccgaatctgctccaagtcttatttgaccctggaaaatgggaaggttttcctgacgggtggggacctcccagctctggacggagcccgggtggatttccggtgtgaccccgacttccatctggtgggcagctcccggagcatctgtagtcagggccagtggagcacccccaagccccactgccaggtgaatcgaacgccacactcagaacggcgcgcagtgtacatcggggcactgtttcccatgagcgggggctggccagggggccaggcctgccagcccgcggtggagatggcgctggaggacgtgaatagccgcagggacatcctgccggactatgagctcaagctcatccaccacgacagcaagtgtgatccaggccaagccaccaagtacctatatgagctgctctacaacgaccctatcaagatcatccttatgcctggctgcagctctgtctccacgctggtggctgaggctgctaggatgtggaacctcattgtgctttcctatggctccagctcaccagccctgtcaaaccggcagcgtttccccactttcttccgaacgcacccatcagccacactccacaaccctacccgcgtgaaactctttgaaaagtggggctggaagaagattgctaccatccagcagaccactgaggtcttcacttcgactctggacgacctggaggaacgagtgaaggaggctggaattgagattactttccgccagagtttcttctcagatccagctgtgcccgtcaaaaacctgaagcgccaggatgcccgaatcatcgtgggacttttctatgagactgaagcccggaaagttttttgtgaggtgtacaaggagcgtctctttgggaagaagtacgtctggttcctcattgggtggtatgctgacaattggttcaagatctacgacccttctatcaactgcacagtggatgagatgactgaggcggtggagggccacatcacaactgagattgtcatgctgaatcctgccaatacccgcagcatttccaacatgacatcccaggaatttgtggagaaactaaccaagcgactgaaaagacaccctgaggagacaggaggcttccaggaggcaccgctggcctatgatgccatctgggccttggcactggccctgaacaagacatctggaggaggcggccgttccggcgtgcgcctggaggacttcaactacaacaaccagaccattaccgaccaaatctaccgggcaatgaactcctcgtcctttgagggtgtctctggccatgtggtgtttgatgccagcggctctcggatggcatggacgcttatcgagcagcttcagggtggcagctacaagaagattggctactatgacagcaccaaggatgatctttcctggtccaaaacagataaatggattgttatatccagaactcacagcccaacctgaacaacctgactgctgtgggctgctcactggctttagctgctgtcttccccctggggctcgatggttaccacattgggaggaaccagttccctttcgtctgccaggcccgcctctggctcctgggcctgggctttagtctgggctacggttccatgttcaccaagatttggtgggtccacacggtcttcacaaagaaggaagaaaagaaggagtggaggaagactctggaaccctggaagctgtatgccacagtgggcctgctggtgggcatggatgtcctcactctcgccatctggcagatcgtggaccctctgcaccggaccattgagacatttgccaaggaggaacctaaggaagatattgacgtctctattctgccccagctggagcattgcagctccaggaagatgaatacatggcttggcattttctatggttacaaggggctgctgctgctgctgggaatcttccttgcttatgagaccaagagtgtgtccactgagaagatcaatgatcaccgggctgtgggcatggctatctacaatgtggcagtcctgtgcctcatcactgctcctgtcaccatgattctgtccagccagcaggatgcagcctttgcctttgcctctc

SEQ ID NO: 7975 - DNA, 659 bp, Homo sapiens
  source 1..659: mol_type = unassigned DNA
gtgcaggagaggtgatgggtaaggctccagatggaagacagagaaggaagtttaatgaaagaggagaaaaaaggcacttgacaggaagagatgccagaaaggagaagaaaacggtaattaatgatgaaagtgagtaattgagaaaggaactaatttgttcgagaaagataagagtaggaattgcagacaggggaggggccccaggagagcttgccctcatctcctcttgtctttcagtgtgatccaggccaagccaccaagtacctatatgagctgctctacaacgaccctatcaagatcatccttatgcctggctgcagctctgtctccacgctggtggctgaggctgctaggatgtggaacctcattgtgctttcctatggctccagctcaccagccctgtcaaaccggcagcgtttccccactttcttccgaacgcacccatcagccacactccacaaccctacccgcgtgaaactctttgaaaagtggggctggaagaagattgctaccatccagcagaccactgaggtcttcacttcgactctggacgacctggaggaacgagtgaaggaggctggaattgagattactttccgccagagtttcttctcagatccagctgtgcccgtcaaaaacctgaagcgccaggatgcccg

SEQ ID NO: 7976 - DNA, 486 bp, Homo sapiens; identical to SEQ ID NO: 7890
  source 1..486: mol_type = unassigned DNA

SEQ ID NO: 7977 - DNA, 837 bp, Homo sapiens; identical to SEQ ID NO: 7891
  source 1..837: mol_type = unassigned DNA

SEQ ID NO: 7978 - DNA, 3523 bp, Homo sapiens
  source 1..3523: mol_type = unassigned DNA
ctcctcctcctcccctccgtcggtcagtcagtccgcgaggagagtccgcggtggcggcgacggtggcgagagccgcgggggccgtaggaagccaaccttccctgcttctccggggccctcgccccctcctccccacaaaatcagggatggaggcgcctccccggcaccctcttagcagccctccccaggaaaagtgtcccccctgagctcctaacgctccccaacagctacccctgccccccacgccatggggcccggggccccttttgcccgggtggggtggccactgccgcttctggttgtgatggcggcaggggtggctccggtgtgggcctcccactccccccatctcccgcggcctcactcgcgggtccccccgcacccctcctcagaacggcgcgcagtgtacatcggggcactgtttcccatgagcgggggctggccagggggccaggcctgccagcccgcggtggagatggcgctggaggacgtgaatagccgcagggacatcctgccggactatgagctcaagctcatccaccacgacagcaagtgtgatccaggccaagccaccaagtacctatatgagctgctctacaacgaccctatcaagatcatccttatgcctggctgcagctctgtctccacgctggtggctgaggctgctaggatgtggaacctcattgtgctttcctatggctccagctcaccagccctgtcaaaccggcagcgtttccccactttcttccgaacgcacccatcagccacactccacaaccctacccgcgtgaaactctttgaaaagtggggctggaagaagattgctaccatccagcagaccactgaggtcttcacttcgactctggacgacctggaggaacgagtgaaggaggctggaattgagattactttccgccagagtttcttctcagatccagctgtgcccgtcaaaaacctgaagcgccaggatgcccgaatcatcgtgggacttttctatgagactgaagcccggaaagttttttgtgaggtgtacaaggagcgtctctttgggaagaagtacgtctggttcctcattgggtggtatgctgacaattggttcaagatctacgacccttctatcaactgcacagtggatgagatgactgaggcggtggagggccacatcacaactgagattgtcatgctgaatcctgccaatacccgcagcatttccaacatgacatcccaggaatttgtggagaaactaaccaagcgactgaaaagacaccctgaggagacaggaggcttccaggaggcaccgctggcctatgatgccatctgggccttggcactggccctgaacaagacatctggaggaggcggccgttccggcgtgcgcctggaggacttcaactacaacaaccagaccattaccgaccaaatctaccgggcaatgaactcctcgtcctttgagggtgtctctggccatgtggtgtttgatgccagcggctctcggatggcatggacgcttatcgagcagcttcagggtggcagctacaagaagattggctactatgacagcaccaaggatgatctttcctggtccaaaacagataaatggattggagggtcccccccagctgaccagaccctggtcatcaagacattccgcttcctgtcacagaaactctttatctccgtctcagttctctccagcctgggcattgtcctagctgttgtctgtctgtcctttaacatctacaactcacatgtccgttatatccagaactcacagcccaacctgaacaacctgactgctgtgggctgctcactggctttagctgctgtcttccccctggggctcgatggttaccacattgggaggaaccagttccctttcgtctgccaggcccgcctctggctcctgggcctgggctttagtctgggctacggttccatgttcaccaagatttggtgggtccacacggtcttcacaaagaaggaagaaaagaaggagtggaggaagactctggaaccctggaagctgtatgccacagtgggcctgctggtgggcatggatgtcctcactctcgccatctggcagatcgtggaccctctgcaccggaccattgagacatttgccaaggaggaacctaaggaagatattgacgtctctattctgccccagctggagcattgcagctccaggaagatgaatacatggcttggcattttctatggttacaaggggctgctgctgctgctgggaatcttccttgcttatgagaccaagagtgtgtccactgagaagatcaatgatcaccgggctgtgggcatggctatctacaatgtggcagtcctgtgcctcatcactgctcctgtcaccatgattctgtccagccagcaggatgcagcctttgcctttgcctctcttgccatagttttctcctcctatatcactcttgttgtgctctttgtgcccaagatgcgcaggctgatcacccgaggggaatggcagtcggaggcgcaggacaccatgaagacagggtcatcgaccaacaacaacgaggaggagaagtcccggctgttggagaaggagaaccgtgaactggaaaagatcattgctgagaaagaggagcgtgtctctgaactgcgccatcaactccagtctcggcagcagctccgctcccggcgccacccaccgacacccccagaaccctctgggggcctgcccaggggaccccctgagccccccgaccggcttagctgtgatgggagtcgagtgcatttgctttataagtgagggtgcatgtccgttccgaggaatgggatttaatgacctttgatgccaacccatatgacagcgtgaaaaaaatcaaagaacatgtccggtctaagaccaaggttcctgtgcaggaccaggttcttttgctgggctccaagatcttaaagccacggagaagcctctcatcttatggcactgacaaagagaagaccatccaccttaccctgaaagtggtgaagcccagtgatgaggagctgcccttgtttcttgtggagtcaggtgatgaggcaaagaggcacctcctccaggtgcgaaggtccagctcagtggcacaagtgaaagcaatgatcgagactaagacgggtataatccctgagacccagattgtgacttgcaatggaaagagactggaagatgggaagatgatggcagattacggcatcagaaagggcaacttactcttcctggcatcttattgtattggagggtgaccaccctggggatggggtgttggcaggggtcaaaaagcttatttcttttaatctcttactcaacgaacacatcttctgatgatttcccaaaattaatgagaatgagatgagtagagtaagatttgggtgggatgggtaggatgaagtatattgcccaactctatgtttctttgattctaacacaattaattaagtgacatgatttttactaatgtattactgagactagtaaataaatttttaaggcaaaatagagcattcaaagcca

SEQ ID NO: 7979 - DNA, 4220 bp, Homo sapiens
  source 1..4220: mol_type = unassigned DNA
gaagggaggggggagcggggaggagcggccgggcctggggccttgaggcccggggagagccggggagccgggcccgcgcgccgagatgttgctgctgctgctactggcgccactcttcctccgccccccgggcgcgggcggggtgcagacccccaacgccacctcagaaggttgccagatcatacacccgccctgggaagggggcatcaggtaccggggcctgactcgggaccaggtgaaggctatcaacttcctgccagtggactatgagattgagtatgtgtgccggggggagcgcgaggtggtggggcccaaggtccgcaagtgcctggccaacggctcctggacagatatggacacacccagccgctgtgtccgaatctgctccaagtcttatttgaccctggaaaatgggaaggttttcctgacgggtggggacctcccagctctggacggagcccgggtggatttccggtgtgaccccgacttccatctgtgaatcgaacgccacactcagaacggcgcgcagtgtacatcggggcactgtttcccatgagcgggggctggccagggggccaggcctgccagcccgcggtggagatggcgctggaggacgtgaatagccgcagggacatcctgccggactatgagctcaagctcatccaccacgacagcaagtgtgatccaggccaagccaccaagtacctatatgagctgctctacaacgaccctatcaagatcatccttatgcctggctgcagctctgtctccacgctggtggctgaggctgctaggatgtggaacctcattgtgctttcctatggctccagctcaccagccctgtcaaaccggcagcgtttccccactttcttccgaacgcacccatcagccacactccacaaccctacccgcgtgaaactctttgaaaagtggggctggaagaagattgctaccatccagcagaccactgaggtcttcacttcgactctggacgacctggaggaacgagtgaaggaggctggaattgagattactttccgccagagtttcttctcagatccagctgtgcccgtcaaaaacctgaagcgccaggatgcccgaatcatcgtgggacttttctatgagactgaagcccggaaagttttttgtgaggtgtacaaggagcgtctctttgggaagaagtacgtctggttcctcattgggtggtatgctgacaattggttcaagatctacgacccttctatcaactgcacagtggatgagatgactgaggcggtggagggccacatcacaactgagattgtcatgctgaatcctgccaatacccgcagcatttccaacatgacatcccaggaatttgtggagaaactaaccaagcgactgaaaagacaccctgaggagacaggaggcttccaggaggcaccgctggcctatgatgccatctgggccttggcactggccctgaacaagacatctggaggaggcggccgttccggcgtgcgcctggaggacttcaactacaacaaccagaccattaccgaccaaatctaccgggcaatgaactcctcgtcctttgagggtgtctctggccatgtggtgtttgatgccagcggctctcggatggcatggacgcttatcgagcagcttcagggtggcagctacaagaagattggctactatgacagcaccaaggatgatctttcctggtccaaaacagataaatggattggagggtcccccccagctgaccagaccctggtcatcaagacattccgcttcctgtcacagaaactctttatctccgtctcagttctctccagcctgggcattgtcctagctgttgtctgtctgtcctttaacatctacaactcacatgtccgttatatccagaactcacagcccaacctgaacaacctgactgctgtgggctgctcactggctttagctgctgtcttccccctggggctcgatggttaccacattgggaggaaccagttccctttcgtctgccaggcccgcctctggctcctgggcctgggctttagtctgggctacggttccatgttcaccaagatttggtgggtccacacggtcttcacaaagaaggaagaaaagaaggagtggaggaagactctggaaccctggaagctgtatgccacagtgggcctgctggtgggcatggatgtcctcactctcgccatctggcagatcgtggaccctctgcaccggaccattgagacatttgccaaggaggaacctaaggaagatattgacgtctctattctgccccagctggagcattgcagctccaggaagatgaatacatggcttggcattttctatggttacaaggggctgctgctgctgctgggaatcttccttgcttatgagaccaagagtgtgtccactgagaagatcaatgatcaccgggctgtgggcatggctatctacaatgtggcagtcctgtgcctcatcactgctcctgtcaccatgattctgtccagccagcaggatgcagcctttgcctttgcctctcttgccatagttttctcctcctatatcactcttgttgtgctctttgtgcccaagatgcgcaggctgatcacccgaggggaatggcagtcggaggcgcaggacaccatgaagacagggtcatcgaccaacaacaacgaggaggagaagtcccggctgttggagaaggagaaccgtgaactggaaaagatcattgctgagaaagaggagcgtgtctctgaactgcgccatcaactccagtctcggcagcagctccgctcccggcgccacccaccgacacccccagaaccctctgggggcctgcccaggggaccccctgagccccccgaccggcttagctgtgatgggagtcgagtgcatttgctttataagtgagggtagggtgagggaggacaggccagtagggggagggaaagggagaggggaagggcaggggactcaggaagcagggggtccccatccccagctgggaagaacatgctatccaatctcatctcttgtaaatacatgtccccctgtgagttctgggctgatttgggtctctcatacctctgggaaacagacctttttctctcttactgcttcatgtaattttgtatcacctcttcacaatttagttcgtacctggcttgaagctgctcactgctcacacgctgcctcctcagcagcctcactgcatctttctcttcccatgcaacaccctcttctagttaccacggcaacccctgcagctcctctgcctttgtgctctgttcctgtccagcaggggtctcccaacaagtgctctttccaccccaaaggggcctctccttttctccactgtcataatctctttccatcttacttgcccttctatactttctcacatgtggctccccctgaattttgcttcctttgggagctcattcttttcgccaaggctcacatgctccttgcctctgctctgtgcactcacgctcagcacacatgcatcctcccctctcctgcgtgtgcccactgaacatgctcatgtgtacacacgcttttcccatatgctttcttcatgttcagtcacatgtgctctcgggtgccctgcattcacagctacgtgtgcccctctcatggtcatgggtctgcccttgagcgtgtttgggtaggcatgtgcaatttgtctagcatgctgagtcatgtctttcctatttgcacacgtccatgtttatccatgtactttccctgtgtaccctccatgtaccttgtgtactttcttcccttaaatcatggtattcttctgacagagccatatgtaccctaccctgcacattgttatgcacttttccccaattcatgtttggtggggccatccacaccctctccttgtcacagaatctccatttctgctcagattccccccatctccattgcattcatgtactaccctcagtctacactcacaatcatcttctcccaagactgctcccttttgttttgtgtttttttgaggggaattaaggaaaaataagtgggggcaggtttggagagctgcttccagtggatagttgatgagaatcctgaccaaaggaaggcacccttgactgttgggatagacagatggacctatggggtgggaggtggtgtccctttcacactgtggtgtctcttggggaaggatctccccgaatctcaataaaccagtgaacagtgtgactcgg

SEQ ID NO: 7980 - DNA, 1802 bp, Homo sapiens
  source 1..1802: mol_type = unassigned DNA
ttatatccagaactcacagcccaacctgaacaacctgactgctgtgggctgctcactggctttagctgctgtcttccccctggggctcgatggttaccacattgggaggaaccagttccctttcgtctgccaggcccgcctctggctcctgggcctgggctttagtctgggctacggttccatgttcaccaagatttggtgggtccacacggtcttcacaaagaaggaagaaaagaaggagtggaggaagactctggaaccctggaagctgtatgccacagtgggcctgctggtgggcatggatgtcctcactctcgccatctggcagatcgtggaccctctgcaccggaccattgagacatttgccaaggaggaacctaaggaagatattgacgtctctattctgccccagctggagcattgcagctccaggaagatgaatacatggcttgctgtgatgggagtcgagtgcatttgctttataagtgagggtagggtgagggaggacaggccagtagggggagggaaagggagaggggaagggcaggggactcaggaagcagggggtccccatccccagctgggaagaacatgctatccaatctcatctcttgtaaatacatgtccccctgtgagttctgggctgatttgggtctctcatacctctgggaaacagacctttttctctcttactgcttcatgtaattttgtatcacctcttcacaatttagttcgtacctggcttgaagctgctcactgctcacacgctgcctcctcagcagcctcactgcatctttctcttcccatgcaacaccctcttctagttaccacggcaacccctgcagctcctctgcctttgtgctctgttcctgtccagcaggggtctcccaacaagtgctctttccaccccaaaggggcctctccttttctccactgtcataatctctttccatcttacttgcccttctatactttctcacatgtggctccccctgaattttgcttcctttgggagctcattcttttcgccaaggctcacatgctccttgcctctgctctgtgcactcacgctcagcacacatgcatcctcccctctcctgcgtgtgcccactgaacatgctcatgtgtacacacgcttttcccatatgctttcttcatgttcagtcacatgtgctctcgggtgccctgcattcacagctacgtgtgcccctctcatggtcatgggtctgcccttgagcgtgtttgggtaggcatgtgcaatttgtctagcatgctgagtcatgtctttcctatttgcacacgtccatgtttatccatgtactttccctgtgtaccctccatgtaccttgtgtactttcttcccttaaatcatggtattcttctgacagagccatatgtaccctaccctgcacattgttatgcacttttccccaattcatgtttggtggggccatccacaccctctccttgtcacagaatctccatttctgctcagattccccccatctccattgcattcatgtactaccctcagtctacactcacaatcatcttctcccaagactgctcccttttgttttgtgtttttttgaggggaattaaggaaaaataagtgggggcaggtttggagagctgcttccagtggatagttgatgagaatcctgaccaaaggaaggcacccttgactgttgggatagacagatggacctatggggtgggaggtggtgtccctttcacactgtggtgtctcttggggaaggatctccccgaatctcaataaaccagtgaacagtgtgactcgg

SEQ ID NO: 7981 - DNA, 1252 bp, Homo sapiens
  source 1..1252: mol_type = unassigned DNA
ggctgccgccgccccggggaagaagagacaggggtggggtttgggggaagcgagagaggaggggagagaccctggccaggctggagcctggattcgaggggaggagggacgggaggaggagaaaggtggaggagaagggaggggggagcggggaggagcggccgggcctggggccttgaggcccggggagagccggggagccgggcccgcgcgccgagatgttgctgctgctgctactggcgccactcttcctccgccccccgggcgcgggcggggtgcagacccccaacgccacctcagaaggttgccagatcatacacccgccctgggaagggggcatcaggtaccggggcctgactcgggaccaggtgaaggctatcaacttcctgccagtggactatgagattgagtatgtgtgccggggggagcgcgaggtggtggggcccaaggtccgcaagtgcctggccaacggctcctggacagatatggacacacccagccgctgtgtccgaatctgctccaagtcttatttgaccctggaaaatgggaaggttttcctgacgggtggggacctcccagctctggacggagcccgggtggatttccggtgtgaccccgacttccatctggtgggcagctcccggagcatctgtagtcagggccagtggagcacccccaagccccactgccagggtgaggggaacagctgcctgcatgcagctgatgaggacgcttgtgtgaggatgggagtggggtgggaatggataatgggaaagaatggagagctataaaaatgtgggggaggacattggaaaggggagatgaaagtccctttttcctccatcacctgcctcaaacttcctcttgcagtccccggtatcctctgtaggttgggggcttccttcctttaccttttaaaaaaatcttcctgctcccgattcttagacctcacgttttctcttttcctttatgaatctcacctctctcaccttcttcaggtttaaatactccaattttccctttctctaaacttagaaatttccatgcatcaccctcttctagaattcatccctcaccattccttatataattgatttattgtaaagactcagaaataaatcaaacattctactaagaaaaattgagaaggggagctctgggggtggaaacatattagggtaaaagacttaaaattggaggcagcattatcagaagatgaagaacaactcagggatggggtgggaagaagaca

SEQ ID NO: 7982 - DNA, 407 bp, Homo sapiens; identical to SEQ ID NO: 7942
  source 1..407: mol_type = unassigned DNA

SEQ ID NO: 7983 - DNA, 1739 bp, Homo sapiens
  source 1..1739: mol_type = unassigned DNA
agatgttgctgctgctgctactggcgccactcttcctccgccccccgggcgcgggcggggtgcagacccccaacgccacctcagaaggttgccagatcatacacccgccctgggaagggggcatcaggtaccggggcctgactcgggaccaggtgaaggctatcaacttcctgccagtggactatgagattgagtatgtgtgccggggggagcgcgaggtggtggggcccaaggtccgcaagtgcctggccaacggctcctggacagatatggacacacccagccgctgtgtccgaatctgctccaagtcttatttgaccctggaaaatgggaaggttttcctgacgggtggggacctcccagctctggacggagcccgggtggatttccggtgtgaccccgacttccatctggtgggcagctcccggagcatctgtagtcagggccagtggagcacccccaagccccactgccaggtgaatcgaacgccacactcagaacggcgcgcagtgtacatcggggcactgtttcccatgagcgggggctggccagggggccaggcctgccagcccgcggtggagatggcgctggaggacgtgaatagccgcagggacatcctgccggactatgagctcaagctcatccaccacgacagcaagtgtgatccaggccaagccaccaagtacctatatgagctgctctacaacgaccctatcaagatcatccttatgcctggctgcagctctgtctccacgctggtggctgaggctgctaggatgtggaacctcattgtgctttcctatggctccagctcaccagccctgtcaaaccggcagcgtttccccactttcttccgaacgcacccatcagccacactccacaaccctacccgcgtgaaactctttgaaaagtggggctggaagaagattgctaccatccagcagaccactgaggtcttcacttcgactctggacgacctggaggaacgagtgaaggaggctggaattgagattactttccgccagagtttcttctcagatccagctgtgcccgtcaaaaacctgaagcgccaggatgcccgaatcatcgtgggacttttctatgagactgaagcccggaaagttttttgtgaggtgtacaaggagcgtctctttgggaagaagtacgtctggttcctcattgggtggtatgctgacaattggttcaagatctacgacccttctatcaactgcacagtggatgagatgactgaggcggtggagggccacatcacaactgagattgtcatgctgaatcctgccaatacccgcagcatttccaacatgacatcccaggaatttgtggagaaactaaccaagcgactgaaaagacaccctgaggagacaggaggcttccaggaggcaccgctggcctatgatgccatctgggccttggcactggccctgaacaagacatctggaggaggcggccgttccggcgtgcgcctggaggacttcaactacaacaaccagaccattaccgaccaaatctaccgggcaatgaactcctcgtcctttgagggtgtctctggccatgtggtgtttgatgccagcggctctcggatggcatggacgcttatcgagcagcttcagggtggcagctacaagaagattggctactatgacagcaccaaggatgatctttcctggtccaaaacagataaatggattgttatatccagaactcacagcccaacctga

SEQ ID NO: 7984 - DNA, 5788 bp, Homo sapiens
  source 1..5788: mol_type = unassigned DNA
gccgcccctgagcagcctcgccttcgcctcccgcgtttcctgccgtccgccctcccccggccgagctccaggggctgccgcctagcagctcccggcgggagagcggttcagagcgcgcacgggggcgggcggaggcggcccggtgcggggcggccgcgctggagagaggcgcgcgcggagacgccggcccccctctccgcgtttgctcgcttgctccccgcctcccgcactccgctcgctcccaccccttcccggcgtgattgatccgtcacgggcgccgccgctgccgccgccgccgccgcggccgttctgagccgagccggaaccctagcccgagacggagccggggcccgggccggcgccattgcgcgggcgccgcgggaagaccttggcgcggggcggcgggccgggccaggccatgcgggccgagtgagccggcgcccgcagcccgcggcgcggcatggcttccccgcggagctccgggcagcccgggccgccgccgccgccgccaccgccgcccgcgcgcctgctactgctactgctgctgccgctgctgctgcctctggcgcccggggcctggggctgggcgcggggcgccccccggccgccgcccagcagcccgccgctctccatcatgggcctcatgccgctcaccaaggaggtggccaagggcagcatcgggcgcggtgtgctccccgccgtggaactggccatcgagcagatccgcaacgagtcactcctgcgcccctacttcctcgacctgcggctctatgacacggagtgcgacaacgcaaaagggttgaaagccttctacgatgcaataaaatacgggcctaaccacttgatggtgtttggaggcgtctgtccatccgtcacatccatcattgcagagtccctccaaggctggaatctggtgcagctttcttttgctgcaaccacgcctgttctagccgataagaaaaaatacccttatttctttcggaccgtcccatcagacaatgcggtgaatccagccattctgaagttgctcaagcactaccagtggaagcgcgtgggcacgctgacgcaagacgttcagaggttctctgaggtgcggaatgacctgactggagttctgtatggcgaggacattgagatttcagacaccgagagcttctccaacgatccctgtaccagtgtcaaaaagctgaaggggaatgatgtgcggatcatccttggccagtttgaccagaatatggcagcaaaagtgttctgttgtgcatacgaggagaacatgtatggtagtaaatatcagtggatcattccgggctggtacgagccttcttggtgggagcaggtgcacacggaagccaactcatcccgctgcctccggaagaatctgcttgctgccatggagggctacattggcgtggatttcgagcccctgagctccaagcagatcaagaccatctcaggaaagactccacagcagtatgagagagagtacaacaacaagcggtcaggcgtggggcccagcaagttccacgggtacgcctacgatggcatctgggtcatcgccaagacactgcagagggccatggagacactgcatgccagcagccggcaccagcggatccaggacttcaactacacggaccacacgctgggcaggatcatcctcaatgccatgaacgagaccaacttcttcggggtcacgggtcaagttgtattccggaatggggagagaatggggaccattaaatttactcaatttcaagacagcagggaggtgaaggtgggagagtacaacgctgtggccgacacactggagatcatcaatgacaccatcaggttccaaggatccgaaccaccaaaagacaagaccatcatcctggagcagctgcggaagatctccctacctctctacagcatcctctctgccctcaccatcctcgggatgatcatggccagtgcttttctcttcttcaacatcaagaaccggaatcagaagctcataaagatgtcgagtccatacatgaacaaccttatcatccttggagggatgctctcctatgcttccatatttctctttggccttgatggatcctttgtctctgaaaagacctttgaaacactttgcaccgtcaggacctggattctcaccgtgggctacacgaccgcttttggggccatgtttgcaaagacctggagagtccacgccatcttcaaaaatgtgaaaatgaagaagaagatcatcaaggaccagaaactgcttgtgatcgtggggggcatgctgctgatcgacctgtgtatcctgatctgctggcaggctgtggaccccctgcgaaggacagtggagaagtacagcatggagccggacccagcaggacgggatatctccatccgccctctcctggagcactgtgagaacacccatatgaccatctggcttggcatcgtctatgcctacaagggacttctcatgttgttcggttgtttcttagcttgggagacccgcaacgtcagcatccccgcactcaacgacagcaagtacatcgggatgagtgtctacaacgtggggatcatgtgcatcatcggggccgctgtctccttcctgacccgggaccagcccaatgtgcagttctgcatcgtggctctggtcatcatcttctgcagcaccatcaccctctgcctggtattcgtgccgaagctcatcaccctgagaacaaacccagatgcagcaacgcagaacaggcgattccagttcactcagaatcagaagaaagaagattctaaaacgtccacctcggtcaccagtgtgaaccaagccagcacatcccgcctggagggcctacagtcagaaaaccatcgcctgcgaatgaagatcacagagctggataaagacttggaagaggtcaccatgcagctgcaggacacaccagaaaagaccacctacattaaacagaaccactaccaagagctcaatgacatcctcaacctgggaaacttcactgagagcacagatggaggaaaggccattttaaaaaatcacctcgatcaaaatccccagctacagtggaacacaacagagccctctcgaacatgcaaagatcctatagaagatataaactctccagaacacatccagcgtcggctgtccctccagctccccatcctccaccacgcctacctcccatccatcggaggcgtggacgccagctgtgtcagcccctgcgtcagccccaccgccagcccccgccacagacatgtgccaccctccttccgagtcatggtctcgggcctgtaagggtgggaggcctgggcccggggcctcccccgtgacagaaccacactgggcagaggggtctgctgcagaaacactgtcggctctggctgcggagaagctgggcaccatggctggcctctcaggaccactcggatggcactcaggtggacaggacggggcagggggagacttggcacctgacctcgagccttatttgtgaagtccttatttcttcacaaagaagaggaacggaaatgggacgtcttccttaacatctgcaaacaaggaggcgctgggatatcaaacttgcaaaaaaaaaaaaaaaaaaaaaaaaacaaaaaaactagacaaggagagaggcactagaactccagctggaagtcacggagtggctcgagcagccttgggaagaggcaaggagcttctgaagaaactgcctctgcacacacatcactggctgtgacccctcaggctagcccttctccactctgggggaggaggtgggaagggccaccaggcccccagctgccaggccagctgaccccagccttcctggaacagggagtctgcaggagcgcagacaggcacagccctggagcaggcaggccgagggctgcggcactggagcaggctgacttacatgctccacatgggacctgtgtcacccaatgagatgtttgttactctggtaaatgccacacgttaacacaataacacccattcctgggaccgtggggatttagggcacgtcactgcagacacgctctgcagcattcaccgacagtctgtcatgcacccaccacgttggccatgtccttgtgttcctatcggatgctcccagtaaccagggggaccacccgagctaatcatggaatgtctgttcccagcaaacacgataaagaaagattgtgcactttaacctctctcatcagggcccaagggctggctgggattttttttttttttttcccactaactttgtttctgaccaaagtgaattggaggcactctgctaaaagacatccccgtagacataggggagagagttgctggctgagggcttcccttggcttccagaaggcagccttccatccagacaagccagtgagctctccccttgggatcactggggtgatcagtcagcagattgattctcattcataagatcattcctccctttaaattgagcccctaagagcactggcctgggagtcagacagacctgggttcaagtcctcagtcccctgcccactccctacgtgactttgatcaggtcactagtgtctctctgagcctcagtttcccctctgtaacttggggttgaactaaaacacctgtcctgcctacctcacaaggtcactctgaggattgaaacttgatcttgtccaggaaagctttgtaccaaacagtgaagccgccctgatccgtgaggtatgagtatgactctgaccttcagccctccctacagccgggggtgtggcccagagaagcttccagcacagccctctacccagaacatccgggctggagggaggctcccagtgacttttctgacattcctagacaggttcattctttgctcaagaaaggcctgaatgacaatgtccaggatgtctgcacaactgagcagctcgctcactccctaaagaaacctattggcagcttcaacaggcaggcaataatctcttcccagaaccactgcagtcaggaataaactgttttctccaccaggctttgacaaaagggcccacaggaatcttaccaatgccaacatttcaaagcaccctatttcacgtagcatagctttctgctccccttccccaaagagaggttatggaggtactgtagcttttagggaaaaaaaaatgttaacacatcacaggtcaagttgaagtcattctctgtttaggcactaaaaatcggtgttgtcactcactgtgtattaccagtatttacttgctttcttgatttcaccaaaaccaaatttaatttaaaggaccacattaatttttcaaagggaaagagacaattaattgtacataatgtatacacacacacaaaaaaaaatacctgtagaaatattattccagcatagcaggaaaacaaacaaaagtattggactgtcggaggtgagcctgtgcgtctgtaaccctttgtgactcctgagcgtgcgctgtcttctaggttaactcacgaagtacattctctgtcttactgatactgtaggttcacccatttttttttaatttcctcgcaaataacaagacccacagaagtgactctagctacttaatggttctgttcttttatatgcagcaaacacaccgtccatttctgaagaggcttcggcctgaaggcattttccaatgatgttagtgcacaaaacgctttaaattagactggaactgccagaatcaaatgtaaatgaggaatttctcgtacccctactgcatggtatcgatttttaataaattgttgcaaatttgtttttatgaataaaaggaaaaaacctgtcgtctttaa

SEQ ID NO: 7985 - DNA, 2541 bp, Homo sapiens
  source 1..2541: mol_type = unassigned DNA
gcagtgcccacagcctggatctgcctctgtcccacagcaccagccaccatcccccacgggaggtgactgcgtgccccggcctcactgcctccaccatcgtgcgacaacgcaaaagggttgaaagccttctacgatgcaataaaatacgggcctaaccacttgatggtgtttggaggcgtctgtccatccgtcacatccatcattgcagagtccctccaaggctggaatctggtgcagctttcttttgctgcaaccacgcctgttctagccgataagaaaaaatacccttatttctttcggaccgtcccatcagacaatgcggtgaatccagccattctgaagttgctcaagcactaccagtggaagcgcgtgggcacgctgacgcaagacgttcagaggttctctgaggtgcggaatgacctgactggagttctgtatggcgaggacattgagatttcagacaccgagagcttctccaacgatccctgtaccagtgtcaaaaagctgaaggggaatgatgtgcggatcatccttggccagtttgaccagaatatggcagcaaaagtgttctgttgtgcatacgaggagaacatgtatggtagtaaatatcagtggatcattccgggctggtacgagccttcttggtgggagcaggtgcacacggaagccaactcatcccgctgcctccggaagaatctgcttgctgccatggagggctacattggcgtggatttcgagcccctgagctccaagcagatcaagaccatctcaggaaagactccacagcagtatgagagagagtacaacaacaagcggtcaggcgtggggcccagcaagttccacgggtacgcctacgatggcatctgggtcatcgccaagacactgcagagggccatggagacactgcatgccagcagccggcaccagcggatccaggacttcaactacacggaccacacgctgggcaggatcatcctcaatgccatgaacgagaccaacttcttcggggtcacgggtcaagttgtattccggaatggggagagaatggggaccattaaatttactcaatttcaagacagcagggaggtgaaggtgggagagtacaacgctgtggccgacacactggagatcatcaatgacaccatcaggttccaaggatccgaaccaccaaaagacaagaccatcatcctggagcagctgcggaagatctccctacctctctacagcatcctctctgccctcaccatcctcgggatgatcatggccagtgcttttctcttcttcaacatcaagaaccggaatcagaagctcataaagatgtcgagtccatacatgaacaaccttatcatccttggagggatgctctcctatgcttccatatttctctttggccttgatggatcctttgtctctgaaaagacctttgaaacactttgcaccgtcaggacctggattctcaccgtgggctacacgaccgcttttggggccatgtttgcaaagacctggagagtccacgccatcttcaaaaatgtgaaaatgaagaagaagatcatcaaggaccagaaactgcttgtgatcgtggggggcatgctgctgatcgacctgtgtatcctgatctgctggcaggctgtggaccccctgcgaaggacagtggagaagtacagcatggagccggacccagcaggacgggatatctccatccgccctctcctggagcactgtgagaacacccatatgaccatctggcttggcatcgtctatgcctacaagggacttctcatgttgttcggttgtttcttagcttgggagacccgcaacgtcagcatccccgcactcaacgacagcaagtacatcgggatgagtgtctacaacgtggggatcatgtgcatcatcggggccgctgtctccttcctgacccgggaccagcccaatgtgcagttctgcatcgtggctctggtcatcatcttctgcagcaccatcaccctctgcctggtattcgtgccgaagctcatcaccctgagaacaaacccagatgcagcaacgcagaacaggcgattccagttcactcagaatcagaagaaagaagattctaaaacgtccacctcggtcaccagtgtgaaccaagccagcacatcccgcctggagggcctacagtcagaaaaccatcgcctgcgaatgaagatcacagagctggataaagacttggaagaggtcaccatgcagctgcaggacacaccagaaaagaccacctacattaaacagaaccactaccaagagctcaatgacatcctcaacctgggaaacttcactgagagcacagatggaggaaaggccattttaaaaaatcacctcgatcaaaatccccagctacagtggaacacaacagagccctctcgaacatgcaaagatcctatagaagatataaactctccagaacacatccagcgtcggctgtccctccagctccccatcctccaccacgcctacctcccatccatcggaggcgtggacgccagctgtgtcagcccctgcgtcagcccc

SEQ ID NO: 7986 - DNA, 148 bp, Homo sapiens
  source 1..148: mol_type = unassigned DNA
gtccacctcggtcaccagtgtgaaccaagccagcacatcccgcctggagggcctacagtcagaaaaccatcgcctgcgaatgaagatcacagagtttttcactctcccagcacaacccagcaaccaccacatctatgtgatgtacaag

SEQ ID NO: 7987 - DNA, 550 bp, Homo sapiens
  source 1..550: mol_type = unassigned DNA
gtcaggacctggattctcaccgtgggctacacgaccgcttttggggccatgtttgcaaagacctggagagtccacgccatcttcaaaaatgtgaaaatgaagaagaagatcatcaaggaccagaaactgcttgtgatcgtggggggcatgctgctgatcgacctgtgtatcctgatctgctggcaggctgtggaccccctgcgaaggacagtggagaagtacagcatggagttgttcggttgtttcttagcttgggagacccgcaacgtcagcatccccgcactcaacgacagcaagtacatcgggatgagtgtctacaacgtggggatcatgtgcatcatcggggccgctgtctccttcctgacccgggaccagcccaatgtgcagttctgcatcgtggctctggtcatcatcttctgcagcaccatcaccctctgcctggtattcgtgccgaagctcatcaccctgagaacaaacccagatgcagcaacgcagaacaggcgattccagttcactcagaatcagaagaaagaagattctaaaacgtcca

SEQ ID NO: 7988 - DNA, 563 bp, Homo sapiens
  source 1..563: mol_type = unassigned DNA
gacagctgtcacatccccagtctgcatttgctcagcaggactcagcagggccacaagtggggacagatggtgacatccagaagacccggctgacagcaaggcccccgaccctccctccctgcagcccacctcctgagtaaccctccactccacagcttctcagagcagcctgtgtgtgccaccccttggtaacgatcatctctcccctttctgttcaccatttcagttgttcggttgtttcttagcttgggagacccgcaacgtcagcatccccgcactcaacgacagcaagtacatcgggatgagtgtctacaacgtggggatcatgtgcatcatcggggccgctgtctccttcctgacccgggaccagcccaatgtgcagttctgcatcgtggctctggtcatcatcttctgcagcaccatcaccctctgcctggtattcgtgccgaaggcctccctgcgttgccagacaccagttcttcccttggagttcccttccccccaccatccctccagaccgccctcaaagcccagcaggccatggcactgtggtaggctgtccc

SEQ ID NO: 7989 - DNA, 631 bp, Homo sapiens
  source 1..631: mol_type = unassigned DNA
aagtttggatttcagaggatgcatgagaagttgtgaagaacaaggaatggcattttgggtggaggaaacagcgcgtgtcagacccggcagcatgagccagtgtgatgtgaggggaaagactgagcagggcaggatggtttgagaaatatcagaagaggtcaggacctggattctcaccgtgggctacacgaccgcttttggggccatgtttgcaaagacctggagagtccacgccatcttcaaaaatgtgaaaatgaagaagaagatcatcaaggaccagaaactgcttgtgatcgtggggggcatgctgctgatcgacctgtgtatcctgatctgctggcaggctgtggaccccctgcgaaggacagtggagaagtacagcatggagccggacccagcaggacgggatatctccatccgccctctcctggagcactgtgagaacacccatatgaccatctggcttggcatcgtctatgcctacaagggacttctcatgttgttcggttgtttcttagcttgggagacccgcaacgtcagcatccccgcactcaacgacagcaagtacatcgggatgagtgtctacaacgtggggatcatgtgcatcatcggggccgctgtctccttcctg

SEQ ID NO: 7990 - DNA, 558 bp, Homo sapiens
  source 1..558: mol_type = unassigned DNA
ttctcttcttcaacatcaagaaccggaatcagaagctcataaagatgtcgagtccatacatgaacaaccttatcatccttggagggatgctctcctatgcttccatatttctctttggccttgatggatcctttgtctctgaaaagacctttgaaacactttgcaccgtcaggacctggattctcaccgtgggctacacgaccgcttttggggccatgtttgcaaagacctggagagtccacgccatcttcaaaaatgtgaaaatgaagaagaagatcatcaaggaccagaaactgcttgtgatcgtggggggcatgctgctgatcgacctgtgtatcctgatctgctggcaggctgtggaccccctgcgaaggacagtggagaagtacagcatggaggtaagccctccatgccggcaggagggaagcctgcagatgcagcccctggcacatgaggacagtgaggctgcacagctcccagactgcccagtaccccactgggaacacttcatcagttccatttccttccatttgagacatgtaattccagggaggccaa

SEQ ID NO: 7991 - DNA, 831 bp, Homo sapiens
  source 1..831: mol_type = unassigned DNA
agggctccctttgcagaccttggggccaggaggtgaaggtggagtgcatcctcagtgttcttgtctccttcttttattaccattctctgattgtgatgcccttgcttcctggatatgtccagttctgccatgcttctctttcccgtgtgtcctaatcgcttgctttttgccaggctttatatccagcatggatacacagagaggccccaacacagtctcaactccccagggcctgccagtctagagagggatgctcaaggaggaaagccactcactgggtcctctccctgcaggaaccacctaggggtgcggaatgacctgactggagttctgtatggcgaggacattgagatttcagacaccgagagcttctccaacgatccctgtaccagtgtcaaaaagctgaagcaaagaagtcttcttgttgcaactgaaagcccaggctcctgacccctatccggtgacactctctttaggaacagaaagggtcaacgagaagtttccccagttgggaatgatgtgcggatcatccttggccagtttgaccagaatatggcagcaaaagtgttctgttgtgcatacgaggagaacatgtatggtagtaaatatcagtggatcattccgggctggtacgagccttcttggtgggagcaggtgcacacggaagccaactcatcccgctgcctccggaagaatctgcttgctgccatggagggctacattggcgtggatttcgagcccctgagctccaagcagatcaagaccatctcaggaaagactccacagcagtatgagagagagtacaacaacaagcggtcaggcgtggggccc

SEQ ID NO: 7992 - DNA, 702 bp, Homo sapiens
  source 1..702: mol_type = unassigned DNA
agggaagaaacagtgctgggagaactgagggagagcagggaaggctccctggaggaggtgtctgtgagtaggcctggacaaatgagtaggaagtatgatcccagaagtaagaaatgctgcatcctctcccactcaaagactcgagctggggccccagcacccccgacccctgacagatgtgatttcaacttgtggactgatcagaggtgccatattgacatgaggagacatgatttctgcagtgagctttcttttgctgcaaccacgcctgttctagccgataagaaaaaatacccttatttctttcggaccgtcccatcagacaatgcggtgaatccagccattctgaagttgctcaagcactaccagtggaagcgcgtgggcacgctgacgcaagacgttcagaggttctctgaggtgcggaatgacctgactggagttctgtatggcgaggacattgagatttcagacaccgagagcttctccaacgatccctgtaccagtgtcaaaaagctgaaggggaatgatgtgcggatcatccttggccagtttgaccagaatatggcagcaaaagtgttctgttgtgcatacgaggagaacatgtatggtagtaaatatcagtggatcattccgggctggtacgagccttcttggtgggagcaggtgcacacggaagccaactcatcccgctgcctccggaag

SEQ ID NO: 7993 - DNA, 583 bp, Homo sapiens
  source 1..583: mol_type = unassigned DNA
attttcaacttcagcaataccccaaggatgctgctttcctctgatcattttgccattaactttgatgatagtattactacctaccacaccaacagtgcgacaacgcaaaagggttgaaagccttctacgatgcaataaaatacgggcctaaccacttgatggtgtttggaggcgtctgtccatccgtcacatccatcattgcagagtccctccaaggctggaatctggtgcagctttcttttgctgcaaccacgcctgttctagccgataagaaaaaatacccttatttctttcggaccgtcccatcagacaatgcggtgaatccagccattctgaagttgctcaagcactaccagtggaagcgcgtgggcacgctgacgcaagacgttcagaggttctctgaggtgcggaatgacctgactggagttctgtatggcgaggacattgagatttcagacaccgagagcttctccaacgatccctgtaccagtgtcaaaaagctgaaggggaatgatgtgcggatcatccttggccagtttgaccagaatatggcagcaaaagtgttctgttgtgcatacgagga

SEQ ID NO: 7994 - DNA, 513 bp, Homo sapiens
  source 1..513: mol_type = unassigned DNA
agcgatcgctggccgcgcaaggtcgggtttgcgagtttttccggaccgagcgagcccctgtgctccgaccgcagcgtctgagacgcggcctgaagggggcagtgatttcctgtgcagtacgctcggttggcgcctcttccatcgcgcggaacggggccgaggcgctgggcttgatcctggcttcctgggactctccgggcgcttctgctggagtccagtgcgacaacgcaaaagggttgaaagccttctacgatgcaataaaatacgggcctaaccacttgatggtgtttggaggcgtctgtccatccgtcacatccatcattgcagagtccctccaaggctggaatctggtgcagctttcttttgctgcaaccacgcctgttctagccgataagaaaaaatacccttatttctttcggaccgtcccatcagacaatgcggtgaatccagccattctgaagttgctcaagcactaccagtggaagcgcgtgggcacgctgacgcaagacgttc

SEQ ID NO: 7995 - DNA, 100 bp, Homo sapiens
  source 1..100: mol_type = unassigned DNA
aattcgtcaatgccttggaatgtcataaagatcctgaagctgggagatgagtttacatttttcgtctggctttcttttgctgcaaccacgcctgttctag

SEQ ID NO: 7996 - DNA, 3411 bp, Homo sapiens
  source 1..3411: mol_type = unassigned DNA
gagaacaagctttagagatgataaaagcacagtatcttggcaaccttttgtgttgggttatttttaaaaaatggataatattgtgctctagttctcatttattcagctacttgctgagtgatagcaacattacaactacagaacctgtatgtcatcttgacattagcggcggtgatgaagacaaaattgaacatctacaacatgcagttcctgctttttgttttcttggtgtgggaccctgccaggttggtgctggctaacatccaagaagatgaggctaaaaataacattaccatctttacgagaattcttgacagacttctggatggttacgataatcggcttagaccaggactgggagacagtattactgaagtcttcactaacatctacgtgaccagttttggccctgtctcagatacagatatggaatatacaattgatgttttctttcgacaaaaatggaaagatgaacgtttaaaatttaaaggtcctatgaatatccttcgactaaacaatttaatggctagcaaaatctggactccagataccttttttcacaatgggaaaaaatcagtagctcataatatgacaatgccaaataagttgcttcgaattcaggatgatgggactctgctgtataccatgaggcttacagttcaagctgaatgcccaatgcacttggaggatttcccaatggatgctcattcatgtcctctgaaatttggcagctatgcatatacaacttcagaggtcacttatatttggacttacaatgcatctgattcagtacaggttgctcctgatggctctaggttaaatcaatatgacctgctgggccaatcaatcggaaaggagacaattaaatccagtacaggtgaatatactgtaatgacagctcatttccacctgaaaagaaaaattgggtattttgtgattcaaacctatctgccttgcatcatgactgtcattctctcccaagtttcattctggcttaacagagaatctgtgcctgcaagaactgtgtttggagtaacaactgtcctaacaatgacaactctaagcatcagtgctcggaattctctccccaaagtggcttatgcaactgccatggactggtttattgctgtttgttatgcatttgtgttctctgccctaattgaatttgcaactgttaattacttcaccaaaagaggatgggcttgggatgggaagagtgtagtaaatgacaagaaaaaagaaaaggcttccgttatgatacagaacaacgcttatgcagtggctgttgccaattatgccccgaatctttcaaaagatccagttctctccaccatctccaagagtgcaaccacgccagaacccaacaagaagccagaaaacaagccagctgaagcaaagaaaactttcaacagtgttagcaaaattgacagaatgtccagaatagtttttccagttttgtttggtacctttaatttagtttactgggctacatatttaaacagagaacctgtattaggggtcagtccttgaattgagacccatgttatctttgggatgtatagcaacattaaatttggtttgttttgctatgtacagtctgactaataactgctaatttgtgatccaacatgtacagtatgtatatagtgacatagcttaccagtagacctttaatggagacatgcatttgctaactcatggaactgcagacagaaagcactccatgcgaaaacagccattgccttttttaaagatttaccctaggacctgatttaaagtgaatttcaagtgacctgattaatttcctattcttccaaatgagatgaaaatggggatcctgtacaaccctttgtggacccttttggtttagctcttaagtaggggtattttctactgttgcttaattatgatggaagataacattgtcattcctagatgaatcctttgaagtaacaaacattgtatctgacatcagctctgttcatgagtgctcagagtccctgctaatgtaattggaagcttggtacacataagaaaaactagagatttgaaatcagctatgaattactctatatagtatctatagccatgtacatattacagcatgacaagctcaaataattatgagtcagcccgaaaggatgttaattatgcctacgatgtaataactattggaatgtcatggtcattacatttttagcttcagagtttatttgaaagtaataattgaaatcctacaatttattttaatcattggaaactaccttaattaaaaaaaaagaaaagaaatgtgtcttaacatttccaggtatgtgttgtattgaaattgatcagctaaattttacgggtgctggagactggaaaaagcatccagtttggttgctgtggagcaacatgcatattggattagaaaattgtgccaaaaactcccactgatgagaattcataggtgccccacactatgacaaacacttatatgattctcctctttcctgtttactgcaaattctgccttaaggcttcttttcaagactcagaagccactaattataaaggaaagggcagttaattggcacatttttctcttgtgaaagcagttctttcagataagaattaatgtaaatctgcttttgtaaattgcaactttaaatttcgctgactcaaatttacaacagctttgtataccagaagaggttttggtaagggttgaacatttttacactgcaactttaaaacatcaccaatagattgtggattatttcacgtgcacaaacatacacacacacacacacacacacacacatacacagctaaattagaaaacacaattttaaattttatataattactagttattaatgggtaaaattcatttttcttttaatatcttaaaatattatttatgccccgaaatatgctaataaaagttaaagattgtgtattatgcctagattcaaagtttttggcaaacttcaaatacttttgattgacatgtacattagcagttattagttgacttttactaaaacatgcacctttacgatggtgtttttgtagaaacataagtagtcaaatagtaacatttattgcagttttgtacagtatttgagtatagtgcataaataggtatgttcataaaatcaataaaaggagtatctatggaaataagcaaaatatcagcaaaaattgctattcctttgcctcatttaatttttaaaatttctttgtttccatgtgattctattatatgctttgcatgcttgtataaaaccaaggtcacaaatgcaacttattaacggaatttgccaagaagacagccttgacattaaaaattccctcacaagaggtaatccataatccttaataaaataaaattgttacatgagccaataaatgtatttctttaattcc

SEQ ID NO: 7997 - DNA, 3401 bp, Homo sapiens
  source 1..3401: mol_type = unassigned DNA
tcaaacgcgtcgtttcgcagcacttgatcggaacccggctgcctctaagacttggtcttgggcaaccgtgggtgggcaggaagggaaattatttattttattttgttaaggggagtgaagaaaagaagacgtgaggaccgcagttcactgtaatgtagagtaattgcaaaaagcggcggtgatgaagacaaaattgaacatctacaacatgcagttcctgctttttgttttcttggtgtgggaccctgccaggttggtgctggctaacatccaagaagatgaggctaaaaataacattaccatctttacgagaattcttgacagacttctggatggttacgataatcggcttagaccaggactgggagacagtattactgaagtcttcactaacatctacgtgaccagttttggccctgtctcagatacagatatggaatatacaattgatgttttctttcgacaaaaatggaaagatgaacgtttaaaatttaaaggtcctatgaatatccttcgactaaacaatttaatggctagcaaaatctggactccagataccttttttcacaatgggaaaaaatcagtagctcataatatgacaatgccaaataagttgcttcgaattcaggatgatgggactctgctgtataccatgaggcttacagttcaagctgaatgcccaatgcacttggaggatttcccaatggatgctcattcatgtcctctgaaatttggcagctatgcatatacaacttcagaggtcacttatatttggacttacaatgcatctgattcagtacaggttgctcctgatggctctaggttaaatcaatatgacctgctgggccaatcaatcggaaaggagacaattaaatccagtacaggtgaatatactgtaatgacagctcatttccacctgaaaagaaaaattgggtattttgtgattcaaacctatctgccttgcatcatgactgtcattctctcccaagtttcattctggcttaacagagaatctgtgcctgcaagaactgtgtttggagtaacaactgtcctaacaatgacaactctaagcatcagtgctcggaattctctccccaaagtggcttatgcaactgccatggactggtttattgctgtttgttatgcatttgtgttctctgccctaattgaatttgcaactgttaattacttcaccaaaagaggatgggcttgggatgggaagagtgtagtaaatgacaagaaaaaagaaaaggcttccgttatgatacagaacaacgcttatgcagtggctgttgccaattatgccccgaatctttcaaaagatccagttctctccaccatctccaagagtgcaaccacgccagaacccaacaagaagccagaaaacaagccagctgaagcaaagaaaactttcaacagtgttagcaaaattgacagaatgtccagaatagtttttccagttttgtttggtacctttaatttagtttactgggctacatatttaaacagagaacctgtattaggggtcagtccttgaattgagacccatgttatctttgggatgtatagcaacattaaatttggtttgttttgctatgtacagtctgactaataactgctaatttgtgatccaacatgtacagtatgtatatagtgacatagcttaccagtagacctttaatggagacatgcatttgctaactcatggaactgcagacagaaagcactccatgcgaaaacagccattgccttttttaaagatttaccctaggacctgatttaaagtgaatttcaagtgacctgattaatttcctattcttccaaatgagatgaaaatggggatcctgtacaaccctttgtggacccttttggtttagctcttaagtaggggtattttctactgttgcttaattatgatggaagataacattgtcattcctagatgaatcctttgaagtaacaaacattgtatctgacatcagctctgttcatgagtgctcagagtccctgctaatgtaattggaagcttggtacacataagaaaaactagagatttgaaatcagctatgaattactctatatagtatctatagccatgtacatattacagcatgacaagctcaaataattatgagtcagcccgaaaggatgttaattatgcctacgatgtaataactattggaatgtcatggtcattacatttttagcttcagagtttatttgaaagtaataattgaaatcctacaatttattttaatcattggaaactaccttaattaaaaaaaaagaaaagaaatgtgtcttaacatttccaggtatgtgttgtattgaaattgatcagctaaattttacgggtgctggagactggaaaaagcatccagtttggttgctgtggagcaacatgcatattggattagaaaattgtgccaaaaactcccactgatgagaattcataggtgccccacactatgacaaacacttatatgattctcctctttcctgtttactgcaaattctgccttaaggcttcttttcaagactcagaagccactaattataaaggaaagggcagttaattggcacatttttctcttgtgaaagcagttctttcagataagaattaatgtaaatctgcttttgtaaattgcaactttaaatttcgctgactcaaatttacaacagctttgtataccagaagaggttttggtaagggttgaacatttttacactgcaactttaaaacatcaccaatagattgtggattatttcacgtgcacaaacatacacacacacacacacacacacacacatacacagctaaattagaaaacacaattttaaattttatataattactagttattaatgggtaaaattcatttttcttttaatatcttaaaatattatttatgccccgaaatatgctaataaaagttaaagattgtgtattatgcctagattcaaagtttttggcaaacttcaaatacttttgattgacatgtacattagcagttattagttgacttttactaaaacatgcacctttacgatggtgtttttgtagaaacataagtagtcaaatagtaacatttattgcagttttgtacagtatttgagtatagtgcataaataggtatgttcataaaatcaataaaaggagtatctatggaaataagcaaaatatcagcaaaaattgctattcctttgcctcatttaatttttaaaatttctttgtttccatgtgattctattatatgctttgcatgcttgtataaaaccaaggtcacaaatgcaacttattaacggaatttgccaagaagacagccttgacattaaaaattccctcacaagaggtaatccataatccttaataaaataaaattgttacatgagccaataaa

SEQ ID NO: 7998 - DNA, 2525 bp, Homo sapiens
  source 1..2525: mol_type = unassigned DNA
cctagcgctcctctccggcttccaccagcccatcgctccacgctctcttggctgctgcagtctcggtctctctctctctctctctctctctctctctctctctctctctctctctctctctctctcccaagtttcctatctcgtcaagatcagggcaaaaggaagaaaacaccgaattctgcttgccgtttcagagcggcggtgatgaagacaaaattgaacatctacaacatgcagttcctgctttttgttttcttggtgtgggaccctgccaggttggtgctggctaacatccaagaagatgaggctaaaaataacattaccatctttacgagaattcttgacagacttctggatggttacgataatcggcttagaccaggactgggagacagtattactgaagtcttcactaacatctacgtgaccagttttggccctgtctcagatacagatatggaatatacaattgatgttttctttcgacaaaaatggaaagatgaacgtttaaaatttaaaggtcctatgaatatccttcgactaaacaatttaatggctagcaaaatctggactccagataccttttttcacaatgggaaaaaatcagtagctcataatatgacaatgccaaataagttgcttcgaattcaggatgatgggactctgctgtataccatgaggcttacagttcaagctgaatgcccaatgcacttggaggatttcccaatggatgctcattcatgtcctctgaaatttggcagctatgcatatacaacttcagaggtcacttatatttggacttacaatgcatctgattcagtacaggttgctcctgatggctctaggttaaatcaatatgacctgctgggccaatcaatcggaaaggagacaattaaatccagtacaggtgaatatactgtaatgacagctcatttccacctgaaaagaaaaattgggtattttgtgattcaaacctatctgccttgcatcatgactgtcattctctcccaagtttcattctggcttaacagagaatctgtgcctgcaagaactgtgtttggagtaacaactgtcctaacaatgacaactctaagcatcagtgctcggaattctctccccaaagtggcttatgcaactgccatggactggtttattgctgtttgttatgcatttgtgttctctgccctaattgaatttgcaactgttaattacttcaccaaaagaggatgggcttgggatgggaagagtgtagtaaatgacaagaaaaaagaaaaggcttccgttatgatacagaacaacgcttatgcagtggctgttgccaattatgccccgaatctttcaaaagatccagttctctccaccatctccaagagtgcaaccacgccagaacccaacaagaagccagaaaacaagccagctgaagcaaagaaaactttcaacagtgttagcaaaattgacagaatgtccagaatagtttttccagttttgtttggtacctttaatttagtttactgggctacatatttaaacagagaacctgtattaggggtcagtccttgaattgagacccatgttatctttgggatgtatagcaacattaaatttggtttgttttgctatgtacagtctgactaataactgctaatttgtgatccaacatgtacagtatgtatatagtgacatagcttaccagtagacctttaatggagacatgcatttgctaactcatggaactgcagacagaaagcactccatgcgaaaacagccattgccttttttaaagatttaccctaggacctgatttaaagtgaatttcaagtgacctgattaatttcctattcttccaaatgagatgaaaatggggatcctgtacaaccctttgtggacccttttggtttagctcttaagtaggggtattttctactgttgcttaattatgatggaagataacattgtcattcctagatgaatcctttgaagtaacaaacattgtatctgacatcagctctgttcatgagtgctcagagtccctgctaatgtaattggaagcttggtacacataagaaaaactagagatttgaaatcagctatgaattactctatatagtatctatagccatgtacatattacagcatgacaagctcaaataattatgagtcagcccgaaaggatgttaattatgcctacgatgtaataactattggaatgtcatggtcattacatttttagcttcagagtttatttgaaagtaataattgaaatcctacaatttattttaatcattggaaactaccttaattaaaaaaaaagaaaagaaatgtgtcttaacatttccaggtatgtgttgtattgaaattgatcagctaaattttacgggtgctggagactggaaaaagcatccagtttggttgctgtggagcaacatgcatattggattagaaaattgtgccaaaaactcccactgatgagaattcataggtgccccacactatgacaaacacttatatgattctcctctttcctg

SEQ ID NO: 7999 - DNA, 2770 bp, Homo sapiens
  source 1..2770: mol_type = unassigned DNA
aaacgcgtcgtttcgcagcacttgatcggaacccggctgcctctaagacttggtcttgggcaaccgtgggtgggcaggaagggaaattatttattttattttgttaaggggagtgaagaaaagaagacgtgaggaccgcagttcactgtaatgtagagtaattgcaaaagtgggctgcctgcccctagcttttcccgctgtggttgcggaggtggtcttggttgagggggttgtggcgtgaagtacccatctctcctctcctctcctttcctcccctcccctccaacccattccctttccagctgctatgccagtttaaagtccagggtgttattattacgtgtgcgcaaaacagtgtttgctgacgatgaggctgggggacgttcctggcagagagaagtctgattacttggtcatcttgctgttaaagaaagaaagaaagaaaaaaagaaagaaagaaacagaaaggaaaagggtgggggtgggggtccataaaaaagaaatcgtctctcaatcatcaagtcctacacagagtccaggaagtaatctccatagctttaacacgaatccctaactaaaaggatattctttggggttacttggatagtgaaactgaaggcaattttaagtgtattttgtttttcattccatggctttgtaaagagcggcggtgatgaagacaaaattgaacatctacaacatgcagttcctgctttttgttttcttggtgtgggaccctgccaggttggtgctggctaacatccaagaagatgaggctaaaaataacattaccatctttacgagaattcttgacagacttctggatggttacgataatcggcttagaccaggactgggagacagtattactgaagtcttcactaacatctacgtgaccagttttggccctgtctcagatacagatatggaatatacaattgatgttttctttcgacaaaaatggaaagatgaacgtttaaaatttaaaggtcctatgaatatccttcgactaaacaatttaatggctagcaaaatctggactccagataccttttttcacaatgggaaaaaatcagtagctcataatatgacaatgccaaataagttgcttcgaattcaggatgatgggactctgctgtataccatgaggcttacagttcaagctgaatgcccaatgcacttggaggatttcccaatggatgctcattcatgtcctctgaaatttggcagctatgcatatacaacttcagaggtcacttatatttggacttacaatgcatctgattcagtacaggttgctcctgatggctctaggttaaatcaatatgacctgctgggccaatcaatcggaaaggagacaattaaatccagtacaggtgaatatactgtaatgacagctcatttccacctgaaaagaaaaattgggtattttgtgattcaaacctatctgccttgcatcatgactgtcattctctcccaagtttcattctggcttaacagagaatctgtgcctgcaagaactgtgtttggagtaacaactgtcctaacaatgacaactctaagcatcagtgctcggaattctctccccaaagtggcttatgcaactgccatggactggtttattgctgtttgttatgcatttgtgttctctgccctaattgaatttgcaactgttaattacttcaccaaaagaggatgggcttgggatgggaagagtgtagtaaatgacaagaaaaaagaaaaggcttccgttatgatacagaacaacgcttatgcagtggctgttgccaattatgccccgaatctttcaaaagatccagttctctccaccatctccaagagtgcaaccacgccagaacccaacaagaagccagaaaacaagccagctgaagcaaagaaaactttcaacagtgttagcaaaattgacagaatgtccagaatagtttttccagttttgtttggtacctttaatttagtttactgggctacatatttaaacagagaacctgtattaggggtcagtccttgaattgagacccatgttatctttgggatgtatagcaacattaaatttggtttgttttgctatgtacagtctgactaataactgctaatttgtgatccaacatgtacagtatgtatatagtgacatagcttaccagtagacctttaatggagacatgcatttgctaactcatggaactgcagacagaaagcactccatgcgaaaacagccattgccttttttaaagatttaccctaggacctgatttaaagtgaatttcaagtgacctgattaatttcctattcttccaaatgagatgaaaatggggatcctgtacaaccctttgtggacccttttggtttagctcttaagtaggggtattttctactgttgcttaattatgatggaagataacattgtcattcctagatgaatcctttgaagtaacaaacattgtatctgacatcagctctgttcatgagtgctcagagtccctgctaatgtaattggaagcttggtacacataagaaaaactagagatttgaaatcagctatgaattactctatatagtatctatagccatgtacatattacagcatgacaagctcaaataattatgagtcagcccgaaaggatgttaattatgcctacgatgtaataactattggaatgtcatggtcattacatttttagcttcagagtttatttgaaagtaataattgaaatcctacaatttattttaatcattggaaactaccttaatt

SEQ ID NO: 8000 - DNA, 2273 bp, Homo sapiens
  source 1..2273: mol_type = unassigned DNA
tcgtcaagatcagggcaaaaggaagaaaacaccgaattctgcttgccgtttcagagcggcggtgatgaagacaaaattgaacatctacaacatgcagttcctgctttttgttttcttggtgtgggaccctgccaggttggtgctggctaacatccaagaagatgaggctaaaaataacattaccatctttacgagaattcttgacagacttctggatggttacgataatcggcttagaccaggactgggaggaatatacaattgatgttttctttcgacaaaaatggaaagatgaacgtttaaaatttaaaggtcctatgaatatccttcgactaaacaatttaatggctagcaaaatctggactccagataccttttttcacaatgggaaaaaatcagtagctcataatatgacaatgccaaataagttgcttcgaattcaggatgatgggactctgctgtataccatgaggcttacagttcaagctgaatgcccaatgcacttggaggatttcccaatggatgctcattcatgtcctctgaaatttggcagctatgcatatacaacttcagaggtcacttatatttggacttacaatgcatctgattcagtacaggttgctcctgatggctctaggttaaatcaatatgacctgctgggccaatcaatcggaaaggagacaattaaatccagtacaggtgaatatactgtaatgacagctcatttccacctgaaaagaaaaattgggtattttgtgattcaaacctatctgccttgcatcatgactgtcattctctcccaagtttcattctggcttaacagagaatctgtgcctgcaagaactgtgtttggagtaacaactgtcctaacaatgacaactctaagcatcagtgctcggaattctctccccaaagtggcttatgcaactgccatggactggtttattgctgtttgttatgcatttgtgttctctgccctaattgaatttgcaactgttaattacttcaccaaaagaggatgggcttgggatgggaagagtgtagtaaatgacaagtccccttcaataaaagctgaaggcattacattaacatacaactcagtgaaagcaattcttcaaggagctaagctaatatggtccaagtatatagctttctcatggcccagtttattccaagaaaagactttagagtacttagagaagtggatggactgtttaaccttcaaacaatcttctaaaaaagaaaaggcttccgttatgatacagaacaacgcttatgcagtggctgttgccaattatgccccgaatctttcaaaagatccagttctctccaccatctccaagagtgcaaccacgccagaacccaacaagaagccagaaaacaagccagctgaagcaaagaaaactttcaacagtgttagcaaaattgacagaatgtccagaatagtttttccagttttgtttggtacctttaatttagtttactgggctacatatttaaacagagaacctgtattaggggtcagtccttgaattgagacccatgttatctttgggatgtatagcaacattaaatttggtttgttttgctatgtacagtctgactaataactgctaatttgtgatccaacatgtacagtatgtatatagtgacatagcttaccagtagacctttaatggagacatgcatttgctaactcatggaactgcagacagaaagcactccatgcgaaaacagccattgccttttttaaagatttaccctaggacctgatttaaagtgaatttcaagtgacctgattaatttcctattcttccaaatgagatgaaaatggggatcctgtacaaccctttgtggacccttttggtttagctcttaagtaggggtattttctactgttgcttaattatgatggaagataacattgtcattcctagatgaatcctttgaagtaacaaacattgtatctgacatcagctctgttcatgagtgctcagagtccctgctaatgtaattggaagcttggtacacataagaaaaactagagatttgaaatcagctatgaattactctatatagtatctatagccatgtacatattacagcatgacaagctcaaataattatgagtcagcccgaaaggatgttaattatgcctacgatgtaataactattggaatgtcatggtcattacatttttagcttcagagtttatttgaaagtaataattgaaatcctacaatttattttaatcattggaaactaccttaatt

SEQ ID NO: 8001 - DNA, 1155 bp, Homo sapiens
  source 1..1155: mol_type = unassigned DNA
ggcggtgatgaagacaaaattgaacatctacaacatgcagttcctgctttttgttttcttggtgtgggaccctgccaggttggtgctggctaacatccaagaagatgaggctaaaaataacattaccatctttacgagaattcttgacagacttctggatggttacgataatcggcttagaccaggactgggagacagtattactgaagtcttcactaacatctacgtgaccagttttggccctgtctcagatacagatatggaatatacaattgatgttttctttcgacaaaaatggaaagatgaacgtttaaaatttaaaggtcctatgaatatccttcgactaaacaatttaatggctagcaaaatctggactccagataccttttttcacaatgggaaaaaatcagtagctcataatatgacaatgccaaataagttgcttcgaattcaggatgatgggactctgctgtataccatgaggtgaatatactgtaatgacagctcatttccacctgaaaagaaaaattgggtattttgtgattcaaacctatctgccttgcatcatgactgtcattctctcccaagtttcattctggcttaacagagaatctgtgcctgcaagaactgtgtttggagtaacaactgtcctaacaatgacaactctaagcatcagtgctcggaattctctccccaaagtggcttatgcaactgccatggactggtttattgctgtttgttatgcatttgtgttctctgccctaattgaatttgcaactgttaattacttcaccaaaagaggatgggcttgggatgggaagagtgtagtaaatgacaagaaaaaagaaaaggcttccgttatgatacagaacaacgcttatgcagtggctgttgccaattatgccccgaatctttcaaaagatccagttctctccaccatctccaagagtgcaaccacgccagaacccaacaagaagccagaaaacaagccagctgaagcaaagaaaactttcaacagtgttagcaaaattgacagaatgtccagaatagtttttccagttttgtttggtacctttaatttagtttactgggctacatatttaaacagagaacctgtattaggggtcagtccttgaattgagacccatgttatct

SEQ ID NO: 8002 - DNA, 1562 bp, Homo sapiens
  source 1..1562: mol_type = unassigned DNA
ggcggtgatgaagacaaaattgaacatctacaacatgcagttcctgctttttgttttcttggtgtgggaccctgccaggttggtgctggctaacatccaagaagatgaggctaaaaataacattaccatctttacgagaattcttgacagacttctggatggttacgataatcggcttagaccaggactgggagacagtattactgaagtcttcactaacatctacgtgaccagttttggccctgtctcagatacagatatggaatatacaattgatgttttctttcgacaaaaatggaaagatgaacgtttaaaatttaaaggtcctatgaatatccttcgactaaacaatttaatggctagcaaaatctggactccagataccttttttcacaatgggaaaaaatcagtagctcataatatgacaatgccaaataagttgcttcgaattcaggatgatgggactctgctgtataccatgaggcttacagttcaagctgaatgcccaatgcacttggaggatttcccaatggatgctcattcatgtcctctgaaatttggcagctatgcatatacaacttcagaggtcacttatatttggacttacaatgcatctgattcagtacaggttgctcctgatggctctaggttaaatcaatatgacctgctgggccaatcaatcggaaaggagacaattaaatccagtacaggtgaatatactgtaatgacagctcatttccacctgaaaagaaaaattgggtattttgtgattcaaacctatctgccttgcatcatgactgtcattctctcccaagtttcattctggcttaacagagaatctgtgcctgcaagaactgtgtttggagtaacaactgtcctaacaatgacaactctaagcatcagtgctcggaattctctccccaaagtggcttatgcaactgccatggactggtttattgctgtttgttatgcatttgtgttctctgccctaattgaatttgcaactgttaattacttcaccaaaagaggatgggcttgggatgggaagagtgtagtaaatgacaagtccccttcaataaaagctgaaggcattacattaacatacaactcagtgaaagcaattcttcaaggagctaagctaatatggtccaagtatatagctttctcatggcccagtttattccaagaaaagactttagagtacttagagaagtggatggactgtttaaccttcaaacaatcttctaaaaaagaaaaggcttccgttatgatacagaacaacgcttatgcagtggctgttgccaattatgccccgaatctttcaaaagatccagttctctccaccatctccaagagtgcaaccacgccagaacccaacaagaagccagaaaacaagccagctgaagcaaagaaaactttcaacagtgttagcaaaattgacagaatgtccagaatagtttttccagttttgtttggtacctttaatttagtttactgggctacatatttaaacagagaacctgtattaggggtcagtccttgaattgagacccatgttatct

SEQ ID NO: 8003 - DNA, 1017 bp, Homo sapiens
  source 1..1017: mol_type = unassigned DNA
ggcggtgatgaagacaaaattgaacatctacaacatgcagttcctgctttttgttttcttggtgtgggaccctgccaggttggtgctggctaacatccaagaagatgaggctaaaaataacattaccatctttacgagaattcttgacagacttctggatggttacgataatcggcttagaccaggactgggaggaatatacaattgatgttttctttcgacaaaaatggaaagatgaacgtttaaaatttaaaggtcctatgaatatccttcgactaaacaatttaatggctagcaaaatctggactccagataccttttttcacaatgggaaaaaatcagtagctcataatatgacaatgccaaataagttgcttcgaattcaggatgatgggactctgctgtataccatgaggcttacagttcaagctgaatgcccaatgcacttggaggatttcccaatggatgctcattcatgtcctctgaaatttggcagctgagtaacaactgtcctaacaatgacaactctaagcatcagtgctcggaattctctccccaaagtggcttatgcaactgccatggactggtttattgctgtttgttatgcatttgtgttctctgccctaattgaatttgcaactgttaattacttcaccaaaagaggatgggcttgggatgggaagagtgtagtaaatgacaagaaaaaagaaaaggcttccgttatgatacagaacaacgcttatgcagtggctgttgccaattatgccccgaatctttcaaaagatccagttctctccaccatctccaagagtgcaaccacgccagaacccaacaagaagccagaaaacaagccagctgaagcaaagaaaactttcaacagtgttagcaaaattgacagaatgtccagaatagtttttccagttttgtttggtacctttaatttagtttactgggctacatatttaaacagagaacctgtattaggggtcagtccttgaattgagacccatgttatct

SEQ ID NO: 8004 - DNA, 2366 bp, Homo sapiens
  source 1..2366: mol_type = unassigned DNA
aagcggcctcggggagcagcccgaggctgcgcgtgggctccgctcctccggcgaggtgtgggcgaggggagcggcgctccgagcgcacccaggcgcccgacgccgcccgggtctgcgccgctgctagtgccaggcgggcgacgagcggcggtgatgaagacaaaattgaacatctacaacatgcagttcctgctttttgttttcttggtgtgggaccctgccaggttggtgctggctaacatccaagaagatgaggctaaaaataacattaccatctttacgagaattcttgacagacttctggatggttacgataatcggcttagaccaggactgggagacagtattactgaagtcttcactaacatctacgtgaccagttttggccctgtctcagatacagatatggaatatacaattgatgttttctttcgacaaaaatggaaagatgaacgtttaaaatttaaaggtcctatgaatatccttcgactaaacaatttaatggctagcaaaatctggactccagataccttttttcacaatgggaaaaaatcagtagctcataatatgacaatgccaaataagttgcttcgaattcaggatgatgggactctgctgtataccatgaggcttacagttcaagctgaatgcccaatgcacttggaggatttcccaatggatgctcattcatgtcctctgaaatttggcagctatgcatatacaacttcagaggtcacttatatttggacttacaatgcatctgattcagtacaggttgctcctgatggctctaggttaaatcaatatgacctgctgggccaatcaatcggaaaggagacaattaaatccagtacaggtgaatatactgtaatgacagctcatttccacctgaaaagaaaaattgggtattttgtgattcaaacctatctgccttgcatcatgactgtcattctctcccaagtttcattctggcttaacagagaatctgtgcctgcaagaactgtgtttggagtaacaactgtcctaacaatgacaactctaagcatcagtgctcggaattctctccccaaagtggcttatgcaactgccatggactggtttattgctgtttgttatgcatttgtgttctctgccctaattgaatttgcaactgttaattacttcaccaaaagaggatgggcttgggatgggaagagtgtagtaaatgacaaggtaagtgagagcttccgtgttatcattattaagaaaataccctaatgaattccgcttgtaacagatatgtttctaaaaactgacattaaagacatccatatatatatgaatttgaatcatatcaatttcttttaaagtgttcttgcctgaaatcctttaggagttcttgtagtactaatacttccattaaaaccactccgtagcatctgttgagctgtatgtgtcaggcactgtgctaagtgttttacatatgctctctcacataatctttatagcatccttatgactagactgccttcttattcttatttttactcatgaagaatctgaagcagtaaagttattttcttgcccaagcttacacaacttgttagtaagtatacttgaactccgatctacctgtctgactgttaagttcatggttttaacaccacactgcattattataaagagattagaaaaagaaaatgggcattaattttacttattatagaattccaggctctatcaatgaattgaatcctcttcacctgttccagtctctgctgattgattgtaaaagcccggatagcatttttttaaaatctttcccatgttgtatggaataaatatgtcggtgctggaatgcttaggaattttaaattgttcatatggtctaaaagggaaaagttatttgtttttaagattaacttcttttgagattattgctgtccatatttaggtttcaagtactgaatctaatgggagatttgtgcattgatataacagctgtttcctttcatactctgtagattatgtatctgcctaagaggaggctttgaatgtatcataatcatctatattcttaataatggtaaaaagttgtattcagaggatatctttaacattgtatcaacctaaatgcttcttttattaaatttggattaacatacttgcagatttgatttctttttcagttatttgaatatattttttcatttctatgaccatgttacagtttaaatatacaagcagtaaatgttatagtttaaaagtcttggtctttttccttaattttgtaagccatagaaattttaataagactgattatttatttcattttataagttgtgttttccctactaacggagccaacaaataaatattaaaaggaa

SEQ ID NO: 8005 - DNA, 605 bp, Homo sapiens
  source 1..605: mol_type = unassigned DNA
tccagtacaggtgaatatactgtaatgacagctcatttccacctgaaaagaaaaattgggtattttgtgattcaaacctatctgccttgcatcatgactgtcattctctcccaagtttcattctggcttaacagagaatctgtgcctgcaagaactgtgtttggtgagtgaatacacactttgcagtacagcacattatgtttcatagcatactttcaaaaacattatctctcttgatcctcaaactaattatttgtagtaggtggggcggggagtattgtttttgccttataggtgaagaagtaggctcagagtggtaacatagtgctacactgttaataagggatataaggaaagaaaagtactcaaatattcttaaaacacacttagtcttctttctgttaaatcatactgctgttcaacatttgtctgtactatatttacacaaggagaattttcttagaagttttaatttatagtctcactaccatatttctaggctttctatatttttctgttgtttttagatgaagagtgatgatcttaaaactttaagttagaaacaggtagaaagggagggaggaagagagacctcattcactttt

SEQ ID NO: 8006 - DNA, 574 bp, Homo sapiens
  source 1..574: mol_type = unassigned DNA
tcgtcaagatcagggcaaaaggaagaaaacaccgaattctgcttgccgtttcagagcggcggtgatgaagacaaaattgaacatctacaacatgcagttcctgctttttgttttcttggtgtgggaccctgccaggttggtgctggctaacatccaagaagatgaggctaaaaataacattaccatctttacgagaattcttgacagacttctggatggttacgataatcggcttagaccaggactgggaggaatatacaattgatgttttctttcgacaaaaatggaaagatgaacgtttaaaatttaaaggtcctatgaatatccttcgactaaacaatttaatggctagcaaaatctggactccagataccttttttcacaatgggaaaaaatcagtagctcataatatgacaatgccaaataagttgcttcgaattcaggatgatgggactctgctgtataccatgaggcttacagttcaagctgaatgcccaatgcacttggaggatttcccaatggatgctcattcatgtcctctgaaatttggcagctatgcatatacaacttcaga

SEQ ID NO: 8007 - DNA, 596 bp, Homo sapiens
  source 1..596: mol_type = unassigned DNA
agcacttgatcggaacccggctgcctctaagacttggtcttgggcaaccgtgggtgggcaggaagggaaattatttattttattttgttaaggggagtgaagaaaagaagacgtgaggaccgcagttcactagcggcggtgatgaagacaaaattgaacatctacaacatgcagttcctgctttttgttttcttggtgtgggaccctgccaggttggtgctggctaacatccaagaagatgaggctaaaaataacattaccatctttacgagaattcttgacagacttctggatggttacgataatcggcttagaccaggactgggagacagtattactgaagtcttcactaacatctacgtgaccagttttggccctgtctcagatacagatatggaatatacaattgatgttttctttcgacaaaaatggaaagatgaacgtttaaaatttaaaggtcctatgaatatccttcgactaaacaatttaatggctagcaaaatctggactccagataccttttttcacaatgggaaaaaatcagtagctcataatatgacaatgccaaataagttgcttcgaattcaggatgatgg

SEQ ID NO: 8008 - DNA, 582 bp, Homo sapiens
  source 1..582: mol_type = unassigned DNA
gtcaaacgcgtcgtttcgcagcacttgatcggaacccggctgcctctaagacttggtcttgggcaaccgtgggtgggcaggaagggaaattatttattttattttgttaaggggagtgaagaaaagaagacgtgaggaccgcagttcactgtaatgtagaagcggcggtgatgaagacaaaattgaacatctacaacatgcagttcctgctttttgttttcttggtgtgggaccctgccaggttggtgctggctaacatccaagaagatgaggctaaaaataacattaccatctttacgagaattcttgacagacttctggatggttacgataatcggcttagaccaggactgggagacagtattactgaagtcttcactaacatctacgtgaccagttttggccctgtctcagatacagatatggaatatacaattgatgttttctttcgacaaaaatggaaagatgaacgtttaaaatttaaaggtcctatgaatatccttcgactaaacaatttaatggctagcaaaatctggactccagataccttttttcacaatgggaaaaaatcagtagctcata

SEQ ID NO: 8009 - DNA, 5812 bp, Homo sapiens
  source 1..5812: mol_type = unassigned DNA
atttgcaactacaataaaatccaggacacctgctcggcagcacgttagcctggctcttttatagtcttcaactttgctcactgtgattaccgctgcctgcctggctggtgtttgctgccggagcctcacgcgccttctcttattgtgatcctcggctccagagcagctgtcaaacgcgtcgtttcgcagcacttgatcggaacccggctgcctctaagacttggtcttgggcaaccgtgggtgggcaggaagggaaattatttattttattttgttaaggggagtgaagaaaagaagacgtgaggaccgcagttcactgtaatagcggcggtgatgaagacaaaattgaacatctacaacatgcagttcctgctttttgttttcttggtgtgggaccctgccaggttggtgctggctaacatccaagaagatgaggctaaaaataacattaccatctttacgagaattcttgacagacttctggatggttacgataatcggcttagaccaggactgggagtttccagagtggaatctccagtctgtgtaacatagccttcaagagccagaacaaagggacccaaactcaaatgctctccatgggcagaacaaataaaggaatgagtggagcataatggagattgaagaactggagagcacatttcttgtatgaagggggttgagttttatctgatcattgccacataagtatttaaaatcagagttgccagatattccaattatttttcaaaagttgttgaagatctccatttttatagaaagttttcttcagtcttaaaggtcaaccaattttcatttaaatcaaactaaacaaaatctgtgcttcccaaacaaatcacacttgagtattagtttgcagcctctggccctaaaccaagacttctcataaagggtatgaaaaaaccagtcggaaaacttgttaagtgcaaatttaacaaatcttcaaagactcattcagatttggtttggtcccagaactatatttcaacaaatgttcttgattctgatgcacatggtccaaacactggactgagtcatctgttttcaaggttctggttaaaaatgatggtttctttcttctttctctcatagtactttatttgaactcttttaagttaaagggaaaaagaaatgtgtatggtaagattggtctgttaccagatgagtctagctagcattttcctcaaaacctcaaagagaggcctctgtcccccattgttctgaggtggctgtcagtgttacaaggtcagagtcctacttttgtttagtgattggattagtcagaattaactggcttatgtttcagtaataactatccagttttatctctcgatcatgtatcttgctcacgatccaaccttgtccactgaggttggatggcatgtaggaatgggctctcttttatgtcttcctcacttagggtttcggattgatggacttccaccacctaaaacattgctagccactgtgtccaggggaaagatgtggctaggtgtacactgtcatttaaagcttctgcccagatgtgacacaatgtccctctgcccacagtccattgttcaaaggaaaccatatacacatgtttaacttcaaggtggcagggaagtgcaaccctaccatttactcagaagtggaagaactagcaatattttgcaagtaacttaataactaccacacttggcaagtagaacccatttctcagggtgcaagtcatcttccatagtgactgattatacaaactgtttggtgacacaggtcatatctcatttcaagatgtataattctgcaactttgttttgtctgtagcatgcatagaatgtttatgaagttaattattatgaagatatgatattaataaccatgcttttttggatatagtcaactttatgtaccttctcttttcttggtgttagaaggcagtgctgtatgccctttttccaaagctcccaggaataaagaggtttgccatttgtgctgtgaaggcatagttccagttgaagatatttaaaaagagatactctttgaagtgttagtctgaaatttcaacctccgtgacagtaattgccagggagaatggagttagataggtgaggaagagaccatgtgtggtttgctactgtgtccttagtgcttggcacagtatgtagaattcaccatttgtcaattgattatgtgaatccaacactcatatatgcaaaaacagacatatctgtgctttggagagctacttattttgggttcttagaaatgtttttgacattcaacaatcaatttttttctatatattttagtggtttagacttctgacattgctaacaacgagtcatccttctcagaaacaatgttgattgatagatgggttaaattggtctgctgaaccttaaattcagtagcacataaaattagaaccattgggttgaacctggatttaatatagtgaaatggactaattcagtagcccctgctgttactgcttttcagaccatctgagcagtgatcatgaacaaaggctctatggcttcagtcatctgtaatgcatacaacactgccttctaaccccacaacaaaagctttggaagagccactagatgcacatgatagagacaaaaacaagaactacaaaaatgtattttaaaagcctgaaaagcataagcctaaaatgtctctgtattttgagattttgcaaaactattgttagttttataccaaccgtttaaagtttttcagttgtcttgcagaggctgttaatgaaaagttataagataatggaatcatactaaattataatttctaacaggttctgagattgaggtgccatgctaagcactttacatatcatttaatactcattataactcccatgagatagataaattgatgacccctaccttagaagcaaggaaatgagagccgcagaccaattacttgccttttgtcacctaattattttgtgatggcatggatattctatccaatataattttctcaagagcctttctccagagtctcatcaatcaggaattaagcaccctcaaatcaaacaaaggtggtatcaatgagtatatgtatgctttggaggaggagctcactatttgttacatttgtgtaatcattagcatctggataagtatctctggaaggggaaggatggtgcgcagtttcattcttttatttgtttaggtgttcttattattgcatttcttggtcatcctgagtttgacgtatatccagacttgaatacaggtttagacatgaaggatcagaaaggacagtgcagtgtttagcagaaaatctattagggtgttgtgaattaaagccagaatctgttactctcactgctgattttactcccttactgtgtgaatcagagcttttggtattattatgctggagaatagctaatgagaaggagataagaagaccatgtagtctagatagataatctcagcatttcttggtacaaagtacattggtacttgagttatttgtaaaattagtaatacaatgatgcaattgttcatataaatttcaatcatgttaagcttattataagtgatattgaagtaatatgatacatgaagaagggatgagtatatgaaaggcaaatagatgaaggcatattaaatgcaagaaccctctttccagatgcattgagttacaactgcttcatttccctttgttcccatttgacccatgtacatcttatgagacacaatatagtgtactttggaaaagatcaggctttggagcttgaaaaaccagggtttgtattctggtttgagcatgttcttaccatgtgctttttgtatacatgaattgccttctctaaacctcagtttcttcatcagtaaaataagtataaaataactaacatttatagcaaggttacaaagagtaatgaaattatttgtaatgttcctgtaaaagtacccagcatatgttgggtgttcattagtggccaacttcccatgtgccttttgatttttgcgaacatgtcataatgtggagatttgttcacaatttaggaaataatgagtgaaaatgagagaacatctaaaaataggacatgagatagttatttttactaagagagttcatggagtttgatagtctttatttaactgtgtatcctagggttacatgtgattaaatttttcctttgtgggatgccctttaagtagaagtttattgcaaaattctccatagaatgtttaaatttcatggtatttcttgtcatacactagaattaaatgagaaggaatagttggattttgagattacatctatggaagtacagaaccaaacaggagaataaggtgtttctgagaaaacctgagcagtcaaataaatgatagcttaacttcatctggcttttctttagaaatttagacttccataaatatgttgtatttcccttgcataaatattagccattagtgatctaattacctgttagatttctaatcatgattacttatgatttcttcaaaacttaaaaaaggtaaccttttaaaatgattgaaagtgttatgcaatagacaatttttaaaacatttactgaaatgagtaggagatagaattctaggctatccccaaatttcttgtcacatgttttacatgccctgtatgatttctgtgactgtgactgtgatttcagtctgatgattagtttttgttatatggcacagttgactttaagaaagggacattatccgagtgggtctgacctaatcacatgagccttttaaatctaaatcaagagatcagagacagaaaagtccaggatatttaaaacatgagggagattcttcattgctggtagggggccacatggcaaggaacacaacagcctctaggagatgagacttgacagccagcagggaaaatgggaatcttaattctacagctgcaaggaactagatttggacaacaatctgaaagagcttagaagctgattcttccccagaggctccagaaaggagcacagcacacccataccttgatttcagccatgtgagaatctgagcagagaaccaagacatagcatgctggacttctgacctacagaactatgtgctaataaatgggtattgtcttacattgttaagtttgtaataatttgttaaacaatagaaaactagcatatctactgttactaattttttaaaatacatttttcagtgtttaacctgtgctaggcatagtgtactttacacctaccatctcatttaattatttcaaagtactgtaagataggcattataagccacatttaacagataagaatatcgaagcacatataagttaagtaatatgcatagggtcacaaattattagtgtataactctgaattgaatttagatctctttgattccaaggcttgggatcttacatgcccctttattaggtaggaatagatacttcatgaagatgataacatgccatctacagaatacgatatggcattgatgtgacactttacctacaaaatatcttatttctgagtcttccgcaagagaaaaagcaattttatttttatgggacaagattggatgttacatttttaatcaattacatgtaagtgtattctacctttaaaattgctatggaaaagtttaattatttccaacaggatttataactatcagttatacctcaaagttgttattaactgaataaaactacacattccaaaatgattaactcttaaagcgcattattggtacattcataatgtttaattttatttttatcatccttgctcatattgaataaatgccttttaaaacca

SEQ ID NO: 8010 - DNA, 363 bp, Homo sapiens
  source 1..363: mol_type = unassigned DNA
ggcggtgatgaagacaaaattgaacatctacaacatgcagttcctgctttttgttttcttggtgtgggaccctgccagagaccaatcaggaagaactaggctctaaggatctctgcagctgtgtatgtgttgctgatgctttcagagcccacctccacctcctggctacatggagcctggcacatagccagtggagtttccctgatgcttatattgcacttggccattgggtggaggtatacccaaagttggtgctggctaacatccaagaagatgaggctaaaaataacattaccatctttacgagaattcttgacagacttctggatggttacgataatcggcttagaccaggactgggag

SEQ ID NO: 8011 - DNA, 2588 bp, Homo sapiens
  source 1..2588: mol_type = unassigned DNA
atcgttttccccctcctcctcttcctcctcctcctcttcctcctcctccgcccatcaccgccactacgaacgccttcgcctccttctacacctcgcgccgccgccgcggctcctagcgctcctctccggcttccaccagcccatcgctccacgctctcttggctgctgcagtctcggtctctctctctctctctctctctctctctctctctctctctctctctctctctctctctcccaagtttcctatctcgtcaagatcagggcaaaaggaagaaaacaccgaattctgcttgccgtttcagagcggcggtgatgaagacaaaattgaacatctacaacatgcagttcctgctttttgttttcttggtgtgggaccctgccaggttggtgctggctaacatccaagaagatgaggctaaaaataacattaccatctttacgagaattcttgacagacttctggatggttacgataatcggcttagaccaggactgggagacagtattactgaagtcttcactaacatctacgtgaccagttttggccctgtctcagatacagatatggaatatacaattgatgttttctttcgacaaaaatggaaagatgaacgtttaaaatttaaaggtcctatgaatatccttcgactaaacaatttaatggctagcaaaatctggactccagataccttttttcacaatgggaaaaaatcagtagctcataatatgacaatgccaaataagttgcttcgaattcaggatgatgggactctgctgtataccatgaggcttacagttcaagctgaatgcccaatgcacttggaggatttcccaatggatgctcattcatgtcctctgaaatttggcagctatgcatatacaacttcagaggtcacttatatttggacttacaatgcatctgattcagtacaggttgctcctgatggctctaggttaaatcaatatgacctgctgggccaatcaatcggaaaggagacaattaaatccagtacaggtgaatatactgtaatgacagctcatttccacctgaaaagaaaaattgggtattttgtgattcaaacctatctgccttgcatcatgactgtcattctctcccaagtttcattctggcttaacagagaatctgtgcctgcaagaactgtgtttggagtaacaactgtcctaacaatgacaactctaagcatcagtgctcggaattctctccccaaagtggcttatgcaactgccatggactggtttattgctgtttgttatgcatttgtgttctctgccctaattgaatttgcaactgttaattacttcaccaaaagaggatgggcttgggatgggaagagtgtagtaaatgacaagtccccttcaataaaagctgaaggcattacattaacatacaactcagtgaaagcaattcttcaaggagctaagctaatatggtccaagtatatagctttctcatggcccagtttattccaagaaaagactttagagtacttagagaagtggatggactgtttaaccttcaaacaatcttctaaaaaagaaaaggcttccgttatgatacagaacaacgcttatgcagtggctgttgccaattatgccccgaatctttcaaaagatccagttctctccaccatctccaagagtgcaaccacgccagaacccaacaagaagccagaaaacaagccagctgaagcaaagaaaactttcaacagtgttagcaaaattgacagaatgtccagaatagtttttccagttttgtttggtacctttaatttagtttactgggctacatatttaaacagagaacctgtattaggggtcagtccttgaattgagacccatgttatctttgggatgtatagcaacattaaatttggtttgttttgctatgtacagtctgactaataactgctaatttgtgatccaacatgtacagtatgtatatagtgacatagcttaccagtagacctttaatggagacatgcatttgctaactcatggaactgcagacagaaagcactccatgcgaaaacagccattgccttttttaaagatttaccctaggacctgatttaaagtgaatttcaagtgacctgattaatttcctattcttccaaatgagatgaaaatggggatcctgtacaaccctttgtggacccttttggtttagctcttaagtaggggtattttctactgttgcttaattatgatggaagataacattgtcattcctagatgaatcctttgaagtaacaaacattgtatctgacatcagctctgttcatgagtgctcagagtccctgctaatgtaattggaagcttggtacacataagaaaaactagagatttgaaatcagctatgaattactctatatagtatctatagccatgtacatattacagcatgacaagctcaaataattatgagtcagcccgaaaggatgttaattatgcctacgatgtaataactattggaatgtcatggtcattacatttttagcttcagagtttatttgaaagtaataattgaaatcctacaatttattttaatcattggaaactacctt

SEQ ID NO: 8012 - DNA, 11973 bp, Homo sapiens
  source 1..11973: mol_type = unassigned DNA; mol_type = unassigned DNA
agtcaacctctggaagtaagtcaactccattctgaaaaagaagagtgtcgcaagaagtgaaagtgattttgaccagaggtcgcttgtctccacctctcccctcctctccagaaaaggatggagcagcaaagcggagggtgtgcgcgtgtctggtggaggcgggtaaagaaatggggtgtctttaaagcaatagcttagcaaatactgggactagagtgcggctcgagtccacttcccaatagtttggcgagagtccgccgggtgagctgcaacccctgttaccaggaagaatctttctgctttcattgctctccctaccgccccccataacacctgaatgggagggtctcaaaggtggtttgagcccggacttgatcccctctcctcaccaccgctaccacccgacgcccagcagtccccgtcacccgccctttctccacctccaaccttgactctgggtacaaacaggtcctcgcacaacctgatgacagaggagcttcattggttagatccaaatcccagcggaagggagggggccaggaggtaggaggacgaacactgctgtgggcggggagcccacttggggtcgggggctgcgaagccggaggaggggcgagagaccccgttcctcatccccggagttacagtcggaacaaacttgccgagtcttgcagcgcaagcgcgcggatacgaaccccagaaccttcagcgcgcgggcacgaaagggtgtggagcggtatacatagctctacatacacattgagcgctgagcgagaaaggagggggcgaggaaggcaggttccgcctcccctggccccgtgcacacacacgcccaccgcggctcgggctggctgagcgcgggcgagtgtgagcgcgagtgtgcgcacgccgcgggagcctctctgccctctcctcgcaccctgctcagggcatctgaagagcctggaaacgtgaacaggcttgaagtatggcatgttgcaaagatggtttctgccaagaaggtacccgcgatcgctctgtccgccggggtcagtttcgccctcctgcgcttcctgtgcctggcggtttgtttaaacgaatccccaggacagaaccaaaaggaggagaaattgtgcacagaaaatttcacccgcatcctggacagtttgctcgatggttatgacaacaggctgcgtcctggatttgggggtcctgttacagaagtgaaaactgacatatatgtcaccagctttggacctgtttctgatgttgaaatggaatacacaatggatgtgttcttcaggcagacatggattgacaaaagattaaaatatgacggccccattgaaattttgagattgaacaatatgatggtaacgaaagtgtggacccctgatactttcttcaggaatggaaagaaatctgtctcacataatatgacagctccaaataagctttttagaattatgagaaatggtactattttatacacaatgagactcaccataagtgcggagtgtcccatgagattggtggattttcccatggatggtcatgcatgccctttgaaattcgggagttatgcctatccaaagagtgagatgatctatacctggacaaaaggtcctgagaaatcagttgaagttccgaaggagtcttccagcttagttcaatatgatttgattgggcaaaccgtatcaagtgaaaccatcaaatcaattacgggtgaatatattgttatgacggtttacttccacctcagacggaagatgggttattttatgattcagacctatattccgtgcattatgacagtgattctttctcaagtttcattttggataaataaagaatcagttcccgctaggactgtatttggaataacaactgtcctcaccatgaccacactaagcatcagtgcacgacattctttgcccaaagtgtcctatgctaccgccatggactggttcatagctgtctgctttgcttttgtattttcggcccttatcgagtttgctgctgtcaactatttcaccaatattcaaatggaaaaagccaaaaggaagacatcaaagccccctcaggaagttcccgctgctccagtgcagagagagaagcatcctgaagcccctctgcagaatacaaatgccaatttgaacatgagaaaaagaacaaatgctttggttcactctgaatctgatgttggcaacagaactgaggtgggaaaccattcaagcaaatcttccacagttgttcaagaatcttctaaaggcacacctcggtcttacttagcttccagtccaaacccattcagccgtgcaaatgcagctgaaaccatatctgcagcaagagcacttccatctgcttctcctacttctatccgaactggatatatgcctcgaaaggcttcagttggatctgcttctactcgtcacgtgtttggatcaagactgcagaggataaagaccacagttaataccataggggctactgggaagttgtcagctactcctcctccatcggctccaccaccttctggatctggcacaagtaaaatagacaaatatgcccgtattctctttccagtcacatttggggcatttaacatggtttattgggttgtttatttatctaaggacactatggagaaatcagaaagtctaatgtaatttcgttgctatagtagtttgctaaaagatgatgaaaatgcagaatgtctttttaaatgtttttaaatataaacaaatattctttactaaaataaaaactctgtgtaatttttccatttaaagatataagccagttattgggagagttaattaattcctgagtgaaaaagtgaactatgttttttttcagaaaaattattttaaaagaactcagcattcagttagatagaatacacaccatcctggaaagttgggataagagaaatagagctattagagacaagtggcgcatattttttcattgatatttgaaaacagactatgacattttaaaaatctgccctatgagtatcaacctgccaccctaaatttcccagtggcactacccttaaccagaattgtttattagatgtcatatgcagtgacctttggtgatcttcttaggaacttcaagaaaaggaattttcctgttaaattaaacattggcaaaaggaaatggaatagtataaacactgatcaatagagtaaaatatctgctgcataaaaaactaagacaaagaccagaggaaatatcttccctttcttatgttggctaaacagtacttaacagttgacttgaaattttgttctctgagccaaagtttaactcattgtatgaattctttttcatggtagttcattcagttatgtgtttatttactacatagttattcagagcctactgtgttccaggaactatgctagaaactgtctctctaggaaagctcttgcacctttatctacaatattacttaaaaagtagaacagtcaatgcatgccaaagaaccataaactagcagaggacattgcattctttagtgaaggacatttatttagagtctgacaacatattcaaaatatttttcagcctctactgatagtggataacaaatatatttgttcacataaccactttgatgtcagtacaacttcagcaattggttttcaaaatagatgagaatatggtacagattgttctataagtgaaaagcattatgtacttgaaagtaaaaatcagggcaatataagacttaatagattaactgtcgcaaatttgatcagagtcacagagtagaatttgatcagaatcacagaatcatcagacataggaactgagcacaggctttttcaggtgctttccccaagatagatctagatattagctagtgaaatgctaaattttgaagagttttgtgtccgtagttctgtaattctgggcagtcatcatgttggtttttttgggagtttttttaaggtttaataactaaggggaatattttaaaattaagagagcagcaaatgaaaggagtaaagaaaaaaatagctgtcgggtaggatgccactgactctgctatgtgatttatcagggttttcatctactgacttctttctcattaggtaggcttaacaacttacttgagaattttgcaactgtctatgcagctgaatctaagtatggttttttgtcatattgcctctagattttcttctgtgcttctctctatctgctctggaatggatgagtgaatgtgttctgggtgttttagggaacatattgatagaaatgaccaccttgcagacaaaatctctctctctctttttgtttttatagaaaagaagtgatagtagttaattggcatcgatttttcagatattgcactaccttataatggttgtttttgatacctgaaaattgtgcaaatgccaaatattaattgtaagtcatatctgagaaatcattcttggctgtctttctaggtattccatagaatcaacacattttaaggctgaaagatactgtcgaaatcacccagtcccaaccccccaatttaaaattgattctagtaaaattaggtccagtaacacctgtatatatgtatatatttaataaagagtacttgtacaaaaaagcttatcataaattatttcatgaatgtgaatagatttctggccttgaggacgatgtttggaaatatggttggaagcacaattcattcgctactagttattcagagcgtactttgttccaggaactatgctggaaactgatagttcactattctgatgaaaaggctggttttgttgttgttgttgttgttgttgttgttgtttttggtgaggaactcttactctttgctaatctattggcctatcttaagaaataattatttggttattcattggcttcctttaaaaaaaagtgttcttctacaaatcttacagagtgtaaagagataaaaagaaatgattttttttcttacctttacatatgaaggtttaaaaatacatcatgtggccaaagaatgagaaaggacagaattaaccaaggattcttaattgttaatttgaagaacacattaaccagaaagcttaaacattattattaaaataaattatttcatttgcacacaatgataataatgatgataataataataataataataataataataataataataataatatgttgtttgctttccttaactgaatttcatcaaattcattcagtgatttttattttggtcattatttctatcttcccaataacccagaggtacatcaagtaaaaacacttttgcaaagagccagtcacttttccctcttagaaaatctcagaagaatgattaggggcacccaaagttctggttatctatgaataataatgaataattttggctgagaatggtacctttatataactcttttaaagatgaaattcagaataattttattcaggacctagtatctgcagtccatgttggccactaactgctacataattactttcaatttcctccaggcatgactaggtataaacatatatttacatgattaatccacattttaaaatgacttgcacttgtgcatatacatagtactttgaataatgtatattttaaattggacctcacaaatcttgtattaaagtaggtagagagtagagtcacactttttttgatgaaatgagtcacagagaagttacatgacaaagataaaatcacagggttggaaagaactttgaaaggtcatttttcaataatctcaccttaaaagtgaccccttttcaaacaaagcataaacaatttatttgtggcttattttacccatgagctggccaatacttcctggcctagaaaaatatctccactctccccattcctgttcttaatggtcttctcttctcaatttgtaaatattctccagtaaaagacaccaggtgtggagatgggtcacttaatttcaagttctgagtgtcttgtggttttaaacaagtctcttaacctctctaagactgattcctcatttataacagggaggaggtggattatgtaatatctaagagcttttcagttttaatactctctgattctcatagtaaatacaagcatactcttgtaagaaaaacactgaatactttgaaccacaaataagtgtttatggacaaaaatttagttctactgcttgattactttaagttcattgcttgcttcaaactaaggtttccctaccttcaaaaatatatataacatctctccatttagataaagtatattcttccccagggaagactgtattctttaaagacagtagaatattggctatttctcttttctgggatttcctgggcttttattcactaaatgggctcctgcccagtttgggtactgtgctgatttttagatatacagagataaaaatagcccctttccttgcaggtagtcacagtccggaagagatgatagatgcatagacaaaaaattatgggatgtaactaatgcttcagtagaatacagcagggccaaaactagagtgatactcatctcaggcacaaatatatatggggacatcaaaacttcaataatcaagatacctaatatttaagtgaatatttttaaaactcaaaattaatgcaaaagatttatgatgaacagaatatacaaattttaaataaattaatagaatcagtagtaataatattttcttctgcctcaggctccaaaattgctcagcatagcactgatctagatagaggtggataaaagatccacataacttaattacattgttgaaggagaggaacaagagtgatagcagagaaggtttcacagatataatcttaagctaaattttatagaatgatttggagttcttatagcctccattcccacttccacaaacaaacaaaaaaatgaaagcgcaattttatcagcacctgaggcaggagaagagatgaggatgtggaaagtcaaggggaactcttactacaaattcttagttctgtgtttggaggtaagggtgaatgcagggaagtgagagttgttgatgttggaaagacctaaagagcctggattaggaagagttttgtgtaaattactgaaggaatggaatttgatcaggattagtggcaatttattaaaaatcttgaagaataatacgatgaaaactaacatccttatttttctgttttagagaaagcacctgattattgtgtgaactatggtttggagggccacaaatctagaggtagtggaacagttgagatctcttattttttctttcctgtcttaaactttgccttctattccttttttctttttttgaccgcaatgacttcattgtcatttgtaaaagtgatacatgactgttaaagatagacattgtagaaacttaaaaacaatctcaaaattctaccacccagaaatcagaaatattttgtatttggatatgtttgtctagaagagtagattgcttgattaaaagacagagttttataaatgtagaagccaatatgacatacatgctgccattaaataataaaaaattaaattgacttttatctcaagataagattaaaattggagggtaaaactgaagaaattgttgaaatttggatggtgcttctttaaagcaagagatttagagagtcagagctttttatcccaggtttcaatctttatttcaggaaaattttctgcaattttgtctaagttaattttttttttttaagaaatgccaattatgtcaaatcccttttgtctctatacaatagtccccaactgttttggcaacaggcacgggtgagggtgggggaatggttttcagatgaaattgttccatctcagatcatcaggcattagtcgattctcataaggagcggacaaccttgcatgccctcctatgagaatctaatgccgccgctaatctgacaggaggcagagctcaggcgataatgctcaatgggtgccactcacctcctgttgtgctgcccaattcctaacaggtcatggataagtactggtcagtggcccaggggttggggaccactgctctgtaactatttacagtattctttgtaactactttggtatctttaaaattttctttaacttttgtcaaccataaccctagtgagttttcagttgtgattattctattttgtaacttccaatgtacttttcaacttcataatggttaattttgttttccattgctttcttggtcactgtcatttcatttttcttctctttctctatttttaccattgctttattgaaatatcttctttgagcttctcatgtttctctattaatgagatcatgtctataatattttttgagactacagagacctatttatataaactcttcctctatttcttgaaaaagtttttatctggcgtgagcttcatctgctttttcattgaggttttatctcccttgcctatttttggggctggtttctttctattaatcactgagcagagccagctatttactgaactacagtgtgggaagtggtgggagggtgagtcagatcagcccacagaagctatttaaatttcaggtttcaagcccacctccccaaaaccgttttatgtgttttttcttctgcccaggcaccatatttttatatctatttttgacatttgggcggcctatgtagttcacagtgtaaaactctctgttttactttctttatgttattgctagtgattattgcttgtagtcccacccccttccccacattagccttagtattctatattattcagcaagcttgttcacaactctcaaatatagtctatcagaatttttatctttacctctacattccactattcggaagtatatagtaaaatcgtatgaagacagattttgtctttttcttgcctgtttacactctatcttacagaggtttcaaacaaaccatctttgtttgaaacatcgcaggataatgatacttattgaaatctacatcctgcccaagatatatgccagtcaatttcctttctcctattagtgcaaatggctacctacttaaaagctgctgactatagtttgtcatcaattacttgttaattacagatatggttttcatttttttttctcaatttttcattatgttatttttggagactgtcttaggtggggagtgaattataaatatttttatttcaccacctttaactgagtcaccatatgttatttgcacttccaatagaccagggattgaccagagtatcttttactgatatgaccaccagagctacatggcttttaccttctgtatatcagatgtcactggaatcaagcattaaacctagattaaatctggattaaaccagctgtatggcaccttagaaaattgagaaggactaggaagctgatagaaagaactcctgtataaaaaataaattctttttacattttccttggtagtatttctgcaagcttctttagtttctataggggaatcccagagttttcctctgagattgcttccctttcctttgtattttcatttttccctcttgggctttacttttcagtcgtgtatttctatcccaatgttaatttattacactgtttatattttcctgtccttcaattcatcagtagattagtgaagtacttattcctttaattataagtataaacgtttttaatttctttttggataacgatacatttaatggaaaatttttaaatgctatggtttcttaatagcttttctctaccactaattacttccgttaaaaaaaaaaagaaatacccatgcgtaatataaaagaaattttgaataaaatgttatcctttccttttactagagacaaacatctccacttcaaaatggaaaaatggaactatgcaaaggaaatttacgatattcaagagtatgatattatcactgaaccgattaatttaattgaaaatactaacctgcaaaaaagaattacacaaatgtatttgaaatgtcatcagatacctcaagctatgacagagttgattatgttacacaagtagtaaaggataaattaaatatattctatattaacactaagatttaaaactaattatagtcttctttaatttttctactgtatacatttcatctagttttcagtaaaacaaacttttcattacttttacttatcccatgcaaatctagttgctataagatataacctaatttggaaatacctccctgtaatacattggaattttggtgtgagtgtgtgtgatcagagaggataaacaaatggtgtcagcaaaatagaatgtaaaatatggagataatgtggatttacacaatttgataaaaattctcccttgaattttgcagatcatatatgaatatcatcatgtgaagtgcaattaggattttttcatatattaatacatatacatcatctctttaataaaatattttgctgaactcgtttaatatttctcatgtctcatatttcatattttctcatatgtctcatattttatattttctcatatgtgtctcatttttattattactatagtatccattaaaggagactggcaaatacctgaacaaagttatgttgttggcaatataagatattaccaattgcataatattatttccaaaggcaaattaatatgcaaactatagatttccatgggtatctatacaaattattacttgaagtccatagaaaacagcttccttagagggaagtaaaagaagctctgataacagacaatgtatagcatttcagttaaagtttgattgacatatttttttctcagtcttttatacttgtgaattatagtctacattttgtctttacagatgttgctaacacagtgcagcatgttggcttgtcattttactgattatgtatattgtctcctagttcaagtatacagtaaatcagagctttcatttttcaaggggcagaaaaataattgttggttgataaggtaaggttatatgattttgagggagcttcattgtaaattgaatgagaatccggttttcatgcaaaggtgtatctatgcgataatactttgaatgtctgtagtttgaaatagaaggttaattttttccactggcttatccttaatgaaggaaatcccctgataattactttgattctgaaaatgttgaaaactccagaagaaataaagcttttctttgatttctcagctgaagtgttgtacaaactgaggaatatgaagtccattcccttctttcttctcttgaataattttaaaattgtttgtttagttgtacaattgaaaatattccttattatagaagtaaaaaaacaataatgcatatttcctcatatcataaaaactaaatttgttatcatctgagcttcaatattcttgctcaattagaatagtaaatataaagtgtgatatttataacagttcaaggtttgataggagatagaggtgttttgattttatgggaaaattacttcctcaagaacacatttcttgaggttttagtaatcacatttgactccctgaaattggcaattttattcaatgtaggaatattatcatggtatattatagtgaggagcacatagtcattattattttgtttttgcaaatttattttgaaaaaaaggagcattatcaaatattggtttactattttaaagtaattcatcaggaaatgattttttaaacactgtccctttaagtaaatgtcccttgcttttcaaagctcaacttattacttatggtaatagagttactttgcttcttaaaacaaagtttatactagagcatagcattgtagaattattcaggtctcaatttctcactggaaaatgagtctttaaaatagtaaggatttaaatttctataaaatttaatcacagatacttatattttaagataaatgtgttggagctaaactctggaattattaaaatataaaacattatatccctctaatgtattttttctatttaaatttaaaacaataaacataaatatctttggaa

SEQ ID NO: 8013 - DNA, 1623 bp, Homo sapiens
  source 1..1623: mol_type = unassigned DNA; mol_type = unassigned DNA
ctgccctctcctcgcaccctgctcagggcatctgaagagcctggaaacgtgaacaggcttgaagtatggcatgttgcaaagatggtttctgccaagaagtttaaacgaatccccaggacagaaccaaaaggaggagaaattgtgcacagaaaatttcacccgcatcctggacagtttgctcgatggttatgacaacaggctgcgtcctggatttgggggtcctgttacagaagtgaaaactgacatatatgtcaccagctttggacctgtttctgatgttgaaatggaatacacaatggatgtgttcttcaggcagacatggattgacaaaagattaaaatatgacggccccattgaaattttgagattgaacaatatgatggtaacgaaagtgtggacccctgatactttcttcaggaatggaaagaaatctgtctcacataatatgacagctccaaataagctttttagaattatgagaaatggtactattttatacacaatgagactcaccataagtgcggagtgtcccatgagattggtggattttcccatggatggtcatgcatgccctttgaaattcgggagttatgcctatccaaagagtgagatgatctatacctggacaaaaggtcctgagaaatcagttgaagttccgaaggagtcttccagcttagttcaatatgatttgattgggcaaaccgtatcaagtgaaaccatcaaatcaattacgggaataacaactgtcctcaccatgaccacactaagcatcagtgcacgacattctttgcccaaagtgtcctatgctaccgccatggactggttcatagctgtctgctttgcttttgtattttcggcccttatcgagtttgctgctgtcaactatttcaccaatattcaaatggaaaaagccaaaaggaagacatcaaagccccctcaggaagttcccgctgctccagtgcagagagagaagcatcctgaagcccctctgcagaatacaaatgccaatttgaacatgagaaaaagaacaaatgctttggttcactctgaatctgatgttggcaacagaactgaggtgggaaaccattcaagcaaatcttccacagttgttcaagaatcttctaaaggcacacctcggtcttacttagcttccagtccaaacccattcagccgtgcaaatgcagctgaaaccatatctgcagcaagagcacttccatctgcttctcctacttctatccgaactggatatatgcctcgaaaggcttcagttggatctgcttctactcgtcacgtgtttggatcaagactgcagaggataaagaccacagttaataccataggggctactgggaagttgtcagctactcctcctccatcggctccaccaccttctggatctggcacaagtaaaatagacaaatatgcccgtattctctttccagtcacatttggggcatttaacatggtttattgggttgtttatttatctaaggacactatggagaaatcagaaagtctaatgtaatttcgttgctatagtagtttgctaaaagatgatgaaaatgcagaatgtctttttaaatgtttttaaatataaacaaatattctttactaaaataaaaa

SEQ ID NO: 8014 - DNA, 1776 bp, Homo sapiens
  source 1..1776: mol_type = unassigned DNA; mol_type = unassigned DNA
ctgccctctcctcgcaccctgctcagggcatctgaagagcctggaaacgtgaacaggcttgaagtatggcatgttgcaaagatggtttctgccaagaagtttaaacgaatccccaggacagaaccaaaaggaggagaaattgtgcacagaaaatttcacccgcatcctggacagtttgctcgatggttatgacaacaggctgcgtcctggatttgggggtcctgttacagaagtgaaaactgacatatatgtcaccagctttggacctgtttctgatgttgaaatggaatacacaatggatgtgttcttcaggcagacatggattgacaaaagattaaaatatgacggccccattgaaattttgagattgaacaatatgatggtaacgaaagtgtggacccctgatactttcttcaggaatggaaagaaatctgtctcacataatatgacagctccaaataagctttttagaattatgagaaatggtactattttatacacaatgagactcaccataagtgcggagtgtcccatgagattggtggattttcccatggatggtcatgcatgccctttgaaattcgggagttatgcctatccaaagagtgagatgatctatacctggacaaaaggtcctgagaaatcagttgaagttccgaaggagtcttccagcttagttcaatatgatttgattgggcaaaccgtatcaagtgaaaccatcaaatcaattacgggtgaatatattgttatgacggtttacttccacctcagacggaagatgggttattttatgattcagacctatattccgtgcattatgacagtgattctttctcaagtttcattttggataaataaagaatcagttcccgctaggactgtatttggaataacaactgtcctcaccatgaccacactaagcatcagtgcacgacattctttgcccaaagtgtcctatgctaccgccatggactggttcatagctgtctgctttgcttttgtattttcggcccttatcgagtttgctgctgtcaactatttcaccaatattcaaatggaaaaagccaaaaggaagacatcaaagccccctcaggaagttcccgctgctccagtgcagagagagaagcatcctgaagcccctctgcagaatacaaatgccaatttgaacatgagaaaaagaacaaatgctttggttcactctgaatctgatgttggcaacagaactgaggtgggaaaccattcaagcaaatcttccacagttgttcaagaatcttctaaaggcacacctcggtcttacttagcttccagtccaaacccattcagccgtgcaaatgcagctgaaaccatatctgcagcaagagcacttccatctgcttctcctacttctatccgaactggatatatgcctcgaaaggcttcagttggatctgcttctactcgtcacgtgtttggatcaagactgcagaggataaagaccacagttaataccataggggctactgggaagttgtcagctactcctcctccatcggctccaccaccttctggatctggcacaagtaaaatagacaaatatgcccgtattctctttccagtcacatttggggcatttaacatggtttattgggttgtttatttatctaaggacactatggagaaatcagaaagtctaatgtaatttcgttgctatagtagtttgctaaaagatgatgaaaatgcagaatgtctttttaaatgtttttaaatataaacaaatattctttactaaaataaaaa

SEQ ID NO: 8015 - DNA, 871 bp, Homo sapiens
  source 1..871: mol_type = unassigned DNA; mol_type = unassigned DNA
gtgagcgcgagtgtgcgcacgccgcgggagcctctctgccctctcctcgcaccctgctcagggcatctgaagagcctggaaacgtgaacaggcttgaagtatggcatgttgcaaagatggtttctgccaagaaggtacccgcgatcgctctgtccgccggggtcagtttcgccctcctgcgcttcctgtgcctggcggtttggtcctgttacagaagtgaaaactgacatatatgtcaccagctttggacctgtttctgatgttgaaatggaatacacaatggatgtgttcttcaggcagacatggattgacaaaagattaaaatatgacggccccattgaaattttgagattgaacaatatgatggtaacgaaagtgtggacccctgatactttcttcaggaatggaaagaaatctgtctcacataatatgacagctccaaataagctttttagaattatgagaaatggtactattttatacacaatgagactcaccataagtgcggagtgtcccatgagattggtggattttcccatggatggtcatgcatgccctttgaaattcgggagttatgcctatccaaagagtgagatgatctatacctggacaaaaggtcctgagaaatcagttgaagttccgaaggagtcttccagcttagttcaatatgatttgattgggcaaaccgtatcaagtgaaaccatcaaatcaattacgggtgaatatattgttatgacggtttacttccacctcagacggaagatgggttattttatgattcagacctatattccgtgcattatgacagtgattctttctcaagtttcattttggataaataaagaatcagttcccgctaggactgtatttg

SEQ ID NO: 8016 - DNA, 487 bp, Homo sapiens
  source 1..487: mol_type = unassigned DNA; mol_type = unassigned DNA
gggcgagtgtgagcgcgagtgtgcgcacgccgcgggagcctctctgccctctcctcgcaccctgctcagggcatctgaagagcctggaaacgtgaacaggcttgaagtatggcatgttgcaaagatggtttctgccaagaaggtacccgcgatcgctctgtccgccggggtcagtttcgccctcctgcgcttcctgtgcctggcggtttgtttaaacgaatccccaggacagaaccaaaaggaggagaaattgtgcacagaaaatttcacccgcatcctggacagtttgctcgatggttatgacaacaggctgcgtcctggatttgggggtatgaacgatttcaaacgcgcaagtgtgtcctgtctgtccctctcttggtcttcctgtctgtctgtctgtgggaatatcattaggtatgcctcacgtgcaaaaataaatctctctctctttctatctctcctctcttggtgagacctatgacaagaa

SEQ ID NO: 8017 - DNA, 584 bp, Homo sapiens
  source 1..584: mol_type = unassigned DNA; mol_type = unassigned DNA
gaggagagcaggtgtggcgtgccagcggaagataggtgccgacagggccttactctgtcactcaggctggatggagtgcagtggcacgatcatcactgcaaccttgaccttctgggctctgatgaccctcccacctcagccacttgagcagctgggaccacagcccactgagaccaaagtccatgtggtcagacacaaaagagccatcgattgctgaacctgttcactcctaccttcaaaggcacaaaaagaacacaggaagtcaatataaagcaggctcataggtggaagggacttgccttgtctcagatgagacttcggattggacttttgggttaatgctgtaatgaggctagaaaatgccctagggaaactcgaagttgaaggcaacttctactcagaaaacgtcagtcggatcctggacaacttgcttgaaggctatgacaatcggctgcggccgggatttggaggtgctgtcactgaagtcaaaacagacatttatgtgaccagttttgggcccgtgtcagatgtggagatggagtatacgatggatgtttttttccgccagacctggactgatgaga

SEQ ID NO: 8018 - DNA, 565 bp, Homo sapiens
  source 1..565: mol_type = unassigned DNA; mol_type = unassigned DNA
actcaggctggatggagtgcagtggcacgatcatcactgcaaccttgaccttctgggctctgatgaccctcccacctcagccacttgagcagctgggaccacagcccactgagaccaaagtccatgtggtcagacacaaaagagccatcgattgctgaacctgttcactcctaccttcaaaggcacaaaaagaacacaggaagtcaatataaagcaggctcataggtggaagggacttgccttgtctcagatgagacttcggattggacttttgggttaatgctgtaatgagactctcctttcccaactgagtcagtcagaggagcctgggtgtctgcaggacataatctaagaccacaaaccaccttgttccacgtgagaaggaaacaagaaagaagggagccaggggaatcctgcaaatttttaggcaacctctttatctattggattactgacttgaggcaaacaaggaacagagatatgaagggtttgaaagatttctccagttgattggcagagaagagctggctagcagggaggacgaccctaggagggtgaattctgc

SEQ ID NO: 8019 - DNA, 2128 bp, Homo sapiens
  source 1..2128: mol_type = unassigned DNA; mol_type = unassigned DNA
aagatgccaatgctttccagatttcctcacagggccctgctaattccatgccaaaactggcagtggatttcttccttctaatctcccttaatgccttattcgattattgtcactgctctccgaccatgcactgtcccttcagactctcctttcccaactgagtcagtcagaggagcctgggtgtctgcaggacataatctaagaccacaaaccaccttgttccacgtgagaaggaaacaagaaagaagggagccaggggaatcctgcaaatttttaggcaacctctttatctattggattactgacttgaggcaaacaaggaacagagatatgaagggtttgaaagatttctccagttgattggcagagaagagctggctagcagggaggacgaccctaggagggtgaattctgcatttcagtgcactgcaggatggcgtcgtctctgccctggctgtgcattattctgtggctagaaaatgccctagggaaactcgaagttgaaggcaacttctactcagaaaacgtcagtcggatcctggacaacttgcttgaaggctatgacaatcggctgcggccgggatttggaggtgctgtcactgaagtcaaaacagacatttatgtgaccagttttgggcccgtgtcagatgtggagatggagtatacgatggatgtttttttccgccagacctggactgatgagaggttgaagtttggggggccaactgagattctgagtctgaataatttgatggtcagtaaaatctggacgcctgacacctttttcagaaatggtaaaaagtccattgctcacaacatgacaactcctaataaactcttcagaataatgcagaatggaaccattttatacaccatgaggcttaccatcaatgctgactgtcccatgaggctggttaactttcctatggatgggcatgcttgtccactcaagtttgggagctatgcttatcccaaaagtgaaatcatatatacgtggaaaaaaggaccactttactcagtagaagtcccagaagaatcttcaagccttctccagtatgatctgattggacaaacagtatctagtgagacaattaaatctaacacaggtgaatacgttataatgacagtttacttccacttgcaaaggaagatgggctacttcatgatacagatatacactccttgcattatgacagtcattctttcccaggtgtctttctggattaataaggagtccgtcccagcaagaactgtttttgggatcaccactgttttaactatgaccactttgagcatcagtgcccggcactctttgccaaaagtgtcatatgccactgccatggattggttcatagctgtttgctttgcattcgtcttctctgcgcttatcgagttcgcagctgtcaactactttaccaatcttcagacacagaaggccaaaaggaaggcacagtttgcagccccacccacagtgacaatatcaaaagctactgaacctttggaagctgagattgttttgcatcctgactccaaatatcatctgaagaaaaggatcacttctctgtctttgccaatagtttcatcttccgaggccaataaagtgctcacgagagcgcccatcttacaatcaacacctgtcacacccccaccactctcgccagcctttggaggcaccagtaaaatagaccagtattctcgaattctcttcccagttgcatttgcaggattcaaccttgtgtactgggtagtttatctttccaaagatacaatggaagtcagtagcagtgttgaatagcttgcggccaggacaacctgaattctataagttcttgttttctgtttcctatgttttcttaaaaaatagcattgagacttgtgtagatgcttctcagaacatgaaatcaaattggaaatctgtaacgcagcttccgtaagcatgtgtgggcaaaaaagcaataatcctactcctcaaaatagaaagttgaagattgctgaaaaatatgacttttctgtatgttagagaaaaactttatgaggatgaaatgggttcaagatgaatttgtcaacttttgtcttccattgttcagtatttttaattgtcactgtaaataacatttaccacaaggca

SEQ ID NO: 8020 - DNA, 2393 bp, Homo sapiens
  source 1..2393: mol_type = unassigned DNA; mol_type = unassigned DNA
acataatctaagaccacaaaccaccttgttccacgtgagaaggaaacaagaaagaagggagccaggggaatcctgcaaatttttaggcaacctctttatctattggattactgacttgaggcaaacaaggaacagagatatgaagggtttgaaagatttctccagttgattggcagagaagagctggctagcagggaggacgaccctaggagggtgaattctgcatttcagtgcactgcaggatggcgtcgtctctgccctggctgtgcattattctgtggctagaaaatgccctagggaaactcgaagttgaaggcaacttctactcagaaaacgtcagtcggatcctggacaacttgcttgaaggctatgacaatcggctgcggccgggatttggaggtgctgtcactgaagtcaaaacagacatttatgtgaccagttttgggcccgtgtcagatgtggagatgacctggactgatgagaggttgaagtttggggggccaactgagattctgagtctgaataatttgatggtcagtaaaatctggacgcctgacacctttttcagaaatggtaaaaagtccattgctcacaacatgacaactcctaataaactcttcagaataatgcagaatggaaccattttatacaccatgaggcttaccatcaatgctgactgtcccatgaggctggttaactttcctatggatgggcatgcttgtccactcaagtttgggagctatgcttatcccaaaagtgaaatcatatatacgtggaaaaaaggaccactttactcagtagaagtcccagaagaatcttcaagccttctccagtatgatctgattggacaaacagtatctagtgagacaattaaatctaacacaggtgaatacgttataatgacagtttacttccacttgcaaaggaagatgggctacttcatgatacagatatacactccttgcattatgacagtcattctttcccaggtgtctttctggattaataaggagtccgtcccagcaagaactgtttttgggatcaccactgttttaactatgaccactttgagcatcagtgcccggcactctttgccaaaagtgtcatatgccactgccatggattggttcatagctgtttgctttgcattcgtcttctctgcgcttatcgagttcgcagctgtcaactactttaccaatcttcagacacagaaggccaaaaggaaggcacagtttgcagccccacccacagtgacaatatcaaaagctactgaacctttggaagctgagattgttttgcatcctgactccaaatatcatctgaagaaaaggatcacttctctgtctttgccaatagtttcatcttccgaggccaataaagtgctcacgagagcgcccatcttacaatcaacacctgtcacacccccaccactctcgccagcctttggaggcaccagtaaaatagaccagtattctcgaattctcttcccagttgcatttgcaggattcaaccttgtgtactgggtagtttatctttccaaagatacaatggaagtcagtagcagtgttgaatagcttgcggccaggacaacctgaattctataagttcttgttttctgtttcctatgttttcttaaaaaatagcattgagacttgtgtagatgcttctcagaacatgaaatcaaattggaaatctgtaacgcagcttccgtaagcatgtgtgggcaaaaaagcaataatcctactcctcaaaatagaaagttgaagattgctgaaaaatatgacttttctgtatgttagagaaaaactttatgaggatgaaatgggttcaagatgaatttgtcaacttttgtcttccattgttcagtatttttaattgtcactgtaaataacatttaccacaaggcagataaaataagaaatgctgacacttccaaaggttgccttaaaatatgtttattttggcttagttcccgagagggcaaaatataaatacagtctaaatatttatcagtaggttaataccagcatgttggaggcctttatgctagtaaaatggctttcagtggcattgtaaagcctacattgagcttagccatttgtttttaacctcgctgtgctcttttacctcaataaaatgtggtgtttgtatacatataaattatacatagctcataaattatgtatgcatatgtacatagctgtagttggactaaaattcagtgtgttttatcctactaaattctccttttaaaataatacacttaccataattctatgaggttgtagaaaaaagtactcattataaggaagccttgtatattatgactatggttatctcttgtgttttccacatttccaattataacactaaataaaacaacaataaacatg

SEQ ID NO: 8021 - DNA, 574 bp, Homo sapiens
  source 1..574: mol_type = unassigned DNA; mol_type = unassigned DNA
atctcagaggaaaggaaaagtatacatccattgggtgactcctatatcaaatcatgaaagaggccagaagtggtgttgcatgtatttgtaacagggtggaatagagtagattagacaaaacctcttctctgagcctgggagtaaggatcattgactgtctacacacaggctagaaaatgccctagggaaactcgaagttgaaggcaacttctactcagaaaacgtcagtcggatcctggacaacttgcttgaaggctatgacaatcggctgcggccgggatttggaggtgctgtcactgaagtcaaaacagacatttatgtgaccagttttgggcccgtgtcagatgtggagatggagtatacgatggatgtttttttccgccagacctggactgatgagaggttgaagtttggggggccaactgagattctgagtctgaataatttgatggtcagtaaaatctggacgcctgacacctttttcagaaatggtaaaaagtccattgctcacaacatgacaactcctaataaactcttcagaataatgcagaatggaaccattttatacaccatg

SEQ ID NO: 8022 - DNA, 591 bp, Homo sapiens
  source 1..591: mol_type = unassigned DNA; mol_type = unassigned DNA
acattgaggatggaccagtaggtgttctggggactctgttccaggagtatacgatggatgtttttttccgccagacctggactgatgagaggttgaagtttggggggccaactgagattctgagtctgaataatttgatggtcagtaaaatctggacgcctgacacctttttcagaaatggtaaaaagtccattgctcacaacatgacaactcctaataaactcttcagaataatgcagaatggaaccattttatacaccatgaggcttaccatcaatgctgactgtcccatgaggctggttaactttcctatggatgggcatgcttgtccactcaagtttgggagctatgcttatcccaaaagtgaaatcatatatacgtggaaaaaaggaccactttactcagtagaagtcccagaagaatcttcaagccttctccagtatgatctgattggacaaacagtatctagtgagacaattaaatctaacacaggtgaatacgttataatgacagtttacttccacttgcaaaggaagatgggctacttcatgatacagatatacactccttgcattatgacagtcattcttt

SEQ ID NO: 8023 - DNA, 555 bp, Homo sapiens
  source 1..555: mol_type = unassigned DNA; mol_type = unassigned DNA
agtaggtgttctggggactctgttccaggtacagatggctgtagcattcataagagggtatttatagagtatacgatggatgtttttttccgccagacctggactgatgagaggttgaagtttggggggccaactgagattctgagtctgaataatttgatggtcagtaaaatctggacgcctgacacctttttcagaaatggtaaaaagtccattgctcacaacatgacaactcctaataaactcttcagaataatgcagaatggaaccattttatacaccatgaggcttaccatcaatgctgactgtcccatgaggctggttaactttcctatggatgggcatgcttgtccactcaagtttgggagctatgcttatcccaaaagtgaaatcatatatacgtggaaaaaaggaccactttactcagtagaagtcccagaagaatcttcaagccttctccagtatgatctgattggacaaacagtatctagtgagacaattaaatctaacacaggtgaatacgttataatgacagtttacttccacttgcaaagg

SEQ ID NO: 8024 - DNA, 573 bp, Homo sapiens
  source 1..573: mol_type = unassigned DNA; mol_type = unassigned DNA
ttgatggtcagtaaaatctggacgcctgacacctttttcagaaatggtaaaaagtccattgctcacaacatgacaactcctaataaactcttcagaataatgcagaatggaaccattttatacaccatgaggcttaccatcaatgctgactgtcccatgaggctggttaactttcctatggatgggcatgcttgtccactcaagtttgggagctacaatgtgcactttgaaggaaaaaaagacaactcgtcaaattcactgctatatttaatttgtttcaaatatttagatgcttatcccaaaagtgaaatcatatatacgtggaaaaaaggaccactttactcagtagaagtcccagaagaatcttcaagccttctccagtatgatctgattggacaaacagtatctagtgagacaattaaatctaacacaggtgaatacgttataatgacagtttacttccacttgcaaaggaagatgggctacttcatgatacagatatacactccttgcattatgacagtcattctttcccaggtgtctttctggattaataaggagtccgtcccagca

SEQ ID NO: 8025 - DNA, 2175 bp, Homo sapiens
  source 1..2175: mol_type = unassigned DNA; mol_type = unassigned DNA
ctatgtttgtatttccttttttatagacaatgtgcactttgaaggaaaaaaagacaactcgtcaaattcactgctatatttaatttgtttcaaatatttagatgcttatcccaaaagtgaaatcatatatacgtggaaaaaaggaccactttactcagtagaagtcccagaagaatcttcaagccttctccagtatgatctgattggacaaacagtatctagtgagacaattaaatctaacacaggtaagaatttgaccaaaggatggaaataatccctcaggatgactccagtgcacattttcaaaatatctatttctttttccttcgccttagccattctcagctaagcatgctgttttgcagtgatgagtagctttccttaaaactgattttgcaaccaggtgcatataaagatttgtgtaatcttggaataagtagttttttttatgtatatgatataaagaaccctactgaaaacaataagttgatgtgtctcttcgctctatcatctgctgatcaagtagctttctcatatactgaaatgtacctttgcttgttttcttccagtcaatgttaatttaaaagttgtcaagatttatattcaactgcattctttttgcagactgtcagcagtaataatactgatgtatgtgtcttccaacaggtgaatacgttataatgacagtttacttccacttgcaaaggaagatgggctacttcatgatacagatatacactccttgcattatgacagtcattctttcccaggtgtctttctggattaataaggagtccgtcccagcaagaactgtttttgggatcaccactgttttaactatgaccactttgagcatcagtgcccggcactctttgccaaaagtgtcatatgccactgccatggattggttcatagctgtttgctttgcattcgtcttctctgcgcttatcgagttcgcagctgtcaactactttaccaatcttcagacacagaaggccaaaaggaaggcacagtttgcagccccacccacagtgacaatatcaaaagctactgaacctttggaagctgagattgttttgcatcctgactccaaatatcatctgaagaaaaggatcacttctctgtctttgccaatagtttcatcttccgaggccaataaagtgctcacgagagcgcccatcttacaatcaacacctgtcacacccccaccactctcgccagcctttggaggcaccagtaaaatagaccagtattctcgaattctcttcccagttgcatttgcaggattcaaccttgtgtactgggtagtttatctttccaaagatacaatggaagtcagtagcagtgttgaatagcttgcggccaggacaacctgaattctataagttcttgttttctgtttcctatgttttcttaaaaaatagcattgagacttgtgtagatgcttctcagaacatgaaatcaaattggaaatctgtaacgcagcttccgtaagcatgtgtgggcaaaaaagcaataatcctactcctcaaaatagaaagttgaagattgctgaaaaatatgacttttctgtatgttagagaaaaactttatgaggatgaaatgggttcaagatgaatttgtcaacttttgtcttccattgttcagtatttttaattgtcactgtaaataacatttaccacaaggcagataaaataagaaatgctgacacttccaaaggttgccttaaaatatgtttattttggcttagttcccgagagggcaaaatataaatacagtctaaatatttatcagtaggttaataccagcatgttggaggcctttatgctagtaaaatggctttcagtggcattgtaaagcctacattgagcttagccatttgtttttaacctcgctgtgctcttttacctcaataaaatgtggtgtttgtatacatataaattatacatagctcataaattatgtatgcatatgtacatagctgtagttggactaaaattcagtgtgttttatcctactaaattctccttttaaaataatacacttaccataattctatgaggttgtagaaaaaagtactcattataaggaagccttgtatattatgactatggttatctcttgtgttttccacatttccaattataacactaaataaaacaacaataaacatgg

SEQ ID NO: 8026 - DNA, 576 bp, Homo sapiens
  source 1..576: mol_type = unassigned DNA; mol_type = unassigned DNA
gcgcgcttgcgctgcaagactcggcaagtttgttccgactgtaactccggggatgaggaacggggtctctcgcccctcctccggcttcgcagcccccgaccccaagtgggctccccgcccacagcagtgttcgtcctcctacctcctggccccctcccttccgctgggatttggatctaaccaatgaagctcctctgtcatcagcaccaatgaacccagcaacatgtcatacgtgaaagagacagtggacagattgctcaaaggatatgacattcgcttgcggccggacttcggagggccccccgtcgacgttgggatgcggatcgatgtcgccagcatagacatggtctccgaagtgaatatggattatacactcaccatgtatttccagcagtcttggaaagacaaaaggctttcttattctggaatcccactgaacctcaccctagacaatagggtagctgaccaactctgggtaccagacacctactttctgaatgacaagaaatcatttgtgcatggggtcacagtgaaaaatcgaatgattcgactgcatcctgatggaacagttctcta

SEQ ID NO: 8027 - DNA, 2143 bp, Homo sapiens
  source 1..2143: mol_type = unassigned DNA; mol_type = unassigned DNA
aatgcatgaaggaaactccgtttacacatgctcgtaggatcccctgcgtggaaacagcagcttgtctctgactacccggaggacatggagcaccccaaataggaactttagagggattgaaatctgttgcctgttccactaggaatattgtttgcaaggcacaaggtgtcttttggtagtgagcgcgctctgcgcatgcgcaggtccattcgggaattactgcccagcagccgactaagttgcattccttgaatcttcgcagaaaagacaattcttttaatcagagttagtaatgtggacagtacaaaatcgagagagtctggggcttctctctttccctgtgatgattaccatggtctgttgtgcacacagcaccaatgaacccagcaacatgtcatacgtgaaagagacagtggacagattgctcaaaggatatgacattcgcttgcggccggacttcggagggccccccgtcgacgttgggatgcggatcgatgtcgccagcatagacatggtctccgaagtgaatatggattatacactcaccatgtatttccagcagtcttggaaagacaaaaggctttcttattctggaatcccactgaacctcaccctagacaatagggtagctgaccaactctgggtaccagacacctactttctgaatgacaagaaatcatttgtgcatggggtcacagtgaaaaatcgaatgattcgactgcatcctgatggaacagttctctatggactccgaatcacaaccacagctgcatgtatgatggatcttcgaagatatccattggatgagcagaactgcaccctggagatcgaaagttatggctataccactgatgacattgaattttactggaatggaggagaaggggcagtcactggtgttaataaaatcgaacttcctcaattttcaattgttgactacaagatggtgtctaagaaggtggagttcacaacaggagcgtatccacgactgtcactaagttttcgtctaaagagaaacattggttacttcattttgcaaacctacatgccttctacactgattacaattctgtcctgggtgtctttttggatcaactatgatgcatctgcagccagagtcgcactaggaatcacgacagtgcttacaatgacaaccatcagcacccacctcagggagaccctgccaaagatcccttatgtcaaagcgattgatatttatctgatgggttgctttgtgtttgtgttcctggctctgctggagtatgcctttgtaaattacatcttctttgggaaaggccctcagaaaaagggagctagcaaacaagaccagagtgccaatgagaagaataaactggagatgaataaagtccaggtcgacgcccacggtaacattctcctcagcaccctggaaatccggaatgagacgagtggctcggaagtgctcacgagcgtgagcgaccccaaggccaccatgtactcctatgacagcgccagcatccagtaccgcaagcccctgagcagccgcgaggcctacgggcgcgccctggaccggcacggggtacccagcaaggggcgcatccgcaggcgtgcctcccagctcaaagtcaagatccccgacttgactgatgtgaattccatagacaagtggtcccgaatgtttttccccatcaccttttctctttttaatgtcgtctattggctttactatgtacactgaggtctgttctaatggttccatttagactactttcctcttctattgttttttaaccttacaggtccccaacagcgatactgctgtttctcgaggtaagagattcagccatccaattggttttaggtcttgcatatcagttttattactgcaccatgtttacttcaaaaagacaaaacaaaaaaaaaattatttttccagtctaccgtggtccaggttatcagctctttaagagctctattaattgccatgtttacaaacaaacacaaagagagaagttagacaggtagatctttagcagtcttttctagtttccctggatttcactgatttattttttagggaaaatgaaaagaggaccttgctgtccgcctgcactgcttcctggtaaactataacaaacttatgctgccaaaaaaaaaaaaaaaa

SEQ ID NO: 8028 - DNA, 605 bp, Homo sapiens
  source 1..605: mol_type = unassigned DNA; mol_type = unassigned DNA
gcgcatgcgcaggtccattcgggaattactgcccagcagccgactaagttgcattccttgaatcttcgcagaaaagacaattcttttaatcagagttagtaatgtggacagtacaaaatcgagagagtctggggcttctctctttccctgtgatgattaccatggtctgttgtgcacacagcaccaatgaacccagcaacatgtcatacgtgaaagagacagtggacagattgctcaaaggatatgacattcgcttgcggccggacttcggagggccccccgtcgacgttgggatgcggatcgatgtcgccagcatagacatggtctccgaagtgaatatgcatgtcctaaagaaaaaattggggaaataaaaatcccaagccaactattgagaggccaatgagaagagagaaagaagattcacgacagaggttaatattggccaactgaaaacttctgtcttcatgtggggagaactgatctttagaagtgtcgaagttgggaatgagaggaagactggataaaaaatttggagagtaggatatattcacaaaactggaaaaatggattcagtccttggtgggttatttgtgtctgcctcttat

SEQ ID NO: 8029 - DNA, 840 bp, Homo sapiens
  source 1..840: mol_type = unassigned DNA; mol_type = unassigned DNA
gcccagcagccgactaagttgcattccttgaatcttcgcagaaaagacaattcttttaatcagagttagtaatgtggacagtacaaaatcgagagagtctggggcttctctctttccctgtgatgattaccatggtctgttgtgcacacagcaccaatgaacccagcaacatgtcatacgtgaaagagacagtggacagattgctcaaaggatatgacattcgcttgcggccggacttcggagggccccccgtcgacgttgggatgcggatcgatgtcgccagcatagacatggtctccgaagtgaatatggtgagtggcctcccgaggggcccggcggttcggcttacgcagatgggaaatggacaggtccctttgccctctgcgtttcattggcggtcacctcgcccctggcccctgaggtcccactccgcacccgctccccgctccggcacacacacccggtcgcccctggtttgtaatttcgacacacacgggctactgcggtgttccaggggaaacgtgctcggcactattttgggaaggacgagtgactgttgcgccgtggatctgctggggcggagtctgagcgttactttagctgggtttccctgcgtgtttggatgaggagggcaccatctgctggcagccgggcggcctgcactagggtccccggaccggtggtcggcagccatcacctccccaggcgcggtgctggcaatccccatggccctcgcagtccgcgagcccggatgcaccaaggccctgccaccgagagcacagtctgggtttcaaagtgtcctctctctccaggttcaggcacacctggtggcaggagcaa

SEQ ID NO: 8030 - DNA, 563 bp, Homo sapiens
  source 1..563: mol_type = unassigned DNA; mol_type = unassigned DNA
cttttaatcagagttagtaatgtggacagtacaaaatcgagagagtctggggcttctctctttccctgtgatgattaccatggtctgttgtgcacacagcaccaatgaacccagcaacatgtcatacgtgaaagagacagtggacagattgctcaaaggatatgacattcgcttgcggccggacttcggaggattatacactcaccatgtatttccagcagtcttggaaagacaaaaggctttcttattctggaatcccactgaacctcaccctagacaatagggtagctgaccaactctgggtaccagacacctactttctgaatgacaagaaatcatttgtgcatggggtcacagtgaaaaatcgaatgattcgactgcatcctgatggaacagttctctatggactccgaatcacaaccacagctgcatgtatgatggatcttcgaagatatccattggatgagcagaactgcaccctggagatcgaaagttatggctataccactgatgacattgaattttactggaatggaggagaaggggcagtcactggtgttaat

SEQ ID NO: 8031 - DNA, 1961 bp, Homo sapiens
  source 1..1961: mol_type = unassigned DNA; mol_type = unassigned DNA
gggctccgcgctccgtccgccccctcgcgcccgcgccgcgctcgctcagctcccgcccgcctgtgccgcctgtgcggccgccgggagccaagtttgcgcggaccccgtcccgagcccgccgcggccatggacgcgcccgcccggctgctggccccgctcctgctcctctgcgcgcagcagctccgcggcaccagagcgatgaatgacatcggcgactacgtgggctccaacctggagatctcctggctccccaacctggacgggctgatagccggctacgcccgcaacttccggcctggcatcggaggcccccccgtgaatgtggcccttgccctggaggtggccagcatcgaccacatctcagaggccaacatggagtacaccatgacggtgttcctgcaccagagctggcgggacagcaggctctcctacaaccacaccaacgagaccctgggtctggacagccgcttcgtggacaagctgtggctgcccgacaccttcatcgtgaacgccaagtcggcctggttccacgacgtgacggtggagaacaagctcatccggctgcagcccgacggcgtgatcctgtacagcatccgaatcacctccactgtggcctgcgacatggacctggccaaataccccatggacgagcaggagtgcatgctggacctggagagctacggttactcatcggaggacatcgtctactactggtcggagagccaggagcacatccacgggctggacaagctgcagctggcgcagttcaccatcaccagctaccgcttcaccacggagctgatgaacttcaagtccgctggccagttcccacggctcagcctgcacttccacctgcggaggaaccgcggcgtgtacatcatccaatcctacatgccctccgtcctgctggtcgccatgtcctgggtctccttctggatcagccaggcggcggtgcccgccagggtgtctctaggcatcaccacggtgctgacgatgaccacgctcatggtcagtgcccgctcctccctgccacgggcatcagccatcaaggcactggacgtctacttctggatctgctatgtcttcgtgtttgccgccctggtggagtacgcctttgctcatttcaacgccgactacaggaagaagcagaaggccaaggtcaaggtctccaggccgagggcagagatggacgtgaggaacgccattgtcctcttctccctctctgctgccggcgtcacgcaggagctggccatctcccgccggcagcgccgcgtcccggggaacctgatgggctcctacaggtcggtgggggtggagacaggggagacgaagaaggagggggcagcccgctcaggaggccaggggggcatccgtgcccggctcaggcccatcgacgcagacaccattgacatttacgcccgcgctgtgttccctgcggcgtttgcggccgtcaatgtcatctactgggcggcatacgccatgtgagcacaggactcaggccaccctcgcttgtcctggcgcccggcggcagctgcccagaaacttcctgggagaaagagccctcgggctgccttcccctctgcgtgtttcgaagtgggatgacagtcggccacggaaaacaagaggaagcctcggcctccctgagctctgaccccagcctcacccgaaaggccagcctggggctctccggcaggcagcccgagacctgcacagatgaaggagcagaggttctgaccgagaggctgagccaggccggggtctgggcccttcagggagccgcggatttttatgttcagaaagtgatcctggtttctaggtctttgctctgcaggatcgggatcagagcgtgggaggaggtgggggtggacgtccatccggtgaacagtgaaggcgtttgtgaggtctttctggtcccagcatgaaataaagccttggcctgggggccgcttcattctccctca

SEQ ID NO: 8032 - DNA, 1282 bp, Homo sapiens
  source 1..1282: mol_type = unassigned DNA; mol_type = unassigned DNA
cgcgccgcgctcgctcagctcccgcccgcctgtgccgcctgtgcggccgccgggagccaagtttgcgcggaccccgtcccgagcccgccgcggccatggacgcgcccgcccggctgctggccccgctcctgctcctctgcgcgcagcagctccgcggcaccagagcgatgaatgacatcggcgactacgtgggctccaacctggagatctcctggctccccaacctggacgggctgatagccggctacgcccgcaacttccggcctggcatcggaggcccccccgtgaatgtggcccttgccctggaggtggccagcatcgaccacatctcagaggccaacatggtaggtgccaccagcctctgcctcaggcacggagtacaccatgacggtgttcctgcaccagagctggcgggacagcaggctctcctacaaccacaccaacgagaccctgggtctggacagccgcttcgtggacaagctgtggctgcccgacaccttcatcgtgaacgccaagtcggcctggttccacgacgtgacggtggagaacaagctcatccggctgcagcccgacggcgtgatcctgtacagcatccgaatcacctccactgtggcctgcgacatggacctggccaaataccccatggacgagcaggagtgcatgctggacctggagagctacggttactcatcggaggacatcgtctactactggtcggagagccaggagcacatccacgggctggacaagctgcagctggcgcagttcaccatcaccagctaccgcttcaccacggagctgatgaacttcaagtccgctggccagttcccacggctcagcctgcacttccacctgcggaggaaccgcggcgtgtacatcatccaatcctacatgccctccgtcctgctggtcgccatgtcctgggtctccttctggatcagccaggcggcggtgcccgccagggtgtctctaggcatcaccacggtgctgacgatgaccacgctcatggtcagtgcccgctcctccctgccacgggcatcagccatcaaggcactggacgtctacttctggatctgctatgtcttcgtgtttgccgccctggtggagtacgcctttgctcatttcaacgccgactacaggaagaagcagaaggccaaggtcaaggtctccaggccgagggcagagatggacgtgaggaacgccattgtcctcttctccctctctgctgccggcgtcacgcaggagctggccatctcccgccggcagcgccgcgtcccgggga

SEQ ID NO: 8033 - DNA, 1247 bp, Homo sapiens
  source 1..1247: mol_type = unassigned DNA; mol_type = unassigned DNA
gtgccgcctgtgcggccgccgggagccaagtttgcgcggaccccgtcccgagcccgccgcggccatggacgcgcccgcccggctgctggccccgctcctgctcctctgcgcgcagcagctccgcggcaccaggaggacaggtatgacaatcaccacaaactggacggcttgaaacaacagacgcctattctctcgcagctcgggaggccaggagcctgaaatcaagagcgatgaatgacatcggcgactacgtgggctccaacctggagatctcctggctccccaacctggacgggctgatagccggctacgcccgcaacttccggcctggcatcggaggcccccccgtgaatgtggcccttgccctggaggtggccagcatcgaccacatctcagaggccaacatggagtacaccatgacggtgttcctgcaccagagctggcgggacagcaggctctcctacaaccacaccaacgagaccctgggtctggacagccgcttcgtggacaagctgtggctgcccgacaccttcatcgtgaacgccaagtcggcctggttccacgacgtgacggtggagaacaagctcatccggctgcagcccgacggcgtgatcctgtacagcatccgaatcacctccactgtggcctgcgacatggacctggccaaataccccatggacgagcaggagtgcatgctggacctggagagctacggttactcatcggaggacatcgtctactactggtcggagagccaggagcacatccacgggctggacaagctgcagctggcgcagttcaccatcaccagctaccgcttcaccacggagctgatgaacttcaagtccgctggccagttcccacggctcagcctgcacttccacctgcggaggaaccgcggcgtgtacatcatccaatcctacatgccctccgtcctgctggtcgccatgtcctgggtctccttctggatcagccaggcggcggtgcccgccagggtgtctctaggcatcaccacggtgctgacgatgaccacgctcatggtcagtgcccgctcctccctgccacgggcatcagccatcaaggcactggacgtctacttctggatctgctatgtcttcgtgtttgccgccctggtggagtacgcctttgctcatttcaacgccgactacaggaagaagcagaaggccaaggtcaaggtctccaggccgagggcagagatggacgtgaggaacgccattgtcctcttc

SEQ ID NO: 8034 - DNA, 1632 bp, Homo sapiens
  source 1..1632: mol_type = unassigned DNA; mol_type = unassigned DNA
gtgccgcctgtgcggccgccgggagccaagtttgcgcggaccccgtcccgagcccgccgcggccatggacgcgcccgcccggctgctggccccgctcctgctcctctgcgcgcagcagctccgcggcaccagagcgatgaatgacatcggcgactacgtgggctccaacctggagatctcctggctccccaacctggacgggctgatagccggctacgcccgcaacttccggcctggcatcggaggcccccccgtgaatgtggcccttgccctggaggtggccagcatcgaccacatctcagaggccaacatggagtacaccatgacggtgttcctgcaccagagctggcgggacagcaggctctcctacaaccacaccaacgagaccctgggtctggacagccgcttcgtggacaagctgtggctgcccgacaccttcatcgtgaacgccaagtcggcctggttccacgacgtgacggtggagaacaagctcatccggctgcagcccgacggcgtgatcctgtacagcatccgaatcacctccactgtggcctgcgacatggacctggccaaataccccatggacgagcaggagtgcatgctggacctggagagctgcttcctgtgtggacggagcgctcctgccagggctcccggggcagggccgggctctgccgcccacctgtgtgcttttcctccagacggttactcatcggaggacatcgtctactactggtcggagagccaggagcacatccacgggctggacaagctgcagctggcgcagttcaccatcaccagctaccgcttcaccacggagctgatgaacttcaagtccgctggccagttcccacggctcagcctgcacttccacctgcggaggaaccgcggcgtgtacatcatccaatcctacatgccctccgtcctgctggtcgccatgtcctgggtctccttctggatcagccaggcggcggtgcccgccagggtgtctctaggcatcaccacggtgctgacgatgaccacgctcatggtcagtgcccgctcctccctgccacgggcatcagccatcaaggcactggacgtctacttctggatctgctatgtcttcgtgtttgccgccctggtggagtacgcctttgctcatttcaacgccgactacaggaagaagcagaaggccaaggtcaaggtctccaggccgagggcagagatggacgtgaggaacgccattgtcctcttctccctctctgctgccggcgtcacgcaggagctggccatctcccgccggcagcgccgcgtcccggggaacctgatgggctcctacaggtcggtgggggtggagacaggggagacgaagaaggagggggcagcccgctcaggaggccaggggggcatccgtgcccggctcaggcccatcgacgcagacaccattgacatttacgcccgcgctgtgttccctgcggcgtttgcggccgtcaatgtcatctactgggcggcatacgccatgtgagcacaggactcaggccaccctcgcttgtcctggcgcccggcggcagctgcccagaaacttcctgggagaaagagccctcgggctgccttcccctctgcgtgtttcgaagtgggatgacagtcggc

SEQ ID NO: 8035 - DNA, 2377 bp, Homo sapiens
  source 1..2377: mol_type = unassigned DNA; mol_type = unassigned DNA
gtgccgcctgtgcggccgccgggagccaagtttgcgcggaccccgtcccgagcccgccgcggccatggacgcgcccgcccggctgctggccccgctcctgctcctctgcgcgcagcagctccgcggcaccagagcgatgaatgacatcggcgactacgtgggctccaacctggagatctcctggctccccaacctggacgggctgatagccggctacgcccgcaacttccggcctggcatcggaggcccccccgtgaatgtggcccttgccctggaggtggccagcatcgaccacatctcagaggccaacatggagtacaccatgacggtgttcctgcaccagagctggcgggacagcaggctctcctacaaccacaccaacgagaccctgggtctggacagccgcttcgtggacaagctgtggctgcccgacaccttcatcgtgaacgccaagtcggcctggttccacgacgtgacggtggagaacaagctcatccggctgcagcccgacggcgtgatcctgtacagcatccgaatcacctccactgtggcctgcgacatggacctggccaaataccccatggacgagcaggagtgcatgctggacctggagagctgtgagtgggtgtgcaaggcgggtaggggcttctccagcagtggatgggggctcagactgtcagcccggggcctggacaaggctggcccggctcaggatgcaggaaagcaccaaaccagcttctgcatgcaagaagcctgggcaggaggagaaggggccagaaagcctggagcagtctggcttgtgggtctgtgccctgcctggggagccgggccatggagcccagacatggcacggattgatattgttgagccagtgcagcagcccctgtgtgtcacctgacaacggtgaccccatctgtgtcccatccacctgcccggaggagcccgacgtggtcccagagccgaaggtctcctcgctcctggctggggtcctgctcggtccccatcacgatggcgtcggccccctgcaggcttcctgtgtggacggagcgctcctgccagggctcccggggcagggccgggctctgccgcccacctgtgtgcttttcctccagacggttactcatcggaggacatcgtctactactggtcggagagccaggagcacatccacgggctggacaagctgcagctggcgcagttcaccatcaccagctaccgcttcaccacggagctgatgaacttcaagtccgctggccagttcccacggctcagcctgcacttccacctgcggaggaaccgcggcgtgtacatcatccaatcctacatgccctccgtcctgctggtcgccatgtcctgggtctccttctggatcagccaggcggcggtgcccgccagggtgtctctaggcatcaccacggtgctgacgatgaccacgctcatggtcagtgcccgctcctccctgccacgggcatcagccatcaaggcactggacgtctacttctggatctgctatgtcttcgtgtttgccgccctggtggagtacgcctttgctcatttcaacgccgactacaggaagaagcagaaggccaaggtcaaggtctccaggccgagggcagagatggacgtgaggaacgccattgtcctcttctccctctctgctgccggcgtcacgcaggagctggccatctcccgccggcagcgccgcgtcccggggaacctgatgggctcctacaggtcggtgggggtggagacaggggagacgaagaaggagggggcagcccgctcaggaggccaggggggcatccgtgcccggctcaggcccatcgacgcagacaccattgacatttacgcccgcgctgtgttccctgcggcgtttgcggccgtcaatgtcatctactgggcggcatacgccatgtgagcacaggactcaggccaccctcgcttgtcctggcgcccggcggcagctgcccagaaacttcctgggagaaagagccctcgggctgccttcccctctgcgtgtttcgaagtgggatgacagtcggccacggaaaacaagaggaagcctcggcctccctgagctctgaccccagcctcacccgaaaggccagcctggggctctccggcaggcagcccgagacctgcacagatgaaggagcagaggttctgaccgagaggctgagccaggccggggtctgggcccttcagggagccgcggatttttatgttcagaaagtgatcctggtttctaggtctttgctctgcaggatcgggatcagagcgtgggaggaggtgggggtggacgtccatccggtgaacagtgaaggcgtttgtgaggtctttctggtcccagcatgaaataaagccttggcctgggggc

SEQ ID NO: 8036 - DNA, 1707 bp, Homo sapiens
  source 1..1707: mol_type = unassigned DNA; mol_type = unassigned DNA
cgggagccaagtttgcgcggaccccgtcccgagcccgccgcggccatggacgcgcccgcccggctgctggccccgctcctgctcctctgcgcgcagcagctccgcggcaccagagcgatgaatgacatcggcgactacgtgggctccaacctggagatctcctggctccccaacctggacgggctgatagccggctacgcccgcaacttccggcctggcatcggaggcccccccgtgaatgtggcccttgccctggaggtggccagcatcgaccacatctcagaggccaacatggagtacaccatgacggtgttcctgcaccagagctggcgggacagcaggctctcctacaaccacaccaacgagaccctgggtctggacagccgcttcgtggacaagctgtggctgcccgacaccttcatcgtgaacgccaagtcggcctggttccacgacgtgacggtggagaacaagctcatccggctgcagcccgacggcgtgatcctgtacagcatccgaatcacctccactgtggcctgcgacatggacctggccaaataccccatggacgagcaggagtgcatgctggacctggagagctacggttactcatcggaggacatcgtctactactggtcggagagccaggagcacatccacgggctggacaagctgcagctggcgcagttcaccatcaccagctaccgcttcaccacggagctgatgaacttcaagtccgctggccagttcccacggctcagcctgcacttccacctgcggaggaaccgcggcgtgtacatcatccaatcctacatgccctccgtcctgctggtcgccatgtcctgggtctccttctggatcagccaggcggcggtgcccgccagggtgtctctaggcatcaccacggtgctgacgatgaccacgctcatggtcagtgcccgctcctccctgccacgggcatcagccatcaaggcactggacgtctacttctggatctgctatgtcttcgtgtttgccgccctggtggagtacgcctttgctcatttcaacgccgactacaggaagaagcagaaggccaaggtcaaggtctccaggccgagggcagaggtgagggcctggggccgagccagggacagcactgctgggggccccaaccaggacccttcagctgccccagcccactgtgggtcccagctgtgctccctgagcgtggggggctggagctgctggtccaggcggggcccccgcatgggaacacctgtggtccagggccctgggagctgcaccccagtgctcagccctgtctcccccaccggccttcgtgcagatggacgtgaggaacgccattgtcctcttctccctctctgctgccggcgtcacgcaggagctggccatctcccgccggcagcgccgcgtcccggggaacctgatgggctcctacaggtcggtgggggtggagacaggggagacgaagaaggagggggcagcccgctcaggaggccaggggggcatccgtgcccggctcaggcccatcgacgcagacaccattgacatttacgcccgcgctgtgttccctgcggcgtttgcggccgtcaatgtcatctactgggcggcatacgccatgtgagcacaggactcaggccaccctcgcttgtcctggcgcccggcggcagctgcccagaaacttcctgggagaaagagccctcgggc

SEQ ID NO: 8037 - DNA, 561 bp, Homo sapiens
  source 1..561: mol_type = unassigned DNA; mol_type = unassigned DNA
aagtttgcgcggaccccgtcccgagcccgccgcggccatggacgcgcccgcccggctgctggccccgctcctgctcctctgcgcgcagcagctccgcggcaccagagcgatgaatgacatcggcgactacgtgggctccaacctggagatctcctggctccccaacctggacgggctgatagccggctacgcccgcaacttccggcctggcatcggaggcccccccgtgaatgtggcccttgccctggaggtggccagcatcgaccacatctcagaggccaacatggagtacaccatgacggtgttcctgcaccagagctggcgggacagcaggctctcctacaaccacaccaacgagaccctgggtctggacagccgcttcgtggacaagctgtggctgcccgacaccttcatcgtgaacgccaagtcggcctggttccacgacgtgacggtggagaacaagctcatccggctgcagcccgacggcgtgatcctgtacagcatccggtgagcgggctgcccacccggactccgggggagagcctgcccgggccaagcgtc

SEQ ID NO: 8038 - DNA, 1684 bp, Homo sapiens
  source 1..1684: mol_type = unassigned DNA; mol_type = unassigned DNA
gtcccgagcccgccgcggccatggacgcgcccgcccggctgctggccccgctcctgctcctctgcgcgcagcagctccgcggcaccagagcgatgaatgacatcggcgactacgtgggctccaacctggagatctcctggctccccaacctggacgggctgatagccggctacgcccgcaacttccggcctggcatcggaggcccccccgtgaatgtggcccttgccctggaggtggccagcatcgaccacatctcagaggccaacatggagtacaccatgacggtgttcctgcaccagagctggcgggacagcaggctctcctacaaccacaccaacgagaccctgggtctggacagccgcttcgtggacaagctgtggctgcccgacaccttcatcgtgaacgccaagtcggcctggttccacgacgtgacggtggagaacaagctcatccggctgcagcccgacggcgtgatcctgtacagcatccgaatcacctccactgtggcctgcgacatggacctggccaaataccccatggacgagcaggagtgcatgctggacctggagagctacggttactcatcggaggacatcgtctactactggtcggagagccaggagcacatccacgggctggacaagctgcagctggcgcagttcaccatcaccagctaccgcttcaccacggagctgatgaacttcaagtccgctggccagttcccacggctcagcctgcacttccacctgcggaggaaccgcggcgtgtacatcatccaatcctacatgccctccgtcctgctggtcgccatgtcctgggtctccttctggatcagccaggcggcggtgcccgccagggtgtctctagccatcaaggcactggacgtctacttctggatctgctatgtcttcgtgtttgccgccctggtggagtacgcctttgctcatttcaacgccgactacaggaagaagcagaaggccaaggtcaaggtctccaggccgagggcagagatggacgtgaggaacgccattgtcctcttctccctctctgctgccggcgtcacgcaggagctggccatctcccgccggcagcgccgcgtcccggggaacctgatgggctcctacaggtcggtgggggtggagacaggggagacgaagaaggagggggcagcccgctcaggaggccaggggggcatccgtgcccggctcaggcccatcgacgcagacaccattgacatttacgcccgcgctgtgttccctgcggcgtttgcggccgtcaatgtcatctactgggcggcatacgccatgtgagcacaggactcaggccaccctcgcttgtcctggcgcccggcggcagctgcccagaaacttcctgggagaaagagccctcgggctgccttcccctctgcgtgtttcgaagtgggatgacagtcggccacggaaaacaagaggaagcctcggcctccctgagctctgaccccagcctcacccgaaaggccagcctggggctctccggcaggcagcccgagacctgcacagatgaaggagcagaggttctgaccgagaggctgagccaggccggggtctgggcccttcagggagccgcggatttttatgttcagaaagtgatcctggtttctaggtctttgctctgcaggatcgggatcagagcgtgggaggaggtg

SEQ ID NO: 8039 - DNA, 1578 bp, Homo sapiens
  source 1..1578: mol_type = unassigned DNA; mol_type = unassigned DNA
ggcaccagagcgatgaatgacatcggcgactacgtgggctccaacctggagatctcctggctccccaacctggacgggctgatagccggctacgcccgcaacttccggcctggcatcggaggcccccccgtgaatgtggcccttgccctggaggtggccagcatcgaccacatctcagaggccaacatggagtacaccatgacggtgttcctgcaccagagctggcgggacagcaggctctcctacaaccacaccaacgagaccctgggtctggacagccgcttcgtggacaagctgtggctgcccgacaccttcatcgtgaacgccaagtcggcctggttccacgacgtgacggtggagaacaagctcatccggctgcagcccgacggcgtgatcctgtacagcatccgaatcacctccactgtggcctgcgacatggacctggccaaataccccatggacgagcaggagtgcatgctggacctggagagctacggttactcatcggaggacatcgtctactactggtcggagagccaggagcacatccacgggctggacaagctgcagctggcgcagttcaccatcaccagctaccgcttcaccacggagctgatgaacttcaagtccggcatcaccacggtgctgacgatgaccacgctcatggtcagtgcccgctcctccctgccacgggcatcagccatcaaggcactggacgtctacttctggatctgctatgtcttcgtgtttgccgccctggtggagtacgcctttgctcatttcaacgccgactacaggaagaagcagaaggccaaggtcaaggtctccaggccgagggcagagatggacgtgaggaacgccattgtcctcttctccctctctgctgccggcgtcacgcaggagctggccatctcccgccggcagcgccgcgtcccggggaacctgatgggctcctacaggtcggtgggggtggagacaggggagacgaagaaggagggggcagcccgctcaggaggccaggggggcatccgtgcccggctcaggcccatcgacgcagacaccattgacatttacgcccgcgctgtgttccctgcggcgtttgcggccgtcaatgtcatctactgggcggcatacgccatgtgagcacaggactcaggccaccctcgcttgtcctggcgcccggcggcagctgcccagaaacttcctgggagaaagagccctcgggctgccttcccctctgcgtgtttcgaagtgggatgacagtcggccacggaaaacaagaggaagcctcggcctccctgagctctgaccccagcctcacccgaaaggccagcctggggctctccggcaggcagcccgagacctgcacagatgaaggagcagaggttctgaccgagaggctgagccaggccggggtctgggcccttcagggagccgcggatttttatgttcagaaagtgatcctggtttctaggtctttgctctgcaggatcgggatcagagcgtgggaggaggtgggggtggacgtccatccggtgaacagtgaaggcgtttgtgaggtctttctggtcccagcat

SEQ ID NO: 8040 - DNA, 1172 bp, Homo sapiens
  source 1..1172: mol_type = unassigned DNA; mol_type = unassigned DNA
tggcatgaagcgcacgcccccgcactctggcccttcccatctgttcacggtgggaaaacgaccgggggctctcctagagcgatgaatgacatcggcgactacgtgggctccaacctggagatctcctggctccccaacctggacgggctgatagccggctacgcccgcaacttccggcctggcatcggaggcccccccgtgaatgtggcccttgccctggaggtggccagcatcgaccacatctcagaggccaacatggagtacaccatgacggtgttcctgcaccagagctggcgggacagcaggctctcctacaaccacaccaacgagaccctgggtctggacagccgcttcgtggacaagctgtggctgcccgacaccttcatcgtgaacgccaagtcggcctggttccacgacgtgacggtggagaacaagctcatccggctgcagcccgacggcgtgatcctgtacagcatccgaatcacctccactgtggcctgcgacatggacctggccaaataccccatggacgagcaggagtgcatgctggacctggagagctacggttactcatcggaggacatcgtctactactggtcggagagccaggagcacatccacgggctggacaagctgcagctggcgcagttcaccatcaccagctaccgcttcaccacggagctgatgaacttcaagtccgctggccagttcccacggctcagcctgcacttccacctgcggaggaaccgcggcgtgtacatcatccaatcctacatgccctccgtcctgctggtcgccatgtcctgggtctccttctggatcagccaggcggcggtgcccgccagggtgtctctaggcatcaccacggtgctgacgatgaccacgctcatggtcagtgcccgctcctccctgccacgggcatcagccatcaaggcactggacgtctacttctggatctgctatgtcttcgtgtttgccgccctggtggagtacgcctttgctcatttcaacgccgactacaggaagaagcagaaggccaaggtcaaggtctccaggccgagggcagagatggacgtgaggaacgccattgtcctcttctccctctctgctgccggcgtcacgcaggagctggccatctcccgccggcagcgccgcgtcccggggaacctgat

SEQ ID NO: 8041 - DNA, 663 bp, Homo sapiens
  source 1..663: mol_type = unassigned DNA; mol_type = unassigned DNA
acccgcttgaggctgtatctgaactggggtcaaatctgtctctaggcttgctgtgggggaggccactgactcaggtcccggcccctcaactctcctggagggctcgggccaggctcgggcctggcgacctggaggacatgtctgaagccacccccttggatagaaatgattctgagaatacaggggggttaatctcaaggccccacccctgggaccaatccccatcctgtgtgcaggaggacaggtatgacaatcaccacaaactggacggcttgaaacaacagacgcctattctctcgcagctcgggaggccaggagcctgaaatcaaggtgtgggtggggctcgttcccctggaggctctgagggaacctccgtccctggcctgtctccagctccggcggtggctggaaaccctggcctcccctggcctgtggacgcctcaccccaatctctgcctcctctgtccccaggcttcttccctcttctcttctaaggacaccagtccttgggtttagggcccacccaatccagtatggcctcatcttaactaattacctctgcaaagaccttattcccaaataagctcacattctgaggctctgggtggatgtgcattttgggggacgctgttcaacccagtgcaggtgagcagatgggggccg

SEQ ID NO: 8042 - DNA, 2393 bp, Homo sapiens
  source 1..2393: mol_type = unassigned DNA; mol_type = unassigned DNA
ggaggagatgcctccctcaagcctgggcgtccccatggccctgctgtctaccccgagctgctccgaggttgagctaaaccacagaagcacatggccatttggggatctggagcccaccctgggccttcctgggaggagacagagagtaggaggctgtgggcccgggttttggggccctgtcctcttcctgtccctgccccttgcctcctcctcacattcctcttctccaaaccgtctaatgggggaagcttcgccctcagaagccgacagggagacctctttggtgagggaccccaggggtggagacccgaggccggcctccgcgggctggttgaggagggaggctgttagcctgggagcttggcccacgctggggggctctgtccaacccagggccacctccctcaaagccaggagggctaagtgggcactgaggccggaggaggaagccaggtcagggccagtggaagaggctgaggacctcccggggttccctgtgtccagccagaggcttggggactggccaggcccccacctgcaagggctcccacagtggccccccatgccctggcccaggtgcccagaacagtgctgcatccccaggaagggacccaggctcagtggaattaaattaagtcctggcctgtctgaccggtggctttgcatccccagagcgatgaatgacatcggcgactacgtgggctccaacctggagatctcctggctccccaacctggacgggctgatagccggctacgcccgcaacttccggcctggcatcggaggcccccccgtgaatgtggcccttgccctggaggtggccagcatcgaccacatctcagaggccaacatggagtacaccatgacggtgttcctgcaccagagctggcgggacagcaggctctcctacaaccacaccaacgagaccctgggtctggacagccgcttcgtggacaagctgtggctgcccgacaccttcatcgtgaacgccaagtcggcctggttccacgacgtgacggtggagaacaagctcatccggctgcagcccgacggcgtgatcctgtacagcatccgaatcacctccactgtggcctgcgacatggacctggccaaataccccatggacgagcaggagtgcatgctggacctggagagctacggttactcatcggaggacatcgtctactactggtcggagagccaggagcacatccacgggctggacaagctgcagctggcgcagttcaccatcaccagctaccgcttcaccacggagctgatgaacttcaagtccgctggccagttcccacggctcagcctgcacttccacctgcggaggaaccgcggcgtgtacatcatccaatcctacatgccctccgtcctgctggtcgccatgtcctgggtctccttctggatcagccaggcggcggtgcccgccagggtgtctctaggcatcaccacggtgctgacgatgaccacgctcatggtcagtgcccgctcctccctgccacgggcatcagccatcaaggcactggacgtctacttctggatctgctatgtcttcgtgtttgccgccctggtggagtacgcctttgctcatttcaacgccgactacaggaagaagcagaaggccaaggtcaaggtctccaggccgagggcagagatggacgtgaggaacgccattgtcctcttctccctctctgctgccggcgtcacgcaggagctggccatctcccgccggcagcgccgcgtcccggggaacctgatgggctcctacaggtcggtgggggtggagacaggggagacgaagaaggagggggcagcccgctcaggaggccaggggggcatccgtgcccggctcaggcccatcgacgcagacaccattgacatttacgcccgcgctgtgttccctgcggcgtttgcggccgtcaatgtcatctactgggcggcatacgccatgtgagcacaggactcaggccaccctcgcttgtcctggcgcccggcggcagctgcccagaaacttcctgggagaaagagccctcgggctgccttcccctctgcgtgtttcgaagtgggatgacagtcggccacggaaaacaagaggaagcctcggcctccctgagctctgaccccagcctcacccgaaaggccagcctggggctctccggcaggcagcccgagacctgcacagatgaaggagcagaggttctgaccgagaggctgagccaggccggggtctgggcccttcagggagccgcggatttttatgttcagaaagtgatcctggtttctaggtctttgctctgcaggatcgggatcagagcgtgggaggaggtgggggtggacgtccatccggtgaacagtgaaggcgtttgtgaggtctttctggtccc

SEQ ID NO: 8043 - DNA, 960 bp, Homo sapiens
  source 1..960: mol_type = unassigned DNA; mol_type = unassigned DNA
atgtggcccttgccctggaggtggccagcatcgaccacatctcagaggccaacatggagtacaccatgacggtgttcctgcaccagagctggcgggacagcaggctctcctacaaccacaccaacgagaccctgggtctggacagccgcttcgtggacaagctgtggctgcccgacaccttcatcgtgaacgccaagtcggcctggttccacgacgtgacggtggagaacaagctcatccggctgcagcccgacggcgtgatcctgtacagcatccgaatcacctccactgtggcctgcgacatggacctggccaaataccccatggacgagcaggagtgcatgctggacctggagagctacggttactcatcggaggacatcgtctactactggtcggagagccaggagcacatccacgggctggacaagctgcagctggcgcagttcaccatcaccagctaccgcttcaccacggagctgatgaacttcaagtccgctggccagttcccacggctcagcctgcacttccacctgcggaggaaccgcggcgtgtacatcatccaatcctacatgccctccgtcctgctggtcgccatgtcctgggtctccttctggatcagccaggcggcggtgcccgccagggtgtctctaggtacggggcctcgccgctgctccgagggagctggaagggcggccctggggaacaggactccccatccctcggctgggggctcagcactggcctctggaccatgccagctgtcctggggcagtggccagccgggccaggccaggcatcaccacggtgctgacgatgaccacgctcatggtcagtgcccgctcctccctgccacgggcatcagccatcaaggcactggacgtctacttctggatctgctatgtcttcgtgtttgccgccctggtggagtacgcctttgctcatttcaacgccgactac

SEQ ID NO: 8044 - DNA, 504 bp, Homo sapiens
  source 1..504: mol_type = unassigned DNA; mol_type = unassigned DNA
catgacggtgttcctgcaccagagctggcgggacagcaggctctcctacaaccacaccaacgagaccctgggtctggacagccgcttcgtggacaagctgtggctgcccgacaccttcatcgtgaacgccaagtcggcctggttccacgacgtgacggtggagaacaagctcatccggctgcagcccgacggcgtgatcctgtacagcatccgaatcacctccactgtggcctgcgacatggacctggccaaataccccatggacgagcaggagtgcatgctggacctggagagctacggttactcatcggaggacatcgtctactactggtcggagagccaggagcacatccacgggctggacaagctgcagctggcgcagttcaccatcaccagctaccgcttcaccacggagctgatgaacttcaactggccagttcccacggctcagcctgcacttccacctgcggaggaaccgcggcgtgtacatcatccaatcctaca

SEQ ID NO: 8045 - DNA, 2171 bp, Homo sapiens
  source 1..2171: mol_type = unassigned DNA; mol_type = unassigned DNA
gacacttaaaaaatcaggaggcatgtggccggatgcggtggctcacgcctgtaatcccagcactttgggaggccgaggtgggtggatcacgaggtcaagagatcgagaccatcctggccaacatggtgaaaccccgtctctactaaaaatacaaaagattcgctgggcgtggtggtgggggcctgtagtcccagctactcaagaggctgaggcaggagaatggtgtgaacccgggaggcagagcttgcagtgagccgagattgcgccactgcactccagcctggggactgagcgagactccatctcaaaaaaaaaaaacaaacaaaaaaaagaaatcaggaggcagccgggtgcagtggctcacgcttgtaaccccaacactttttggaggctgaggtgagagtatacttgagcctgggagtttgagaccagcctgggcaacatagggagatcctgcctctacaaaaataataaaaaacattagctgggcttggtggtgtgcacctgtggtctcagctactcgggaggctgaggtgggaggattacccacctcaagccccggggggttgaggctgtagtgagtcaagattgcaccactgcactccagcttgggtgacagagtgagaccctgtctcataaacaaacaaaaacatcgggatattttacataggaatttaaatatttgacctctcctagaaaatcaagtgcgtggcaactctgggcctattcccgtgtgttcctcagccatcgctcgggccagggcctgggtgtgaaggctgtcccctgccccgtaggcccccagcctagttcaatagtcaagcgttttgaagagaatgaatgaaatccagttcttgacggtcctaaaggaatacttgacgtctatgaagttgagcagtttccaggtttacctggattctgggcaaacacagtctgagaagtagctggggctccaggcaggtgctcagggggcatctctgcaggggaactgccaggctttcgggagggctggcctcacccccaaggcctcactgccatgcttgtcttggcagaatcacctccactgtggcctgcgacatggacctggccaaataccccatggacgagcaggagtgcatgctggacctggagagctacggttactcatcggaggacatcgtctactactggtcggagagccaggagcacatccacgggctggacaagctgcagctggcgcagttcaccatcaccagctaccgcttcaccacggagctgatgaacttcaagtccgctggccagttcccacggctcagcctgcacttccacctgcggaggaaccgcggcgtgtacatcatccaatcctacatgccctccgtcctgctggtcgccatgtcctgggtctccttctggatcagccaggcggcggtgcccgccagggtgtctctaggcatcaccacggtgctgacgatgaccacgctcatggtcagtgcccgctcctccctgccacgggcatcagccatcaaggcactggacgtctacttctggatctgctatgtcttcgtgtttgccgccctggtggagtacgcctttgctcatttcaacgccgactacaggaagaagcagaaggccaaggtcaaggtctccaggccgagggcagagatggacgtgaggaacgccattgtcctcttctccctctctgctgccggcgtcacgcaggagctggccatctcccgccggcagcgccgcgtcccggggaacctgatgggctcctacaggtcggtgggggtggagacaggggagacgaagaaggagggggcagcccgctcaggaggccaggggggcatccgtgcccggctcaggcccatcgacgcagacaccattgacatttacgcccgcgctgtgttccctgcggcgtttgcggccgtcaatgtcatctactgggcggcatacgccatgtgagcacaggactcaggccaccctcgcttgtcctggcgcccggcggcagctgcccagaaacttcctgggagaaagagccctcgggctgccttcccctctgcgtgtttcgaagtgggatgacagtcggccacggaaaacaagaggaagcctcggcctccctgagctctgaccccagcctcacccgaaaggccagcctggggctctccggcaggcagcccgagacctgcacagatgaa

SEQ ID NO: 8046 - DNA, 2036 bp, Homo sapiens
  source 1..2036: mol_type = unassigned DNA; mol_type = unassigned DNA
tgtaaccccaacactttttggaggctgaggtgagagtatacttgagcctgggagtttgagaccagcctgggcaacatagggagatcctgcctctacaaaaataataaaaaacattagctgggcttggtggtgtgcacctgtggtctcagctactcgggaggctgaggtgggaggattacccacctcaagccccggggggttgaggctgtagtgagtcaagattgcaccactgcactccagcttgggtgacagagtgagaccctgtctcataaacaaacaaaaacatcgggatattttacataggaatttaaatatttgacctctcctagaaaatcaagtgcgtggcaactctgggcctattcccgtgtgttcctcagccatcgctcgggccagggcctgggtgtgaaggctgtcccctgccccgtaggcccccagcctagttcaatagtcaagcgttttgaagagaatgaatgaaatccagttcttgacggtcctaaaggaatacttgacgtctatgaagttgagcagtttccaggtttacctggattctgggcaaacacagtctgagaagtagctggggctccaggcaggtgctcagggggcatctctgcaggggaactgccaggctttcgggagggctggcctcacccccaaggcctcactgccatgcttgtcttggcagaatcacctccactgtggcctgcgacatggacctggccaaataccccatggacgagcaggagtgcatgctggacctggagagctgtgagtgggtgtgcaaggcgggtaggggcttctccagcagtggatgggggctcagactgtcagcccggggcctggacaaggctggcccggctcaggatgcaggaaagcaccaaaccagcttctgcatgcaagaagcctgggcaggaggagaaggggccagaaagcctggagcagtctggcttgtgggtctgtgccctgcctggggagccgggccatggagcccagacatggcacggattgatattgttgagccagtgcagcagcccctgtgtgtcacctgacaacggtgaccccatctgtgtcccatccacctgcccggaggagcccgacgtggtcccagagccgaaggtctcctcgctcctggctggggtcctgctcggtccccatcacgatggcgtcggccccctgcaggcttcctgtgtggacggagcgctcctgccagggctcccggggcagggccgggctctgccgcccacctgtgtgcttttcctccagacggttactcatcggaggacatcgtctactactggtcggagagccaggagcacatccacgggctggacaagctgcagctggcgcagttcaccatcaccagctaccgcttcaccacggagctgatgaacttcaagtccgctggccagttcccacggctcagcctgcacttccacctgcggaggaaccgcggcgtgtacatcatccaatcctacatgccctccgtcctgctggtcgccatgtcctgggtctccttctggatcagccaggcggcggtgcccgccagggtgtctctagtgcccgctcctccctgccacgggcatcagccatcaaggcactggacgtctacttctggatctgctatgtcttcgtgtttgccgccctggtggagtacgcctttgctcatttcaacgccgactacaggaagaagcagaaggccaaggtcaaggtctccaggccgagggcagagatggacgtgaggaacgccattgtcctcttctccctctctgctgccggcgtcacgcaggagctggccatctcccgccggcagcgccgcgtcccggggaacctgatgggctcctacaggtcggtgggggtggagacaggggagacgaagaaggagggggcagcccgctcaggaggccaggggggcatccgtgcccggctcaggcccatcgacgcagacaccattgacatttacgcccgcgctgtgttccctgcggcgtttgcggccgtcaatgtcatctactgggcggcatacgccatgtgagcacaggact

SEQ ID NO: 8047 - DNA, 1578 bp, Homo sapiens
  source 1..1578: mol_type = unassigned DNA; mol_type = unassigned DNA
attcccgtgtgttcctcagccatcgctcgggccagggcctgggtgtgaaggctgtcccctgccccgtaggcccccagcctagttcaatagtcaagcgttttgaagagaatgaatgaaatccagttcttgacggtcctaaaggaatacttgacgtctatgaagttgagcagtttccaggtttacctggattctgggcaaacacagtctgagaagtagctggggctccaggcaggtgctcagggggcatctctgcaggggaactgccaggctttcgggagggctggcctcacccccaaggcctcactgccatgcttgtcttggcagaatcacctccactgtggcctgcgacatggacctggccaaataccccatggacgagcaggagtgcatgctggacctggagagctgtgagtgggtgtgcaaggcgggtaggggcttctccagcagtggatgggggctcagactgtcagcccggggcctggacaaggctggcccggctcaggatgcaggaaagcaccaaaccagcttctgcatgcaagaagcctgggcaggaggagaaggggccagaaagcctggagcagtctggcttgtgggtctgtgccctgcctggggagccgggccatggagcccagacatggcacggattgatattgttgagccagtgcagcagcccctgtgtgtcacctgacaacggtgaccccatctgtgtcccatccacctgcccggaggagcccgacgtggtcccagagccgaaggtctcctcgctcctggctggggtcctgctcggtccccatcacgatggcgtcggccccctgcaggcttcctgtgtggacggagcgctcctgccagggctcccggggcagggccgggctctgccgcccacctgtgtgcttttcctccagacggttactcatcggaggacatcgtctactactggtcggagagccaggagcacatccacgggctggacaagctgcagctggcgcagttcaccatcaccagctaccgcttcaccacggagctgatgaacttcaagtccgctggccagttcccacggctcagcctgcacttccacctgcggaggaaccgcggcgtgtacatcatccaatcctacatgccctccgtcctgctggtcgccatgtcctgggtctccttctggatcagccaggcggcggtgcccgccagggtgtctctaggcatcaccacggtgctgacgatgaccacgctcatggtcagtgcccgctcctccctgccacgggcatcagccatcaaggcactggacgtctacttctggatctgctatgtcttcgtgtttgccgccctggtggagtacgcctttgctcatttcaacgccgactacaggaagaagcagaaggccaaggtcaaggtctccaggccgagggcagagatggacgtgaggaacgccattgtcctcttctccctctctgctgccggcgtcacgcaggagctggccatctcccgccggcagcgccgcgtcccggggaacctgatgggctcctacaggtcggtgggggtggagacaggggagacgaagaaggagggggcagcccgctcagg

SEQ ID NO: 8048 - DNA, 523 bp, Homo sapiens
  source 1..523: mol_type = unassigned DNA; mol_type = unassigned DNA
gagcaggagtgcatgctggacctggagagctacggttactcatcggaggacatcgtctactactggtcggagagccaggagcacatccacgggctggacaagctgcagctggcgcagttcaccatcaccagctaccgcttcaccacggagctgatgaacttcaagtccgctggccagttcccacggctcagcctgcacttccacctgcggaggaaccgcggcgtgtacatcatccaatcctacatgccctccgtcctgctggtcgccatgtcctgggtctccttctggatcagccaggcggcggtgcccgccagggtgtctctagtgcccgctcctccctgccacgggcatcagccatcaaggcactggacgtctacttctggatctgctatgtcttcgtgtttgccgccctggtggagtacgcctttgctcatttcaacgccgactacaggaagaagcagaaggccaaggtcaaggtctccaggccgagggcagagatggacgtgaggaacgccattgtcct

SEQ ID NO: 8049 - DNA, 1295 bp, Homo sapiens
  source 1..1295: mol_type = unassigned DNA; mol_type = unassigned DNA
gtcctgtggccagacctagggccggaggccccctgacatttcaggccatgtggttggtggggagggcaggggtctaagtctctcttctgagccctggtgggccccgtagctgccaagccctgcagcccctgagtcccatggttgggctgggctgggcagggatgggggcactgacggtggctgtcctggcagctggccagttcccacggctcagcctgcacttccacctgcggaggaaccgcggcgtgtacatcatccaatcctacatgccctccgtcctgctggtcgccatgtcctgggtctccttctggatcagccaggcggcggtgcccgccagggtgtctctaggcatcaccacggtgctgacgatgaccacgctcatggtcagtgcccgctcctccctgccacgggcatcagccatcaaggcactggacgtctacttctggatctgctatgtcttcgtgtttgccgccctggtggagtacgcctttgctcatttcaacgccgactacaggaagaagcagaaggccaaggtcaaggtctccaggccgagggcagagatggacgtgaggaacgccattgtcctcttctccctctctgctgccggcgtcacgcaggagctggccatctcccgccggcagcgccgcgtcccggggaacctgatgggctcctacaggtcggtgggggtggagacaggggagacgaagaaggagggggcagcccgctcaggaggccaggggggcatccgtgcccggctcaggcccatcgacgcagacaccattgacatttacgcccgcgctgtgttccctgcggcgtttgcggccgtcaatgtcatctactgggcggcatacgccatgtgagcacaggactcaggccaccctcgcttgtcctggcgcccggcggcagctgcccagaaacttcctgggagaaagagccctcgggctgccttcccctctgcgtgtttcgaagtgggatgacagtcggccacggaaaacaagaggaagcctcggcctccctgagctctgaccccagcctcacccgaaaggccagcctggggctctccggcaggcagcccgagacctgcacagatgaaggagcagaggttctgaccgagaggctgagccaggccggggtctgggcccttcagggagccgcggatttttatgttcagaaagtgatcctggtttctaggtctttgctctgcaggatcgggatcagagcgtgggaggaggtgggggtggacgtccatccggtgaacagtgaaggcgtttgtgaggtctttctggtcccagcat

SEQ ID NO: 8050 - DNA, 872 bp, Homo sapiens
  source 1..872: mol_type = unassigned DNA; mol_type = unassigned DNA
aacagccagagagtaagtagaagctcatgaggctgaatgcttaggcctagcactggcacactcgcttttgtatatatattattagccgaagccaatcagatgatccagcccaaagtcgagaggcagaggaatagccttatccaggagaagtgaagccaacgttaattcacacagacatgtatgtgaatagcattggtccagtgaacgctatcaatatggaatacactattgatatattttttgcgcaaacgtggtatgacagacgtttgaaatttaacagcaccattaaagtcctccgattgaacagcaacatggtggggaaaatctggattccagacactttcttcagaaattccaaaaaagctgatgcacactggatcaccacccccaacaggatgctgagaatttggaatgatggtcgagtgctctacaccctaaggttgacaattgatgctgagtgccaattacaattgcacaactttccaatggatgaacactcctgccccttggagttctccagttatggctatccacgtgaagaaattgtttatcaatggaagcgaagttctgttgaagtgggcgacacaagatcctggaggctttatcaattctcatttgttggtctaagaaataccaccgaagtagtgaagacaacttccggagattatgtggtcatgtctgtctactttgatctgagcagaagaatgggatactttaccatccagacctatatcccctgcacactcattgtcgtcctatcctgggtgtctttctggatcaataaggatgctgttccagccagaacatctttaggtatcaccactgtcctgacaatgaccaccctcagcaccattgcccggaaatcgctcccc

SEQ ID NO: 8051 - DNA, 2849 bp, Homo sapiens
  source 1..2849: mol_type = unassigned DNA; mol_type = unassigned DNA
attctttcactgctggaggcagagagacactgtcagtctctccctggaggacagttgactaagtgtggagattatgtggtcatgtctgtctactttgatctgagcagaagaatgggatactttaccatccagacctatatcccctgcacactcattgtcgtcctatcctgggtgtctttctggatcaataaggatgctgttccagccagaacatctttaggtatcaccactgtcctgacaatgaccaccctcagcaccattgcccggaaatcgctccccaaggtctcctatgtcacagcgatggatctctttgtatctgtttgtttcatctttgtcttctctgctctggtggagtatggcaccttgcattattttgtcagcaaccggaaaccaagcaaggacaaagataaaaagaagaaaaaccctgcccctaccattgatatccgcccaagatcagcaaccattcaaatgaataatgctacacaccttcaagagagagatgaagagtacggctatgagtgtctggacggcaaggactgtgccagttttttctgctgttttgaagattgtcgaacaggagcttggagacatgggaggatacatatccgcattgccaaaatggactcctatgctcggatcttcttccccactgccttctgcctgtttaatctggtctattgggtctcctacctctacctgtgaggaggtatgggttttactgatatggttcttattcactgagtctcatggagagatgtctgttctaagtccacttaaataatcctctatgtggttgataatgatctgaatctgtttctatgtccaaacctggtaaattttataatgtcatattgtttgtgcccagccctcctttggttagtgtactttgaacttcgatgtttgctgtgtttcaaacctgcaaggcaaagtaaaattagagcaagaacattcaaaccaaataagatatttttcagctacagcaaataaaacagtgaaagccctgactatttacagtagtggtatccttactagattcataatgcaattagatagaaaaggtccaaaactgtaccctatgttcactccgggtcaagttgtgataaatttgatcccaatagaatacctccctcatttaagaaaaatcataactcactttaaatatgaaagcctagtccagaaatctattacacctttatctcaagataggaagaaaatttcctccacattcatgtacaatgatgtaaatatttcaataacttagaatgcttcaagtttagtgcatgcatctctttagatccaaaataaatggactgaagttatcatcctattgtcttttattttgtgtccttgggctataaaagattcctgaatgtaattataaggatttgggtttggaaatggagggaggaattttcattgccttctccctcatgcatgaagattcgaacagcttattttttccttgtatgacatattacaacactttaagtaaaatatagactggataatcaacatttgccacctctaaatatgcccaatttcataactagagtataaagtaattgtatgtgcttgccgctatttttttcttccttttaggatgatagatcataacagaacttattctccatctcaagatctgcttctagtgattgtgagtgccttgtgggcagaatccttgtcatttcctctttgggtctgtagcaccttgcatagtgcctggcatatagttggtgctcaataaatatggtttgaagtgaattgccctcacatgcttctggcaaatctctgtgctggcctgaaaccagtgactcatcttctcacataggtgttgtcaagtgatatttgattttgtaaaaataaccagtaggatccaaagaactttagctatttatgttcatcttcaaaaaattattttaggcaaagtccatactccttttaaaacaatatttatgtcctatgtttgtgtatagacatgactctactagggcataattagagtttgtgtattatttttccaggtttggggatgagtcagtccttgcccatccacaattttgtttgtgaacttataacaggaataagcaaaattcatacctgactagtgttcagaatgtagcattctgtgcgaaaaagtattgaagattagcttttaaaaactgaaaaaaaaaaatgaatgactcacatagaggttgagccaatgactgtggcctcattagattacattgtagttaaacaaagcaatttctccagacttaaaacatgatgagttgagctctatcttcatgtactcatcctgaatccttatttttctaaaatagcaccctttgttaattatttttatggaaattattactctgtcataattaaatcatagctagtataactttacagataacctaaaaagaatagaaaagaagagagagtggctttgtcagtataaaaccatgtaaagtcatcatcaagtcatctggatgaatcttgaaacacatttagctgccagttttacaaacctttaatatatcagtgctccagtatataacctcaaacaaatgtaaatagaacgaattattttcttgttttgaattgtcaatatattaaatgttgactctttgggagagttgttggcaagtttcaatggtgagaaacattattgtcaacttgaaatgtgttctgtaatggggacactacaaaaagctagctttccaatgtgtgcatagtattggcaatatgaatatatattatatataatctaatacttattataagctgctccctgtctatgtatttggaaaccttttcacaaagggaattgcctaacatgtggacttttacaataaaaatgctgc

SEQ ID NO: 8052 - DNA, 1101 bp, Homo sapiens
  source 1..1101: mol_type = unassigned DNA; mol_type = unassigned DNA
tggaggacagttgactaagtgtggagattatgtggtcatgtctgtctactttgatctgagcagaagaatgggatactttaccatccagacctatatcccctgcacactcattgtcgtcctatcctgggtgtctttctggatcaataaggatgctgttccagccagaacatctttaggtatcaccactgtcctgacaatgaccaccctcagcaccattgcccggaaatcgctccccaaggtctcctatgtcacagcgatggatctctttgtatctgtttgtttcatctttgtcttctctgctctggtggagtatggcaccttgcattattttgtcagcaaccggaaaccaagcaaggacaaagataaaaagaagaaaaaccctcttcttcggatgttttccttcaaggcccctaccattgatatccgcccaagatcagcaaccattcaaatgaataatgctacacaccttcaagagagagatgaagagtacggctatgagtgtctggacggcaaggactgtgccagttttttctgctgttttgaagattgtcgaacaggagcttggagacatgggaggatacatatccgcattgccaaaatggactcctatgctcggatcttcttccccactgccttctgcctgtttaatctggtctattgggtctcctacctctacctgtgaggaggtatgggttttactgatatggttcttattcactgagtctcatggagagatgtctgttctaagtccacttaaataatcctctatgtggttgataatgatctgaatctgtttctatgtccaaacctggtaaattttataatgtcatattgtttgtgcccagccctcctttggttagtgtactttgaacttcgatgtttgctgtgtttcaaacctgcaaggcaaagtaaaattagagcaagaacattcaaaccaaataagatatttttcagctacagcaaataaaacagtgaaagccctgactatttacagtagtggtatccttactagattcataatgcaattagatagaaaaggtccaaaactgtaccctatgttcactccgggtcaagttgtgataaatttgatcccaatagaat

SEQ ID NO: 8053 - DNA, 3899 bp, Homo sapiens
  source 1..3899: mol_type = unassigned DNA; mol_type = unassigned DNA
gtgtggattctgctcctgctgtcgctctaccctggcttcactagccagaaatctgatgatgactatgaagattatgcttctaacaaaacatgggtcttgactccaaaagttcctgagggtgatgtcactgtcatcttaaacaacctgctggaaggatatgacaataaacttcggcctgatataggagtgaagccaacgttaattcacacagacatgtatgtgaatagcattggtccagtgaacgctatcaatatggaatacactattgatatattttttgcgcaaacgtggtatgacagacgtttgaaatttaacagcaccattaaagtcctccgattgaacagcaacatggtggggaaaatctggattccagacactttcttcagaaattccaaaaaagctgatgcacactggatcaccacccccaacaggatgctgagaatttggaatgatggtcgagtgctctacaccctaaggttgacaattgatgctgagtgccaattacaattgcacaactttccaatggatgaacactcctgccccttggagttctccagttatggctatccacgtgaagaaattgtttatcaatggaagcgaagttctgttgaagtgggcgacacaagatcctggaggctttatcaattctcatttgttggtctaagaaataccaccgaagtagtgaagacaacttccggagattatgtggtcatgtctgtctactttgatctgagcagaagaatgggatactttaccatccagacctatatcccctgcacactcattgtcgtcctatcctgggtgtctttctggatcaataaggatgctgttccagccagaacatctttaggtatcaccactgtcctgacaatgaccaccctcagcaccattgcccggaaatcgctccccaaggtctcctatgtcacagcgatggatctctttgtatctgtttgtttcatctttgtcttctctgctctggtggagtatggcaccttgcattattttgtcagcaaccggaaaccaagcaaggacaaagataaaaagaagaaaaaccctaaggtggttctattgagagttggcatattacctgccagctataacaaggacatgaggactggctttcaaacaagttctgatgagtcctttggaaaaagccccttggccctctctgtcagctacgccattgcagagtagattttgttgcaaagatagaggcagattcccttattcagggtcatggaaatggcagaagaagaaaaggcagaggagaacaggataaaaatttgagaaaatgaaattacctgagaatttcatgcacttctttttaggcaattagatgattcatcagaactagcaagaaaataaactaggaatgagaagctgaaagtttattttcctgtttaatatgccttttggataattgtgtcaagactcacctattaagttatccgtgatgataattagaaaatagaatcatagtatttttaaacaggggaaccaggcaatagaaaacttccttgcaattgaacaactctggcttcttcagtcaagtaattgtagattaatttattaaaaatttcactagtaattacaaaattacacttaactttaagcaaatactttatcccaagctcagaactctccttctgtgtttataatttcagttcatttcacttactgtgttttcaaaatgtatttttaatttatcttgtctctctctttttttttcattttttttctcctttttattaaaaacaaatgcaattctcttttctgtctacaaacccaaagcttcttcggatgttttccttcaaggcccctaccattgatatccgcccaagatcagcaaccattcaaatgaataatgctacacaccttcaagagagagatgaagagtacggctatgagtgtctggacggcaaggactgtgccagttttttctgctgttttgaagattgtcgaacaggagcttggagacatgggaggatacatatccgcattgccaaaatggactcctatgctcggatcttcttccccactgccttctgcctgtttaatctggtctattgggtctcctacctctacctgtgaggaggtatgggttttactgatatggttcttattcactgagtctcatggagagatgtctgttctaagtccacttaaataatcctctatgtggttgataatgatctgaatctgtttctatgtccaaacctggtaaattttataatgtcatattgtttgtgcccagccctcctttggttagtgtactttgaacttcgatgtttgctgtgtttcaaacctgcaaggcaaagtaaaattagagcaagaacattcaaaccaaataagatatttttcagctacagcaaataaaacagtgaaagccctgactatttacagtagtggtatccttactagattcataatgcaattagatagaaaaggtccaaaactgtaccctatgttcactccgggtcaagttgtgataaatttgatcccaatagaatacctccctcatttaagaaaaatcataactcactttaaatatgaaagcctagtccagaaatctattacacctttatctcaagataggaagaaaatttcctccacattcatgtacaatgatgtaaatatttcaataacttagaatgcttcaagtttagtgcatgcatctctttagatccaaaataaatggactgaagttatcatcctattgtcttttattttgtgtccttgggctataaaagattcctgaatgtaattataaggatttgggtttggaaatggagggaggaattttcattgccttctccctcatgcatgaagattcgaacagcttattttttccttgtatgacatattacaacactttaagtaaaatatagactggataatcaacatttgccacctctaaatatgcccaatttcataactagagtataaagtaattgtatgtgcttgccgctatttttttcttccttttaggatgatagatcataacagaacttattctccatctcaagatctgcttctagtgattgtgagtgccttgtgggcagaatccttgtcatttcctctttgggtctgtagcaccttgcatagtgcctggcatatagttggtgctcaataaatatggtttgaagtgaattgccctcacatgcttctggcaaatctctgtgctggcctgaaaccagtgactcatcttctcacataggtgttgtcaagtgatatttgattttgtaaaaataaccagtaggatccaaagaactttagctatttatgttcatcttcaaaaaattattttaggcaaagtccatactccttttaaaacaatatttatgtcctatgtttgtgtatagacatgactctactagggcataattagagtttgtgtattatttttccaggtttggggatgagtcagtccttgcccatccacaattttgtttgtgaacttataacaggaataagcaaaattcatacctgactagtgttcagaatgtagcattctgtgcgaaaaagtattgaagattagcttttaaaaactgaaaaaaaaaaatgaatgactcacatagaggttgagccaatgactgtggcctcattagattacattgtagttaaacaaagcaatttctccagacttaaaacatgatgagttgagctctatcttcatgtactcatcctgaatccttatttttctaaaatagcaccctttgttaattatttttatggaaattattactctgtcataattaaatcatagctagtataactttacagataacctaaaaagaatagaaaagaagagagagtggctttgtcagtataaaaccatgtaaagtcatcatcaagtcatctggatgaatcttgaaacacatttagctgccagttttaca

SEQ ID NO: 8054 - DNA, 3799 bp, Homo sapiens
  source 1..3799: mol_type = unassigned DNA; mol_type = unassigned DNA
actactactcgggaaactgaggcacaatcgcttgagccctggagttccaagccgtagtgggcaatgattgtgcctaagaatagccactgtgctccagcctggaaaacatagcaagacaaaaaaagaaagagaaagaaagaaaaaaaagaaagaaagaaagaaagaagaaagaaagaaagaaagaaagaaagagagagagagagagagaaagaaagaaggaaagaaagaaagagaagagaagagaaaaggaaagaaaagaaagaaaagaaaagaaaagaaaaaaaagaaaaaagaagttgtcattcactatttccagggctcacttgttttgcttcactagccagaaatctgatgatgactatgaagattatgcttctaacaaaacatgggtcttgactccaaaagttcctgagggtgatgtcactgtcatcttaaacaacctgctggaaggatatgacaataaacttcggcctgatataggagtgaagccaacgttaattcacacagacatgtatgtgaatagcattggtccagtgaacgctatcaatatggaatacactattgatatattttttgcgcaaacgtggtatgacagacgtttgaaatttaacagcaccattaaagtcctccgattgaacagcaacatggtggggaaaatctggattccagacactttcttcagaaattccaaaaaagctgatgcacactggatcaccacccccaacaggatgctgagaatttggaatgatggtcgagtgctctacaccctaaggttgacaattgatgctgagtgccaattacaattgcacaactttccaatggatgaacactcctgccccttggagttctccagttatggctatccacgtgaagaaattgtttatcaatggaagcgaagttctgttgaagtgggcgacacaagatcctggaggctttatcaattctcatttgttggtctaagaaataccaccgaagtagtgaagacaacttccggagattatgtggtcatgtctgtctactttgatctgagcagaagaatgggatactttaccatccagacctatatcccctgcacactcattgtcgtcctatcctgggtgtctttctggatcaataaggatgctgttccagccagaacatctttaggtatcaccactgtcctgacaatgaccaccctcagcaccattgcccggaaatcgctccccaaggtctcctatgtcacagcgatggatctctttgtatctgtttgtttcatctttgtcttctctgctctggtggagtatggcaccttgcattattttgtcagcaaccggaaaccaagcaaggacaaagataaaaagaagaaaaaccctcttcttcggatgttttccttcaaggcccctaccattgatatccgcccaagatcagcaaccattcaaatgaataatgctacacaccttcaagagagagatgaagagtacggctatgagtgtctggacggcaaggactgtgccagttttttctgctgttttgaagattgtcgaacaggagcttggagacatgggaggatacatatccgcattgccaaaatggactcctatgctcggatcttcttccccactgccttctgcctgtttaatctggtctattgggtctcctacctctacctgtgaggaggtatgggttttactgatatggttcttattcactgagtctcatggagagatgtctgttctaagtccacttaaataatcctctatgtggttgataatgatctgaatctgtttctatgtccaaacctggtaaattttataatgtcatattgtttgtgcccagccctcctttggttagtgtactttgaacttcgatgtttgctgtgtttcaaacctgcaaggcaaagtaaaattagagcaagaacattcaaaccaaataagatatttttcagctacagcaaataaaacagtgaaagccctgactatttacagtagtggtatccttactagattcataatgcaattagatagaaaaggtccaaaactgtaccctatgttcactccgggtcaagttgtgataaatttgatcccaatagaatacctccctcatttaagaaaaatcataactcactttaaatatgaaagcctagtccagaaatctattacacctttatctcaagataggaagaaaatttcctccacattcatgtacaatgatgtaaatatttcaataacttagaatgcttcaagtttagtgcatgcatctctttagatccaaaataaatggactgaagttatcatcctattgtcttttattttgtgtccttgggctataaaagattcctgaatgtaattataaggatttgggtttggaaatggagggaggaattttcattgccttctccctcatgcatgaagattcgaacagcttattttttccttgtatgacatattacaacactttaagtaaaatatagactggataatcaacatttgccacctctaaatatgcccaatttcataactagagtataaagtaattgtatgtgcttgccgctatttttttcttccttttaggatgatagatcataacagaacttattctccatctcaagatctgcttctagtgattgtgagtgccttgtgggcagaatccttgtcatttcctctttgggtctgtagcaccttgcatagtgcctggcatatagttggtgctcaataaatatggtttgaagtgaattgccctcacatgcttctggcaaatctctgtgctggcctgaaaccagtgactcatcttctcacataggtgttgtcaagtgatatttgattttgtaaaaataaccagtaggatccaaagaactttagctatttatgttcatcttcaaaaaattattttaggcaaagtccatactccttttaaaacaatatttatgtcctatgtttgtgtatagacatgactctactagggcataattagagtttgtgtattatttttccaggtttggggatgagtcagtccttgcccatccacaattttgtttgtgaacttataacaggaataagcaaaattcatacctgactagtgttcagaatgtagcattctgtgcgaaaaagtattgaagattagcttttaaaaactgaaaaaaaaaaatgaatgactcacatagaggttgagccaatgactgtggcctcattagattacattgtagttaaacaaagcaatttctccagacttaaaacatgatgagttgagctctatcttcatgtactcatcctgaatccttatttttctaaaatagcaccctttgttaattatttttatggaaattattactctgtcataattaaatcatagctagtataactttacagataacctaaaaagaatagaaaagaagagagagtggctttgtcagtataaaaccatgtaaagtcatcatcaagtcatctggatgaatcttgaaacacatttagctgccagttttacaaacctttaatatatcagtgctccagtatataacctcaaacaaatgtaaatagaacgaattattttcttgttttgaattgtcaatatattaaatgttgactctttgggagagttgttggcaagtttcaatggtgagaaacattattgtcaacttgaaatgtgttctgtaatggggacactacaaaaagctagctttccaatgtgtgcatagtattggcaatatgaatatatattatatataatctaatacttattataagctgctccctgtctatgtatttggaaaccttttcacaaagggaattgcctaacatgtggacttttacaataaaaatgctgc

SEQ ID NO: 8055 - DNA, 3710 bp, Homo sapiens
  source 1..3710: mol_type = unassigned DNA; mol_type = unassigned DNA
ggcaatgattgtgcctaagaatagccactgtgctccagcctggaaaacatagcaagacaaaaaaagaaagagaaagaaagaaaaaaaagaaagaaagaaagaaagaagaaagaaagaaagaaagaaagaaagagagagagagagagagaaagaaagaaggaaagaaagaaagagaagagaagagaaaaggaaagaaaagaaagaaaagaaaagaaaagaaaaaaaagaaaaaagaagttgtcattcactatttccagggctcacttgttttgcttcactagccagaaatctgatgatgactatgaagattatgcttctaacaaaacatgggtcttgactccaaaagttcctgagggtgatgtcactgtcatcttaaacaacctgctggaaggatatgacaataaacttcggcctgatataggagtgaagccaacgttaattcacacagacatgtatgtgaatagcattggtccagtgaacgctatcaatatggaatacactattgatatattttttgcgcaaacgtggtatgacagacgtttgaaatttaacagcaccattaaagtcctccgattgaacagcaacatggtggggaaaatctggattccagacactttcttcagaaattccaaaaaagctgatgcacactggatcaccacccccaacaggatgctgagaatttggaatgatggtcgagtgctctacaccctaaggttgacaattgatgctgagtgccaattacaattgcacaactttccaatggatgaacactcctgccccttggagttctccagttatggctatccacgtgaagaaattgtttatcaatggaagcgaagttctgttgaagtgggcgacacaagatcctggaggctttatcaattctcatttgttggtctaagaaataccaccgaagtagtgaagacaacttccggagattatgtggtcatgtctgtctactttgatctgagcagaagaatgggatactttaccatccagacctatatcccctgcacactcattgtcgtcctatcctgggtgtctttctggatcaataaggatgctgttccagccagaacatctttaggtatcaccactgtcctgacaatgaccaccctcagcaccattgcccggaaatcgctccccaaggtctcctatgtcacagcgatggatctctttgtatctgtttgtttcatctttgtcttctctgctctggtggagtatggcaccttgcattattttgtcagcaaccggaaaccaagcaaggacaaagataaaaagaagaaaaaccctgcccctaccattgatatccgcccaagatcagcaaccattcaaatgaataatgctacacaccttcaagagagagatgaagagtacggctatgagtgtctggacggcaaggactgtgccagttttttctgctgttttgaagattgtcgaacaggagcttggagacatgggaggatacatatccgcattgccaaaatggactcctatgctcggatcttcttccccactgccttctgcctgtttaatctggtctattgggtctcctacctctacctgtgaggaggtatgggttttactgatatggttcttattcactgagtctcatggagagatgtctgttctaagtccacttaaataatcctctatgtggttgataatgatctgaatctgtttctatgtccaaacctggtaaattttataatgtcatattgtttgtgcccagccctcctttggttagtgtactttgaacttcgatgtttgctgtgtttcaaacctgcaaggcaaagtaaaattagagcaagaacattcaaaccaaataagatatttttcagctacagcaaataaaacagtgaaagccctgactatttacagtagtggtatccttactagattcataatgcaattagatagaaaaggtccaaaactgtaccctatgttcactccgggtcaagttgtgataaatttgatcccaatagaatacctccctcatttaagaaaaatcataactcactttaaatatgaaagcctagtccagaaatctattacacctttatctcaagataggaagaaaatttcctccacattcatgtacaatgatgtaaatatttcaataacttagaatgcttcaagtttagtgcatgcatctctttagatccaaaataaatggactgaagttatcatcctattgtcttttattttgtgtccttgggctataaaagattcctgaatgtaattataaggatttgggtttggaaatggagggaggaattttcattgccttctccctcatgcatgaagattcgaacagcttattttttccttgtatgacatattacaacactttaagtaaaatatagactggataatcaacatttgccacctctaaatatgcccaatttcataactagagtataaagtaattgtatgtgcttgccgctatttttttcttccttttaggatgatagatcataacagaacttattctccatctcaagatctgcttctagtgattgtgagtgccttgtgggcagaatccttgtcatttcctctttgggtctgtagcaccttgcatagtgcctggcatatagttggtgctcaataaatatggtttgaagtgaattgccctcacatgcttctggcaaatctctgtgctggcctgaaaccagtgactcatcttctcacataggtgttgtcaagtgatatttgattttgtaaaaataaccagtaggatccaaagaactttagctatttatgttcatcttcaaaaaattattttaggcaaagtccatactccttttaaaacaatatttatgtcctatgtttgtgtatagacatgactctactagggcataattagagtttgtgtattatttttccaggtttggggatgagtcagtccttgcccatccacaattttgtttgtgaacttataacaggaataagcaaaattcatacctgactagtgttcagaatgtagcattctgtgcgaaaaagtattgaagattagcttttaaaaactgaaaaaaaaaaatgaatgactcacatagaggttgagccaatgactgtggcctcattagattacattgtagttaaacaaagcaatttctccagacttaaaacatgatgagttgagctctatcttcatgtactcatcctgaatccttatttttctaaaatagcaccctttgttaattatttttatggaaattattactctgtcataattaaatcatagctagtataactttacagataacctaaaaagaatagaaaagaagagagagtggctttgtcagtataaaaccatgtaaagtcatcatcaagtcatctggatgaatcttgaaacacatttagctgccagttttacaaacctttaatatatcagtgctccagtatataacctcaaacaaatgtaaatagaacgaattattttcttgttttgaattgtcaatatattaaatgttgactctttgggagagttgttggcaagtttcaatggtgagaaacattattgtcaacttgaaatgtgttctgtaatggggacactacaaaaagctagctttccaatgtgtgcatagtattggcaatatgaatatatattatatataatctaatacttattataagctgctccctgtctatgtatttggaaaccttttcacaaagggaattgcctaacatgtggacttttacaataaaaa

SEQ ID NO: 8056 - DNA, 3150 bp, Homo sapiens
  source 1..3150: mol_type = unassigned DNA; mol_type = unassigned DNA
tagccactgtgctccagcctggaaaacatagcaagacaaaaaaagaaagagaaagaaagaaaaaaaagaaagaaagaaagaaagaagaaagaaagaaagaaagaaagaaagagagagagagagagagaaagaaagaaggaaagaaagaaagagaagagaagagaaaaggaaagaaaagaaagaaaagaaaagaaaagaaaaaaaagaaaaaagaagttgtcattcactatttccagggctcacttgttttgcttcactagccagaaatctgatgatgactatgaagattatgcttctaacaaaacatgggtcttgactccaaaagttcctgagggtgatgtcactgtcatcttaaacaacctgctggaaggatatgacaataaacttcggcctgatataggagtgaagccaacgttaattcacacagacatgtatgtgaatagcattggtccagtgaacgctatcaatatggaatacactattgatatattttttgcgcaaacgtggtatgacagacgtttgaaatttaacagcaccattaaagtcctccgattgaacagcaacatggtggggaaaatctggattccagacactttcttcagaaattccaaaaaagctgatgcacactggatcaccacccccaacaggatgctgagaatttggaatgatggtcgagtgctctacaccctaaggttgacaattgatgctgagtgccaattacaattgcacaactttccaatggatgaacactcctgccccttggagttctccagttatggctatccacgtgaagaaattgtttatcaatggaagcgaagttctgttgaagtgggcgacacaagatcctggaggctttatcaattctcatttgttggtctaagaaataccaccgaagtagtgaagacaacttccggagattatgtggtcatgtctgtctactttgatctgagcagaagaatgggatactttaccatccagacctatatcccctgcacactcattgtcgtcctatcctgggtgtctttctggatcaataaggatgctgttccagccagaacatctttaggtatcaccactgtcctgacaatgaccaccctcagcaccattgcccggaaatcgctccccaaggtctcctatgtcacagcgatggatctctttgtatctgtttgtttcatctttgtcttctctgctctggtggagtatggcaccttgcattattttgtcagcaaccggaaaccaagcaaggacaaagataaaaagaagaaaaaccctgtatgtatcattttccattggcaccattgaaatttttatgatttcggtttagtttgttttcattagcctatctgcaggctaaggctcagcagtttgggctccaagatgaaaacagcatgtatgagtttagccaggccataacgattcatttacagtcattagttacttgagagagactcaagtctgtttctattttctgtgtcagagttcttatgcaaatataattacctgctctctttattttgtggagactaaagccatttttgagaaatgtgaccttcttcttgttgctattattccaggtttcactgattttttgagatggagtgtcactctgttgctcaggctggagtgcagtggcgggatctcggcttactgcaacctctgcctcctaggttcaagcaattctcctgcctcagccccctgagtagctgggactataggcacacgccaccatgcctggttaatttttgtatttttagtacagacggggtttcaccatattggtcaggctggtctcgaactcctgacctcaggtgatccacctgtctcggcctcccaaagtgctgggattagatgcgtgagccactgcgcctggccatgataatattattaaatcactgatattttaaattaaaacttccatctcaggcattccactaggaagctataaggtccttgaagtttcaaggctgactacatttttgcaaatgatttagtgtgtgtatggaggtggaatgtgggtattgtcaccagataatttctattgatttcattctcgaaatgtatctttttgtttttaaaacaaatgatttactattatatgggcaagttagttagcctccttgtgtgttttatatatatatatgtagtgtattatttaaaaacacttgtcttatggggctcctatgagaaataaatgtggcaatgaagggcaaaacaaaaaatcccaaaatattacatagtactctacacatgaatgtacttaacattagtagttggtgatgatagttgattttgatgatttatacagtttccagcctggattgacttcagtgccacaatttgaaaacagggaggatgacttctacttgcaaccaaactttaaatagtgaggatgaagcataaacacaaatgcctaaagcaactgttttttattgtgagtgttgaggagagcacatagttacccatttacacacctgaacaaagtggctggctcatagaaatccccatgaaagttaaggtccattcccttccaagatatgggcaaagagaatcacctgacaatcctggatcatggccttctgctttgagagccgtaataacgctctacctatccaacccagagactttggaggttgaattgtaaggaaggaatttagctgattctaggttgtattctgatgcagctgcagaaacccaagtgaaatactacaagagtaatgtgtttatttgaatgtaagactttggaacatggaaagaaagaaacatcattattcttgatttaaaaaatgctttctttaattgctcaaatatttacaatgctttatgcagtccttcccttccctgtctgttttgcctctctctgactttccattttctctatccttgttttattttccttgttgtgttgtttttgtttgctccctcttgttcactttccatttcactctccctcaagaaggtggttctattgagagttggcatattacctgccagctataacaaggacatgaggactggctttcaaacaagttctgatgagtcctttggaaaaagccccttggccctctctgtcagctacgccattgcagagtagattttgttgcaaagatagaggcagattcccttattcagggtcatggaaatggcagaaga

SEQ ID NO: 8057 - DNA, 11735 bp, Homo sapiens
  source 1..11735: mol_type = unassigned DNA
gaccacaaaccttctgtcattgatgatgtagcttctgggcttgctaaagcatctcttgtccccatgaatgccagtccttgcatgctggtgtgtgcagtaaagggttaaaaagctttggaaagacaccacgcatgtgttaattcgtgctgcagcagcgtgcatcacttccactttgacctcatagttaatctgcgtgatagttaatcacgcagagtctctagtgatttttttcctatttattttaaatacacacacccacagggctctgccccctgtaaaagaaaaaaaatcaaaacaaacaaataaataaccccaaagagatggacccaggggagaacgcgtaagtgtgaggggcatgagtatacacgagtgtgcgtgtctttccctctcccttatttgtctccgtatgagtctctccttgtaccctccccctgcctcgatgatattactcccccagacttggaagccgctgccagagtgacgctttgatggtatctgcaagcgtttttgctgatcttatctctgccccctgaatattaattccctaatctggtagcaatccatctccccagtgaaggacctactagaggcaggtggggggagccaccatcagatcataagcataagaataatacaaaggggagggattcttctgcaaccaagaggcaagaggcgagagaaggaaaaaaaaaaaagcgatgagttcgccaaatatatggagcacaggaagctcagtctactcgactcctgtattttcacagaaaatgacggtgtggattctgctcctgctgtcgctctaccctggcttcactagccagaaatctgatgatgactatgaagattatgcttctaacaaaacatgggtcttgactccaaaagttcctgagggtgatgtcactgtcatcttaaacaacctgctggaaggatatgacaataaacttcggcctgatataggagtgaagccaacgttaattcacacagacatgtatgtgaatagcattggtccagtgaacgctatcaatatggaatacactattgatatattttttgcgcaaacgtggtatgacagacgtttgaaatttaacagcaccattaaagtcctccgattgaacagcaacatggtggggaaaatctggattccagacactttcttcagaaattccaaaaaagctgatgcacactggatcaccacccccaacaggatgctgagaatttggaatgatggtcgagtgctctacaccctaaggttgacaattgatgctgagtgccaattacaattgcacaactttccaatggatgaacactcctgccccttggagttctccagttatggctatccacgtgaagaaattgtttatcaatggaagcgaagttctgttgaagtgggcgacacaagatcctggaggctttatcaattctcatttgttggtctaagaaataccaccgaagtagtgaagacaacttccggagattatgtggtcatgtctgtctactttgatctgagcagaagaatgggatactttaccatccagacctatatcccctgcacactcattgtcgtcctatcctgggtgtctttctggatcaataaggatgctgttccagccagaacatctttaggtatcaccactgtcctgacaatgaccaccctcagcaccattgcccggaaatcgctccccaaggtctcctatgtcacagcgatggatctctttgtatctgtttgtttcatctttgtcttctctgctctggtggagtatggcaccttgcattattttgtcagcaaccggaaaccaagcaaggacaaagataaaaagaagaaaaaccctcttcttcggatgttttccttcaaggcccctaccattgatatccgcccaagatcagcaaccattcaaatgaataatgctacacaccttcaagagagagatgaagagtacggctatgagtgtctggacggcaaggactgtgccagttttttctgctgttttgaagattgtcgaacaggagcttggagacatgggaggatacatatccgcattgccaaaatggactcctatgctcggatcttcttccccactgccttctgcctgtttaatctggtctattgggtctcctacctctacctgtgaggaggtatgggttttactgatatggttcttattcactgagtctcatggagagatgtctgttctaagtccacttaaataatcctctatgtggttgataatgatctgaatctgtttctatgtccaaacctggtaaattttataatgtcatattgtttgtgcccagccctcctttggttagtgtactttgaacttcgatgtttgctgtgtttcaaacctgcaaggcaaagtaaaattagagcaagaacattcaaaccaaataagatatttttcagctacagcaaataaaacagtgaaagccctgactatttacagtagtggtatccttactagattcataatgcaattagatagaaaaggtccaaaactgtaccctatgttcactccgggtcaagttgtgataaatttgatcccaatagaatacctccctcatttaagaaaaatcataactcactttaaatatgaaagcctagtccagaaatctattacacctttatctcaagataggaagaaaatttcctccacattcatgtacaatgatgtaaatatttcaataacttagaatgcttcaagtttagtgcatgcatctctttagatccaaaataaatggactgaagttatcatcctattgtcttttattttgtgtccttgggctataaaagattcctgaatgtaattataaggatttgggtttggaaatggagggaggaattttcattgccttctccctcatgcatgaagattcgaacagcttattttttccttgtatgacatattacaacactttaagtaaaatatagactggataatcaacatttgccacctctaaatatgcccaatttcataactagagtataaagtaattgtatgtgcttgccgctatttttttcttccttttaggatgatagatcataacagaacttattctccatctcaagatctgcttctagtgattgtgagtgccttgtgggcagaatccttgtcatttcctctttgggtctgtagcaccttgcatagtgcctggcatatagttggtgctcaataaatatggtttgaagtgaattgccctcacatgcttctggcaaatctctgtgctggcctgaaaccagtgactcatcttctcacataggtgttgtcaagtgatatttgattttgtaaaaataaccagtaggatccaaagaactttagctatttatgttcatcttcaaaaaattattttaggcaaagtccatactccttttaaaacaatatttatgtcctatgtttgtgtatagacatgactctactagggcataattagagtttgtgtattatttttccaggtttggggatgagtcagtccttgcccatccacaattttgtttgtgaacttataacaggaataagcaaaattcatacctgactagtgttcagaatgtagcattctgtgcgaaaaagtattgaagattagcttttaaaaactgaaaaaaaaaaatgaatgactcacatagaggttgagccaatgactgtggcctcattagattacattgtagttaaacaaagcaatttctccagacttaaaacatgatgagttgagctctatcttcatgtactcatcctgaatccttatttttctaaaatagcaccctttgttaattatttttatggaaattattactctgtcataattaaatcatagctagtataactttacagataacctaaaaagaatagaaaagaagagagagtggctttgtcagtataaaaccatgtaaagtcatcatcaagtcatctggatgaatcttgaaacacatttagctgccagttttacaaacctttaatatatcagtgctccagtatataacctcaaacaaatgtaaatagaacgaattattttcttgttttgaattgtcaatatattaaatgttgactctttgggagagttgttggcaagtttcaatggtgagaaacattattgtcaacttgaaatgtgttctgtaatggggacactacaaaaagctagctttccaatgtgtgcatagtattggcaatatgaatatatattatatataatctaatacttattataagctgctccctgtctatgtatttggaaaccttttcacaaagggaattgcctaacatgtggacttttacaataaaaatgctgcattctaatccatggtggcatctcagtagtctggtgggactgtttgtcttagagattgtgacctctctttcctgcctcatttccccaaatcccctctcagtgagctttatctgtgagctgtgtgactgtgttttgcatggcggtactcttcacctcaaaaaaattaagagaggcatgtgggttgtagagtgaagaagaaaggcagacatgtaataaagtaagtaaaaattcaagtcttctctacctcaagaatttcggtgtggttaacattaattccagtgccagacaaagttgggatcccagctttactatttaccagttgttagacaattgtcaattcagactttagaatcctccattaaaaataatttatgtatttgtttatttgtttagagatggggtgtccctctgtcactcagtctgaagtatagtggcacagtcatagctcactgaagcctcaaacttctgagctaaagcattcctcctgcctcagcctcctgaatagctggaactacagatgcatgccaccatgcccagctagaagtctccattttagcagctataaattagatataccaatgctaacctatgtagtgacactcaacaaatggtcaaaagctctctccctcacttccgatgccttccatgcactgctgtcatgctcccttcatcctatcaaactagcttccctaatagaatccagcattaggcatataagcctttaagtgactctacatcactctatttttatttttaggaaatatttgcattgcaagtcttttaaactatatgtgggaaatttctgtctcattggaaaaaaacttacacattacattagttatttttaaggccaaagaactgttatttgtaccctcaaaatttacaaacatacaaagttgattagccctactccagagacaatgtcatgttttcttgaactcttttgaaattctcccaggaatataatattatcttcacaacacagctgccctaaccatccttggccccattctcttggcccctcatatcttcctgcatctaatttaatcatctatttctcaccttccaaacctataaaaatatagttttcacttagatgttgtctgctgtctaactcaatgccctgaactttagctgaattcatatctttatatggccttcattccttgcattaagtctcaatattattctgactagtagcaaaaatttttgtctgcaatgaaggtcaaattaagttaacaaaatgatgtggtcttcagggattatgtcaaaaattgctatctctatgctttgtcactatgaatctttgtcaaaggtgtagaatatgggggaatgacgtagaccaagagctcggctatgttttctagtgctcagtgaactgccaaaggtcacacagctagttaatgacagatcagggggtcatctaagcattgctctttccactgtgtctcacagtatttcagaatttagaagtaaaattctggaatactttatctttctgttaatattttaggatctgccaaactgcaggatgctttccttctttgatctaagcctcactttgactcattttattgcaatgagacaggaatttgagaatacctagtaacagagggaagtcaatgggttttgtatttattttattccttctcatgtgaaatgaccaattgatatttaatattacccatactgctttcagaatgctgtttcaaagaaacatctaaacaactccagacctagagttagcctttgtcctttgggatatgtggcagtagacaaccaaaaagtttccatggctaggatctgcaggctcattctttctactatttaagcaaagtggtggggaatgacctaactattatgattctttctaaggttacagattataagccaattgcaaaatccagttgtaactttcttttgccacattttggataataaagaaatagtttcctctaattatggtttgtgtaactaattggaaaagcagaggctcttgctccagattaactaggttcaaatatcagccctgtcaacttttgtctgccttagttttctcacctgaaaaatggagataatattggtgtgtatctcagactttattataaggagaaacttagttaataccaaagaattactggatgctagtaattttcctcagtaaggatataaagtttcagaaaatacagggtacaagaaccatatctactttgcttaaaaatattgatcatcatttgtgaggactctcttttctcataaaaaaaaaagtcactggaccggggatagaaatttcatttaacatctggggatttccaaatattcctatcttgatgatattcagtttcttacgtaaacaagggaatttggcccctttttctccagcagatttttattcgatcacttctctgctatttgctatggcctgatgtgattgattaccatctaacattctgactctattaaactctgtcttatctccatacaggtatcttggctcatttatcttatttccaccctgagacttctctaaaaaagcacaattttcctagaatgtcgtcctctgctcaacagattcaacagtctctaattaaagactctacctggtctgtaaggtcttcccagtttcactaaagttcaatatgctattttcttttatctcttccagttcttgatgtgacttttgaatggcctaatcctaatgtttatcttagctaaatacttacattcatccaatcctctttgtaaacaaacattaaatgtacaatgctgtgacaagaatatattataaataattcactatcaattggcatcttaaatcaggttgtttatcttctatctccatgctctataaatttgcctcgcagtttttttttttctgagacttgtgtgttttatgggtgtggaattaagttcctcatcaaataggttttaattaagcatctatacattcagcttaatataaagttttcagtaaattcatgccatgggcctaatatagggccctgtgagtgcaggaagaggtaaatttcaggtatgctttgccctgaaatgcccataatatgatagaggagtcagaaaagaatacaaataactctaatggagctgcacacaagtagttgtagatagaataagtcatattctaactgtgagtgaagtcagaaaagggtttctctgtataaaaagcattcctctacatgtaaggaggtcccatcactgctcaaaatccccctttctgtaattactaataaaaatcctatagactatttgaaaactatgtacatgtacataacaatattgttcttaatccattagcaagagttagtcactaaaatagtatttatctttctatttttgttttcctccatatgtatttacagctgagggttttttccccacatatatttaaacacacggattagacaggtgaatagaagtatagatatggacatacatctgctttgaagtctcatttttccacactattatatatgtgtgtgtgagtatatttaacataacattttctggctttccattattatatcacaggactgtgtcataatttatttagtcaatcctttatttctgaaaatttgcattatttcttatttttgttgctgtaagtaatattacaaaactgtttttgttgctataagtaatattacaaaaatatttttgtcacaggcatatatatatattcctctattttcatagaatatatccctaaaacatgagctttgctgaattaaaatgtataagcatttaacaattagagtcctgacagaaaacaaatggtatactccaaggagtaattgaagaaaaattaatgaagggttacttacaaagattaggcaaggttaaagtctaccaattataggatggtttagtacaacaggtctagcagttgtcaactgaactagttacctatatccgttgtacaaatttcaatgaactcagtgacttagaacaacaaaaattcattatcataattaatttcagaaggtcagaaatttcagtggctgaagtcaagatgtgagcaaggctgcattccttctgaaggatctaggggagaattaatttcttgacttttccatgttctagagtcctcttgaattccttggcttgtggctcatgttcacctttaaagcaagcaactgcatcactcagtccctttccttcatctttcctctggctctgacctcaagcctcctacttacaaagacccttgagattacattggacccacccaaataatccaagatgatcttgtcttcagatccttaaccatgcctgcaaactcccttttaccacgtaagatatatgtacagtttgcagggattcgaacaaggacatttttggggacctattattttgcctaccacactaccttagtcattaaagtacaaaaggaagggacagttacaggacctagaaagagctgtagaacaggagccgtgactttaaactaatacaaccactgcccaacagcggccagtcaaggagggagagtaggaataagtaatcagaattctctcttctcctacctaaagtatatctaattggtcaaagcaaatggaaactagtggacagggaaatgcagatagggtgggccagaggtcagccttatggggcacaccatgtggtgaagaactctgaagaatggatccagagaaatgactggaaattatccagaaaacctctccaaaaatcagcataagtggtacaaaagaaagcttctttacttgtaccctacttaacataaatttctgaaataaagaagaaatttagggttttcaaatagatttctatgccatggaaaaagtagtctttaaaagttattacactggaatattacagatccatatattttatattgggtaatctgttcaacctgaagaacttttcaataggctttaaagctataaagcaaatgcctttatacaacactttctgggagttaatgtgggttaatagacatgcccttctggtgagtcctgtggcaagggtgccaattcagtcagtgatttgcaggccacagcaccctcgagctattttcacgaagggtggaccttctgagccaatatttctcatctgttattgcagaacttaaaaagggacagggcttctgagtcactgagagcccaagggtacaattctatactgggttcaaggctgaaaatagcaaaaccacagatctatttctgtaaacacaatgactgtaaggacaactacaacttaatttggacaacttaaactaaagtgactaaagcaaaccatttggaaaacagactagcttagtactgacactctgaacacagcctcttatagtgtacaagactatgactttctcattgacagccttcccatcctcttaaagtcatgggggaaactgagtccttattagggctagattgtgaaccctgttgaacaaaaaagaaggacaattttacacggcacttaaatttagctattctcttctaaacctccattgattctgcatctcccctttcattctttcaatctcttttttttcttcaaaaagacttgatgtcactgtgaagcaatgaagatgtgattcaattcaataagtatgttgagtgcctaccatatgccaagaactgccctatgcattggagatatcttggtaaaaattaatggctcaggccctatccttacagaatttacaatataatgcaaaaagaggtgagaaatgtgaaattcagtgggtggttagtattattaatgcagaggtaaacatctgatcacaaaagcctcacccttccccaaattctgtatatataaatgtatggggtaggcttaagctgatattcttcaattaacattaatagatttatttcttagatatagaaaataaacctataaagtagtggatcgtggggtttctttaggataatacttttttcatttttaaaaattgctagtatctgctagaggattgaatcaggttttttttcattataaatgtcttttcaggtatgtatatgaaattacacaggcaacatgtatttcttttgaaaacacattggttttcaggcatagtgatcttttaccaagggactaaacgatagagaatcttaaagtgctctcagtggtgttttatattaaatagttgacttccctagtttggcattgtggaattagtaccaattattaaagtaataaattcttgctgctaccatgaaagttggggctttcaaacttgtattgatctatgataagcaataattgtacattttaagctaatatacatgcaccatgcatatccatgcatttgcaatatacatacttgatgcaacatttcttgtaaagctatagcttctcaaagtgagggccaaagtttacacttctaaatctttattgcctaacacagtgcctgacccataatagccacttgagagatgaagtttttaaaatacagtttgtcaaatggatgctgctggactattatttgtaaagtttttatttaaaatacccattctatttttttatttttaaggaggaatatatatatataaatatatatacatatatgtgtgtgtatatatatatgtgtgtgtgtgtgtgtgtgtgtgtaatcacaacattctaaagcatcctttcacaaatcttcccccagaagagtaccattaacttgatgaacataatcaaaagtaatcctcagatgttaatgtgagagtatcatcaaaggcagtatctactgaaaatccccatgaaatttaagacaacttactgagatttgttatttagcaattaactatcaatggtaaccaatcaactcaattagttgtggggacaaacaagaaacatatttccttaaatgagattttgccaggtaaaattctaacaagggtcaagactaaaattactttctttcttgataaaaatatggtttggatgtttgttctctacaaatctcatgtggaaatgtgaaccccagtgttggatatggggcctggtaggagactattggatcataaggcaaatgtctcatgaatgctttagcaccatcctcctaatggtaagtgagttctcgctcagctacttcacaaaatatctggttgttgtaaagattctgggacttcctccttctgtatcttgctccatttctcatcatgtggcgtgctgctcctgcttcaccttcttctatgagtgaaagctccctgaggcctcaccagaagccaagcagatatcagcaccatgcttcctgtatagcctgcagaaccatgagccaattaaactcttttccttcatatattacccagcctcaggtattcctttatagcaacacaaaatggactaatacaacaagttagcaattattcgtaattgtcttaacatctttaagccctcactgaacccaatttggaaagtttattgtaattttttgcataatgtcttaatacttaatccaaggtagaaaaataaaaggatgataattttctggt

SEQ ID NO: 8058 - DNA, 3662 bp, Homo sapiens
  source 1..3662: mol_type = unassigned DNA; mol_type = unassigned DNA
acttccactttgacctcatagttaatctgcgtgatagttaatcacgcagagtctctagtgatttttttcctatttattttaaatacacacacccacagggctctgccccctgtaaaagaaaaaaaatcaaaacaaacaaataaataaccccaaagagatggacccaggggagaacgcaaaatgacggtgtggattctgctcctgctgtcgctctaccctggcttcactagccagaaatctgatgatgactatgaagattatgcttctaacaaaacatgggtcttgactccaaaagttcctgagggtgatgtcactgtcatcttaaacaacctgctggaaggatatgacaataaacttcggcctgatataggagtgaagccaacgttaattcacacagacatgtatgtgaatagcattggtccagtgaacgctatcaatatggaatacactattgatatattttttgcgcaaacgtggtatgacagacgtttgaaatttaacagcaccattaaagtcctccgattgaacagcaacatggtggggaaaatctggattccagacactttcttcagaaattccaaaaaagctgatgcacactggatcaccacccccaacaggatgctgagaatttggaatgatggtcgagtgctctacaccctaaggttgacaattgatgctgagtgccaattacaattgcacaactttccaatggatgaacactcctgccccttggagttctccagttatggctatccacgtgaagaaattgtttatcaatggaagcgaagttctgttgaagtgggcgacacaagatcctggaggctttatcaattctcatttgttggtctaagaaataccaccgaagtagtgaagacaacttccggagattatgtggtcatgtctgtctactttgatctgagcagaagaatgggatactttaccatccagacctatatcccctgcacactcattgtcgtcctatcctgggtgtctttctggatcaataaggatgctgttccagccagaacatctttaggtatcaccactgtcctgacaatgaccaccctcagcaccattgcccggaaatcgctccccaaggtctcctatgtcacagcgatggatctctttgtatctgtttgtttcatctttgtcttctctgctctggtggagtatggcaccttgcattattttgtcagcaaccggaaaccaagcaaggacaaagataaaaagaagaaaaaccctgcccctaccattgatatccgcccaagatcagcaaccattcaaatgaataatgctacacaccttcaagagagagatgaagagtacggctatgagtgtctggacggcaaggactgtgccagttttttctgctgttttgaagattgtcgaacaggagcttggagacatgggaggatacatatccgcattgccaaaatggactcctatgctcggatcttcttccccactgccttctgcctgtttaatctggtctattgggtctcctacctctacctgtgaggaggtatgggttttactgatatggttcttattcactgagtctcatggagagatgtctgttctaagtccacttaaataatcctctatgtggttgataatgatctgaatctgtttctatgtccaaacctggtaaattttataatgtcatattgtttgtgcccagccctcctttggttagtgtactttgaacttcgatgtttgctgtgtttcaaacctgcaaggcaaagtaaaattagagcaagaacattcaaaccaaataagatatttttcagctacagcaaataaaacagtgaaagccctgactatttacagtagtggtatccttactagattcataatgcaattagatagaaaaggtccaaaactgtaccctatgttcactccgggtcaagttgtgataaatttgatcccaatagaatacctccctcatttaagaaaaatcataactcactttaaatatgaaagcctagtccagaaatctattacacctttatctcaagataggaagaaaatttcctccacattcatgtacaatgatgtaaatatttcaataacttagaatgcttcaagtttagtgcatgcatctctttagatccaaaataaatggactgaagttatcatcctattgtcttttattttgtgtccttgggctataaaagattcctgaatgtaattataaggatttgggtttggaaatggagggaggaattttcattgccttctccctcatgcatgaagattcgaacagcttattttttccttgtatgacatattacaacactttaagtaaaatatagactggataatcaacatttgccacctctaaatatgcccaatttcataactagagtataaagtaattgtatgtgcttgccgctatttttttcttccttttaggatgatagatcataacagaacttattctccatctcaagatctgcttctagtgattgtgagtgccttgtgggcagaatccttgtcatttcctctttgggtctgtagcaccttgcatagtgcctggcatatagttggtgctcaataaatatggtttgaagtgaattgccctcacatgcttctggcaaatctctgtgctggcctgaaaccagtgactcatcttctcacataggtgttgtcaagtgatatttgattttgtaaaaataaccagtaggatccaaagaactttagctatttatgttcatcttcaaaaaattattttaggcaaagtccatactccttttaaaacaatatttatgtcctatgtttgtgtatagacatgactctactagggcataattagagtttgtgtattatttttccaggtttggggatgagtcagtccttgcccatccacaattttgtttgtgaacttataacaggaataagcaaaattcatacctgactagtgttcagaatgtagcattctgtgcgaaaaagtattgaagattagcttttaaaaactgaaaaaaaaaaatgaatgactcacatagaggttgagccaatgactgtggcctcattagattacattgtagttaaacaaagcaatttctccagacttaaaacatgatgagttgagctctatcttcatgtactcatcctgaatccttatttttctaaaatagcaccctttgttaattatttttatggaaattattactctgtcataattaaatcatagctagtataactttacagataacctaaaaagaatagaaaagaagagagagtggctttgtcagtataaaaccatgtaaagtcatcatcaagtcatctggatgaatcttgaaacacatttagctgccagttttacaaacctttaatatatcagtgctccagtatataacctcaaacaaatgtaaatagaacgaattattttcttgttttgaattgtcaatatattaaatgttgactctttgggagagttgttggcaagtttcaatggtgagaaacattattgtcaacttgaaatgtgttctgtaatggggacactacaaaaagctagctttccaatgtgtgcatagtattggcaatatgaatatatattatatataatctaatacttattataagctgctccctgtctatgtatttggaaaccttttcacaaagggaattgcctaacatgtggacttttacaataaaaatgc

SEQ ID NO: 8059 - DNA, 9960 bp, Homo sapiens
  source 1..9960: mol_type = unassigned DNA; mol_type = unassigned DNA
acttccactttgacctcatagttaatctgcgtgatagttaatcacgcagagtctctagtgatttttttcctatttattttaaatacacacacccacagggctctgccccctgtaaaagaaaaaaaatcaaaacaaacaaataaataaccccaaagagatggacccaggggagaacgcgtaagtgtgaggggcatgagtatacacgagtgtgcgtgtctttccctctcccttatttgtctccgtatgagtctctccttgtaccctccccctgcctcgatgatattactcccccagacttggaagccgctgccagagtgacgctttgatggtatctgcaagcgtttttgctgatcttatctctgccccctgaatattaattccctaatctggtagcaatccatctccccagtgaaggacctactagaggcaggtggggggagccaccatcagatcataagcataagaataatacaaaggggagggattcttctgcaaccaagaggcaagaggcgagagaaggaaaaaaaaaaaagcgatgagttcgccaaatatatggagcacaggaagctcagtctactcgactcctgtattttcacagaaaatgacggtgtggattctgctcctgctgtcgctctaccctggcttcactagccagaaatctgatgatgactatgaagattatgcttctaacaaaacatgggtcttgactccaaaagttcctgagggtgatgtcactgtcatcttaaacaacctgctggaaggatatgacaataaacttcggcctgatataggagtgaagccaacgttaattcacacagacatgtatgtgaatagcattggtccagtgaacgctatcaatatggaatacactattgatatattttttgcgcaaacgtggtatgacagacgtttgaaatttaacagcaccattaaagtcctccgattgaacagcaacatggtggggaaaatctggattccagacactttcttcagaaattccaaaaaagctgatgcacactggatcaccacccccaacaggatgctgagaatttggaatgatggtcgagtgctctacaccctaaggttgacaattgatgctgagtgccaattacaattgcacaactttccaatggatgaacactcctgccccttggagttctccagttatggctatccacgtgaagaaattgtttatcaatggaagcgaagttctgttgaagtgggcgacacaagatcctggaggctttatcaattctcatttgttggtctaagaaataccaccgaagtagtgaagacaacttccggagattatgtggtcatgtctgtctactttgatctgagcagaagaatgggatactttaccatccagacctatatcccctgcacactcattgtcgtcctatcctgggtgtctttctggatcaataaggatgctgttccagccagaacatctttaggtatcaccactgtcctgacaatgaccaccctcagcaccattgcccggaaatcgctccccaaggtctcctatgtcacagcgatggatctctttgtatctgtttgtttcatctttgtcttctctgctctggtggagtatggcaccttgcattattttgtcagcaaccggaaaccaagcaaggacaaagataaaaagaagaaaaaccctgcccctaccattgatatccgcccaagatcagcaaccattcaaatgaataatgctacacaccttcaagagagagatgaagagtacggctatgagtgtctggacggcaaggactgtgccagttttttctgctgttttgaagattgtcgaacaggagcttggagacatgggaggatacatatccgcattgccaaaatggactcctatgctcggatcttcttccccactgccttctgcctgtttaatctggtctattgggtctcctacctctacctgtgaggaggtatgggttttactgatatggttcttattcactgagtctcatggagagatgtctgttctaagtccacttaaataatcctctatgtggttgataatgatctgaatctgtttctatgtccaaacctggtaaattttataatgtcatattgtttgtgcccagccctcctttggttagtgtactttgaacttcgatgtttgctgtgtttcaaacctgcaaggcaaagtaaaattagagcaagaacattcaaaccaaataagatatttttcagctacagcaaataaaacagtgaaagccctgactatttacagtagtggtatccttactagattcataatgcaattagatagaaaaggtccaaaactgtaccctatgttcactccgggtcaagttgtgataaatttgatcccaatagaatacctccctcatttaagaaaaatcataactcactttaaatatgaaagcctagtccagaaatctattacacctttatctcaagataggaagaaaatttcctccacattcatgtacaatgatgtaaatatttcaataacttagaatgcttcaagtttagtgcatgcatctctttagatccaaaataaatggactgaagttatcatcctattgtcttttattttgtgtccttgggctataaaagattcctgaatgtaattataaggatttgggtttggaaatggagggaggaattttcattgccttctccctcatgcatgaagattcgaacagcttattttttccttgtatgacatattacaacactttaagtaaaatatagactggataatcaacatttgccacctctaaatatgcccaatttcataactagagtataaagtaattgtatgtgcttgccgctatttttttcttccttttaggatgatagatcataacagaacttattctccatctcaagatctgcttctagtgattgtgagtgccttgtgggcagaatccttgtcatttcctctttgggtctgtagcaccttgcatagtgcctggcatatagttggtgctcaataaatatggtttgaagtgaattgccctcacatgcttctggcaaatctctgtgctggcctgaaaccagtgactcatcttctcacataggtgttgtcaagtgatatttgattttgtaaaaataaccagtaggatccaaagaactttagctatttatgttcatcttcaaaaaattattttaggcaaagtccatactccttttaaaacaatatttatgtcctatgtttgtgtatagacatgactctactagggcataattagagtttgtgtattatttttccaggtttggggatgagtcagtccttgcccatccacaattttgtttgtgaacttataacaggaataagcaaaattcatacctgactagtgttcagaatgtagcattctgtgcgaaaaagtattgaagattagcttttaaaaactgaaaaaaaaaaatgaatgactcacatagaggttgagccaatgactgtggcctcattagattacattgtagttaaacaaagcaatttctccagacttaaaacatgatgagttgagctctatcttcatgtactcatcctgaatccttatttttctaaaatagcaccctttgttaattatttttatggaaattattactctgtcataattaaatcatagctagtataactttacagataacctaaaaagaatagaaaagaagagagagtggctttgtcagtataaaaccatgtaaagtcatcatcaagtcatctggatgaatcttgaaacacatttagctgccagttttacaaacctttaatatatcagtgctccagtatataacctcaaacaaatgtaaatagaacgaattattttcttgttttgaattgtcaatatattaaatgttgactctttgggagagttgttggcaagtttcaatggtgagaaacattattgtcaacttgaaatgtgttctgtaatggggacactacaaaaagctagctttccaatgtgtgcatagtattggcaatatgaatatatattatatataatctaatacttattataagctgctccctgtctatgtatttggaaaccttttcacaaagggaattgcctaacatgtggacttttacaataaaaatgctgcattctaatccatggtggcatctcagtagtctggtgggactgtttgtcttagagattgtgacctctctttcctgcctcatttccccaaatcccctctcagtgagctttatctgtgagctgtgtgactgtgttttgcatggcggtactcttcacctcaaaaaaattaagagaggcatgtgggttgtagagtgaagaagaaaggcagacatgtaataaagtaagtaaaaattcaagtcttctctacctcaagaatttcggtgtggttaacattaattccagtgccagacaaagttgggatcccagctttactatttaccagttgttagacaattgtcaattcagactttagaatcctccattaaaaataatttatgtatttgtttatttgtttagagatggggtgtccctctgtcactcagtctgaagtatagtggcacagtcatagctcactgaagcctcaaacttctgagctaaagcattcctcctgcctcagcctcctgaatagctggaactacagatgcatgccaccatgcccagctagaagtctccattttagcagctataaattagatataccaatgctaacctatgtagtgacactcaacaaatggtcaaaagctctctccctcacttccgatgccttccatgcactgctgtcatgctcccttcatcctatcaaactagcttccctaatagaatccagcattaggcatataagcctttaagtgactctacatcactctatttttatttttaggaaatatttgcattgcaagtcttttaaactatatgtgggaaatttctgtctcattggaaaaaaacttacacattacattagttatttttaaggccaaagaactgttatttgtaccctcaaaatttacaaacatacaaagttgattagccctactccagagacaatgtcatgttttcttgaactcttttgaaattctcccaggaatataatattatcttcacaacacagctgccctaaccatccttggccccattctcttggcccctcatatcttcctgcatctaatttaatcatctatttctcaccttccaaacctataaaaatatagttttcacttagatgttgtctgctgtctaactcaatgccctgaactttagctgaattcatatctttatatggccttcattccttgcattaagtctcaatattattctgactagtagcaaaaatttttgtctgcaatgaaggtcaaattaagttaacaaaatgatgtggtcttcagggattatgtcaaaaattgctatctctatgctttgtcactatgaatctttgtcaaaggtgtagaatatgggggaatgacgtagaccaagagctcggctatgttttctagtgctcagtgaactgccaaaggtcacacagctagttaatgacagatcagggggtcatctaagcattgctctttccactgtgtctcacagtatttcagaatttagaagtaaaattctggaatactttatctttctgttaatattttaggatctgccaaactgcaggatgctttccttctttgatctaagcctcactttgactcattttattgcaatgagacaggaatttgagaatacctagtaacagagggaagtcaatgggttttgtatttattttattccttctcatgtgaaatgaccaattgatatttaatattacccatactgctttcagaatgctgtttcaaagaaacatctaaacaactccagacctagagttagcctttgtcctttgggatatgtggcagtagacaaccaaaaagtttccatggctaggatctgcaggctcattctttctactatttaagcaaagtggtggggaatgacctaactattatgattctttctaaggttacagattataagccaattgcaaaatccagttgtaactttcttttgccacattttggataataaagaaatagtttcctctaattatggtttgtgtaactaattggaaaagcagaggctcttgctccagattaactaggttcaaatatcagccctgtcaacttttgtctgccttagttttctcacctgaaaaatggagataatattggtgtgtatctcagactttattataaggagaaacttagttaataccaaagaattactggatgctagtaattttcctcagtaaggatataaagtttcagaaaatacagggtacaagaaccatatctactttgcttaaaaatattgatcatcatttgtgaggactctcttttctcataaaaaaaaaagtcactggaccggggatagaaatttcatttaacatctggggatttccaaatattcctatcttgatgatattcagtttcttacgtaaacaagggaatttggcccctttttctccagcagatttttattcgatcacttctctgctatttgctatggcctgatgtgattgattaccatctaacattctgactctattaaactctgtcttatctccatacaggtatcttggctcatttatcttatttccaccctgagacttctctaaaaaagcacaattttcctagaatgtcgtcctctgctcaacagattcaacagtctctaattaaagactctacctggtctgtaaggtcttcccagtttcactaaagttcaatatgctattttcttttatctcttccagttcttgatgtgacttttgaatggcctaatcctaatgtttatcttagctaaatacttacattcatccaatcctctttgtaaacaaacattaaatgtacaatgctgtgacaagaatatattataaataattcactatcaattggcatcttaaatcaggttgtttatcttctatctccatgctctataaatttgcctcgcagtttttttttttctgagacttgtgtgttttatgggtgtggaattaagttcctcatcaaataggttttaattaagcatctatacattcagcttaatataaagttttcagtaaattcatgccatgggcctaatatagggccctgtgagtgcaggaagaggtaaatttcaggtatgctttgccctgaaatgcccataatatgatagaggagtcagaaaagaatacaaataactctaatggagctgcacacaagtagttgtagatagaataagtcatattctaactgtgagtgaagtcagaaaagggtttctctgtataaaaagcattcctctacatgtaaggaggtcccatcactgctcaaaatccccctttctgtaattactaataaaaatcctatagactatttgaaaactatgtacatgtacataacaatattgttcttaatccattagcaagagttagtcactaaaatagtatttatctttctatttttgttttcctccatatgtatttacagctgagggttttttccccacatatatttaaacacacggattagacaggtgaatagaagtatagatatggacatacatctgctttgaagtctcatttttccacactattatatatgtgtgtgtgagtatatttaacataacattttctggctttccattattatatcacaggactgtgtcataatttatttagtcaatcctttatttctgaaaatttgcattatttcttatttttgttgctgtaagtaatattacaaaactgtttttgttgctataagtaatattacaaaaatatttttgtcacaggcatatatatatattcctctattttcatagaatatatccctaaaacatgagctttgctgaattaaaatgtataagcatttaacaattagagtcctgacagaaaacaaatggtatactccaaggagtaattgaagaaaaattaatgaagggttacttacaaagattaggcaaggttaaagtctaccaattataggatggtttagtacaacaggtctagcagttgtcaactgaactagttacctatatccgttgtacaaatttcaatgaactcagtgacttagaacaacaaaaattcattatcataattaatttcagaaggtcagaaatttcagtggctgaagtcaagatgtgagcaaggctgcattccttctgaaggatctaggggagaattaatttcttgacttttccatgttctagagtcctcttgaattccttggcttgtggctcatgttcacctttaaagcaagcaactgcatcactcagtccctttccttcatctttcctctggctctgacctcaagcctcctacttacaaagacccttgagattacattggacccacccaaataatccaagatgatcttgtcttcagatccttaaccatgcctgcaaactcccttttaccacgtaagatatatgtacagtttgcagggattcgaacaaggacatttttggggacctattattttgcctaccacactaccttagtcattaaagtacaaaaggaagggacagttacaggacctagaaagagctgtagaacaggagccgtgactttaaactaatacaaccactgcccaacagcggccagtcaaggagggagagtaggaataagtaatcagaattctctcttctcctacctaaagtatatctaattggtcaaagcaaatggaaactagtggacagggaaatgcagatagggtgggccagaggtcagccttatggggcacaccatgtggtgaagaactctgaagaatggatccagagaaatgactggaaattatccagaaaacctctccaaaaatcagcataagtggtacaaaagaaagcttctttacttgtaccctacttaacataaatttctgaaataaagaagaaatttagggttttcaaatagatttctatgccatggaaaaagtagtctttaaaagttattacactggaatattacagatccatatattttatattgggtaatctgttcaacctgaagaacttttcaataggctttaaagctataaagcaaatgcctttatacaacactttctgggagttaatgtgggttaatagacatgcccttctggtgagtcctgtggcaagggtgccaattcagtcagtgatttgcaggccacagcaccctcgagctattttcacgaagggtggaccttctgagccaatatttctcatctgttattgcagaacttaaaaagggacagggcttctgagtcactgagagcccaagggtacaattctatactgggttcaaggctgaaaatagcaaaaccacagatctatttctgtaaacacaatgactgtaaggacaactacaacttaatttggacaacttaaactaaagtgactaaagcaaaccatttggaaaacagactagcttagtactgacactctgaacacagcctcttatagtgtacaagactatgactttctcattgacagccttcccatcctcttaaagtcatgggggaaactgagtccttattagggctagattgtgaaccctgttgaacaaaaaagaaggacaattttacacggcacttaaatttagctattctcttctaaacctccattgattctgcatctcccctttcattctttcaatctcttttttttcttcaaaaagacttgatgtcactgtgaagcaatgaagatgtgattcaattcaataagtatgttgagtgcctaccatatgccaagaactgccctatgcattggagatatcttggtaaaaattaatggctcaggccctatccttacagaatttacaatataatgcaaaaagaggtgagaaatgtgaaattcagtgggtggttagtattattaatgcagaggtaaacatctgatcacaaaagcctcacccttccccaaattctgtatatataaatgtatggggtaggcttaagctgatattcttcaattaacattaatagatttatttcttagatatagaaaataaacc

SEQ ID NO: 8060 - DNA, 3600 bp, Homo sapiens
  source 1..3600: mol_type = unassigned DNA; mol_type = unassigned DNA
atagttaatctgcgtgatagttaatcacgcagagtctctagtgatttttttcctatttattttaaatacacacacccacagggctctgccccctgtaaaagaaaaaaaatcaaaacaaacaaataaataaccccaaagagatggacccaggggagaacgcaaaatgacggtgtggattctgctcctgctgtcgctctaccctggcttcactagccagaaatctgatgatgactatgaagattatgcttctaacaaaacatgggtcttgactccaaaagttcctgagggtgatgtcactgtcatcttaaacaacctgctggaaggatatgacaataaacttcggcctgatataggagtgaagccaacgttaattcacacagacatgtatgtgaatagcattggtccagtgaacgctatcaatatggaatacactattgatatattttttgcgcaaacgtggtatgacagacgtttgaaatttaacagcaccattaaagtcctccgattgaacagcaacatggtggggaaaatctggattccagacactttcttcagaaattccaaaaaagctgatgcacactggatcaccacccccaacaggatgctgagaatttggaatgatggtcgagtgctctacaccctaaggttgacaattgatgctgagtgccaattacaattgcacaactttccaatggatgaacactcctgccccttggagttctccagttatggctatccacgtgaagaaattgtttatcaatggaagcgaagttctgttgaagtgggcgacacaagatcctggaggctttatcaattctcatttgttggtctaagaaataccaccgaagtagtgaagacaacttccggagattatgtggtcatgtctgtctactttgatctgagcagaagaatgggatactttaccatccagacctatatcccctgcacactcattgtcgtcctatcctgggtgtctttctggatcaataaggatgctgttccagccagaacatctttaggtatcaccactgtcctgacaatgaccaccctcagcaccattgcccggaaatcgctccccaaggtctcctatgtcacagcgatggatctctttgtatctgtttgtttcatctttgtcttctctgctctggtggagtatggcaccttgcattattttgtcagcaaccggaaaccaagcaaggacaaagataaaaagaagaaaaaccctcttcttcggatgttttccttcaaggcccctaccattgatatccgcccaagatcagcaaccattcaaatgaataatgctacacaccttcaagagagagatgaagagtacggctatgagtgtctggacggcaaggactgtgccagttttttctgctgttttgaagattgtcgaacaggagcttggagacatgggaggatacatatccgcattgccaaaatggactcctatgctcggatcttcttccccactgccttctgcctgtttaatctggtctattgggtctcctacctctacctgtgaggaggtatgggttttactgatatggttcttattcactgagtctcatggagagatgtctgttctaagtccacttaaataatcctctatgtggttgataatgatctgaatctgtttctatgtccaaacctggtaaattttataatgtcatattgtttgtgcccagccctcctttggttagtgtactttgaacttcgatgtttgctgtgtttcaaacctgcaaggcaaagtaaaattagagcaagaacattcaaaccaaataagatatttttcagctacagcaaataaaacagtgaaagccctgactatttacagtagtggtatccttactagattcataatgcaattagatagaaaaggtccaaaactgtaccctatgttcactccgggtcaagttgtgataaatttgatcccaatagaatacctccctcatttaagaaaaatcataactcactttaaatatgaaagcctagtccagaaatctattacacctttatctcaagataggaagaaaatttcctccacattcatgtacaatgatgtaaatatttcaataacttagaatgcttcaagtttagtgcatgcatctctttagatccaaaataaatggactgaagttatcatcctattgtcttttattttgtgtccttgggctataaaagattcctgaatgtaattataaggatttgggtttggaaatggagggaggaattttcattgccttctccctcatgcatgaagattcgaacagcttattttttccttgtatgacatattacaacactttaagtaaaatatagactggataatcaacatttgccacctctaaatatgcccaatttcataactagagtataaagtaattgtatgtgcttgccgctatttttttcttccttttaggatgatagatcataacagaacttattctccatctcaagatctgcttctagtgattgtgagtgccttgtgggcagaatccttgtcatttcctctttgggtctgtagcaccttgcatagtgcctggcatatagttggtgctcaataaatatggtttgaagtgaattgccctcacatgcttctggcaaatctctgtgctggcctgaaaccagtgactcatcttctcacataggtgttgtcaagtgatatttgattttgtaaaaataaccagtaggatccaaagaactttagctatttatgttcatcttcaaaaaattattttaggcaaagtccatactccttttaaaacaatatttatgtcctatgtttgtgtatagacatgactctactagggcataattagagtttgtgtattatttttccaggtttggggatgagtcagtccttgcccatccacaattttgtttgtgaacttataacaggaataagcaaaattcatacctgactagtgttcagaatgtagcattctgtgcgaaaaagtattgaagattagcttttaaaaactgaaaaaaaaaaatgaatgactcacatagaggttgagccaatgactgtggcctcattagattacattgtagttaaacaaagcaatttctccagacttaaaacatgatgagttgagctctatcttcatgtactcatcctgaatccttatttttctaaaatagcaccctttgttaattatttttatggaaattattactctgtcataattaaatcatagctagtataactttacagataacctaaaaagaatagaaaagaagagagagtggctttgtcagtataaaaccatgtaaagtcatcatcaagtcatctggatgaatcttgaaacacatttagctgccagttttacaaacctttaatatatcagtgctccagtatataacctcaaacaaatgtaaatagaacgaattattttcttgttttgaattgtcaatatattaaatgttgactctttgggagagttgttggcaagtttcaatggtgagaaacattattgtcaacttgaaatgtgttctgtaatggggacactacaaaaagctagctttccaatgtgtgcatagtattggcaatatgaatatatattatatataatctaatacttattataagctgctccc

SEQ ID NO: 8061 - DNA, 5360 bp, Homo sapiens
  source 1..5360: mol_type = unassigned DNA; mol_type = unassigned DNA
cagagtctctagtgatttttttcctatttattttaaatacacacacccacagggctctgccccctgtaaaagaaaaaaaatcaaaacaaacaaataaataaccccaaagagatggacccaggggagaacgcgtaagtgtgaggggcatgagtatacacgagtgtgcgtgtctttccctctcccttatttgtctccgtatgagtctctccttgtaccctccccctgcctcgatgatattactcccccagacttggaagccgctgccagagtgacgctttgatggtatctgcaagcgtttttgctgatcttatctctgccccctgaatattaattccctaatctggtagcaatccatctccccagtgaaggacctactagaggcaggtggggggagccaccatcagatcataagcataagaataatacaaaggggagggattcttctgcaaccaagaggcaagaggcgagagaaggaaaaaaaaaaaagcgatgagttcgccaaatatatggagcacaggaagctcagtctactcgactcctgtattttcacagaaaatgacggtgtggattctgctcctgctgtcgctctaccctggcttcactagccagaaatctgatgatgactatgaagattatgcttctaacaaaacatgggtcttgactccaaaagttcctgagggtgatgtcactgtcatcttaaacaacctgctggaaggatatgacaataaacttcggcctgatataggagtgaagccaacgttaattcacacagacatgtatgtgaatagcattggtccagtgaacgctatcaatatggaatacactattgatatattttttgcgcaaacgtggtatgacagacgtttgaaatttaacagcaccattaaagtcctccgattgaacagcaacatggtggggaaaatctggattccagacactttcttcagaaattccaaaaaagctgatgcacactggatcaccacccccaacaggatgctgagaatttggaatgatggtcgagtgctctacaccctaaggttgacaattgatgctgagtgccaattacaattgcacaactttccaatggatgaacactcctgccccttggagttctccagttatggctatccacgtgaagaaattgtttatcaatggaagcgaagttctgttgaagtgggcgacacaagatcctggaggctttatcaattctcatttgttggtctaagaaataccaccgaagtagtgaagacaacttccggagattatgtggtcatgtctgtctactttgatctgagcagaagaatgggatactttaccatccagacctatatcccctgcacactcattgtcgtcctatcctgggtgtctttctggatcaataaggatgctgttccagccagaacatctttaggtatcaccactgtcctgacaatgaccaccctcagcaccattgcccggaaatcgctccccaaggtctcctatgtcacagcgatggatctctttgtatctgtttgtttcatctttgtcttctctgctctggtggagtatggcaccttgcattattttgtcagcaaccggaaaccaagcaaggacaaagataaaaagaagaaaaaccctcttcttcggatgttttccttcaaggtataatgtttttggaatggaaattcactgcatgcaactgctaaatttaactattaatgcttacatggtgttttattttgttttatgagtagacatttaagcattctactagagataatatgttggagaaagttctacagacttctagagttgattcagcaactatacactaattcacataggttttaatcttacaccaagcccaaaagctataatccctgtgagatgtcataggtaaagaaggctgctttatccatcaaagccaaaatgagcttcctcttttcagatgaaaatgggattgagtcttactgattacgactaccaagtttgtactcttttaaaactaaaatttaactctgtaaatcttaattcaaaatgtattggttcattactgtttgtaaacttaatgatttctgtttttctgaacactacctgtaagttctgtaagaacaatattctttttgaaaggctttgagttaaaatatccattccttatttccagagtgatccctgagccttttggctctactataatgtgttgcaatgagatttctattcaaatataatagctgattctgagacgttagaatttctgtttagattatgctaaaatgaaatcatccaaattaacattaaatatatcatttagttgcatagaaatttaccaactggtctagcaggaaatttgacaagtagtaaccttcttttctcaatttccattcacatgtaggtaaacattgttgacattcttaagcttatagatggtgaatattagaaaaagaatcatagtcctttaaaacataagccataccattgtggtatacaatcaggaaaattctgtatttatatatattttaacattttctattaacatttaatacatttgctcagagtaatgggttttctatttgcctataactaagcatgacacaatatttgatttcagaattgatgcatttttatttctctgttccactcacatgcagcaccatcaaatgccttcatgtaaccaatgtcacatctaatacttactagaataagattccatgtaatttgatttaaatatttaactttgagttcttttggtgttcaatctccttgctatagctattagcttgatgatattattttcagctgcactgcttaagctcaaaatttgaaatctgcaaatgtgctatctttctaagttcaattttaccattgtagatcatgatgtcatagcaatttcctgagtacccattttcagattcatcatcacattggtgacattgtggaaaaacagcctaggatctctcgagaacaactaactgatccctctccttccctaccctcgtcccaggcccctaccattgatatccgcccaagatcagcaaccattcaaatgaataatgctacacaccttcaagagagagatgaagagtacggctatgagtgtctggacggcaaggactgtgccagttttttctgctgttttgaagattgtcgaacaggagcttggagacatgggaggatacatatccgcattgccaaaatggactcctatgctcggatcttcttccccactgccttctgcctgtttaatctggtctattgggtctcctacctctacctgtgaggaggtatgggttttactgatatggttcttattcactgagtctcatggagagatgtctgttctaagtccacttaaataatcctctatgtggttgataatgatctgaatctgtttctatgtccaaacctggtaaattttataatgtcatattgtttgtgcccagccctcctttggttagtgtactttgaacttcgatgtttgctgtgtttcaaacctgcaaggcaaagtaaaattagagcaagaacattcaaaccaaataagatatttttcagctacagcaaataaaacagtgaaagccctgactatttacagtagtggtatccttactagattcataatgcaattagatagaaaaggtccaaaactgtaccctatgttcactccgggtcaagttgtgataaatttgatcccaatagaatacctccctcatttaagaaaaatcataactcactttaaatatgaaagcctagtccagaaatctattacacctttatctcaagataggaagaaaatttcctccacattcatgtacaatgatgtaaatatttcaataacttagaatgcttcaagtttagtgcatgcatctctttagatccaaaataaatggactgaagttatcatcctattgtcttttattttgtgtccttgggctataaaagattcctgaatgtaattataaggatttgggtttggaaatggagggaggaattttcattgccttctccctcatgcatgaagattcgaacagcttattttttccttgtatgacatattacaacactttaagtaaaatatagactggataatcaacatttgccacctctaaatatgcccaatttcataactagagtataaagtaattgtatgtgcttgccgctatttttttcttccttttaggatgatagatcataacagaacttattctccatctcaagatctgcttctagtgattgtgagtgccttgtgggcagaatccttgtcatttcctctttgggtctgtagcaccttgcatagtgcctggcatatagttggtgctcaataaatatggtttgaagtgaattgccctcacatgcttctggcaaatctctgtgctggcctgaaaccagtgactcatcttctcacataggtgttgtcaagtgatatttgattttgtaaaaataaccagtaggatccaaagaactttagctatttatgttcatcttcaaaaaattattttaggcaaagtccatactccttttaaaacaatatttatgtcctatgtttgtgtatagacatgactctactagggcataattagagtttgtgtattatttttccaggtttggggatgagtcagtccttgcccatccacaattttgtttgtgaacttataacaggaataagcaaaattcatacctgactagtgttcagaatgtagcattctgtgcgaaaaagtattgaagattagcttttaaaaactgaaaaaaaaaaatgaatgactcacatagaggttgagccaatgactgtggcctcattagattacattgtagttaaacaaagcaatttctccagacttaaaacatgatgagttgagctctatcttcatgtactcatcctgaatccttatttttctaaaatagcaccctttgttaattatttttatggaaattattactctgtcataattaaatcatagctagtataactttacagataacctaaaaagaatagaaaagaagagagagtggctttgtcagtataaaaccatgtaaagtcatcatcaagtcatctggatgaatcttgaaacacatttagctgccagttttacaaacctttaatatatcagtgctccagtatataacctcaaacaaatgtaaatagaacgaattattttcttgttttgaattgtcaatatattaaatgttgactctttgggagagttgttggcaagtttcaatggtgagaaacattattgtcaacttgaaatgtgttctgtaatggggacactacaaaaagctagctttccaatgtgtgcatagtattggcaatatgaatatatattatatataatctaatacttattataagctgctccctgtctatgtatttggaaaccttttcacaa

SEQ ID NO: 8062 - DNA, 3086 bp, Homo sapiens
  source 1..3086: mol_type = unassigned DNA; mol_type = unassigned DNA
agtgatttttttcctatttattttaaatacacacacccacagggctctgccccctgtaaaagaaaaaaaatcaaaacaaacaaataaataaccccaaagagatggacccaggggagaacgccttcactagccagaaatctgatgatgactatgaagattatgcttctaacaaaacatgggtcttgactccaaaagttcctgagggtgatgtcactgtcatcttaaacaacctgctggaaggatatgacaataaacttcggcctgatataggagtgaagccaacgttaattcacacagacatgtatgtgaatagcattggtccagtgaacgctatcaatatggaatacactattgatatattttttgcgcaaacgtggtatgacagacgtttgaaatttaacagcaccattaaagtcctccgattgaacagcaacatggtggggaaaatctggattccagacactttcttcagaaattccaaaaaagctgatgcacactggatcaccacccccaacaggatgctgagaatttggaatgatggtcgagtgctctacaccctaaggttgacaattgatgctgagtgccaattacaattgcacaactttccaatggatgaacactcctgccccttggagttctccagttatggctatccacgtgaagaaattgtttatcaatggaagcgaagttctgttgaagtgggcgacacaagatcctggaggctttatcaattctcatttgttggtctaagaaataccaccgaagtagtgaagacaacttccggagattatgtggtcatgtctgtctactttgatctgagcagaagaatgggatactttaccatccagacctatatcccctgcacactcattgtcgtcctatcctgggtgtctttctggatcaataaggatgctgttccagccagaacatctttaggtatcaccactgtcctgacaatgaccaccctcagcaccattgcccggaaatcgctccccaaggtctcctatgtcacagcgatggatctctttgtatctgtttgtttcatctttgtcttctctgctctggtggagtatggcaccttgcattattttgtcagcaaccggaaaccaagcaaggacaaagataaaaagaagaaaaaccctcttcttcggatgttttccttcaaggcccctaccattgatatccgcccaagatcagcaaccattcaaatgaataatgctacacaccttcaagagagagatgaagagtacggctatgagtgtctggacggcaaggactgtgccagttttttctgctgttttgaagattgtcgaacaggagcttggagacatgggaggatacatatccgcattgccaaaatggactcctatgctcggatcttcttccccactgccttctgcctgtttaatctggtctattgggtctcctacctctacctgtgaggaggtatgggttttactgatatggttcttattcactgagtctcatggagagatgtctgttctaagtccacttaaataatcctctatgtggttgataatgatctgaatctgtttctatgtccaaacctggtaaattttataatgtcatattgtttgtgcccagccctcctttggttagtgtactttgaacttcgatgtttgctgtgtttcaaacctgcaaggcaaagtaaaattagagcaagaacattcaaaccaaataagatatttttcagctacagcaaataaaacagtgaaagccctgactatttacagtagtggtatccttactagattcataatgcaattagatagaaaaggtccaaaactgtaccctatgttcactccgggtcaagttgtgataaatttgatcccaatagaatacctccctcatttaagaaaaatcataactcactttaaatatgaaagcctagtccagaaatctattacacctttatctcaagataggaagaaaatttcctccacattcatgtacaatgatgtaaatatttcaataacttagaatgcttcaagtttagtgcatgcatctctttagatccaaaataaatggactgaagttatcatcctattgtcttttattttgtgtccttgggctataaaagattcctgaatgtaattataaggatttgggtttggaaatggagggaggaattttcattgccttctccctcatgcatgaagattcgaacagcttattttttccttgtatgacatattacaacactttaagtaaaatatagactggataatcaacatttgccacctctaaatatgcccaatttcataactagagtataaagtaattgtatgtgcttgccgctatttttttcttccttttaggatgatagatcataacagaacttattctccatctcaagatctgcttctagtgattgtgagtgccttgtgggcagaatccttgtcatttcctctttgggtctgtagcaccttgcatagtgcctggcatatagttggtgctcaataaatatggtttgaagtgaattgccctcacatgcttctggcaaatctctgtgctggcctgaaaccagtgactcatcttctcacataggtgttgtcaagtgatatttgattttgtaaaaataaccagtaggatccaaagaactttagctatttatgttcatcttcaaaaaattattttaggcaaagtccatactccttttaaaacaatatttatgtcctatgtttgtgtatagacatgactctactagggcataattagagtttgtgtattatttttccaggtttggggatgagtcagtccttgcccatccacaattttgtttgtgaacttataacaggaataagcaaaattcatacctgactagtgttcagaatgtagcattctgtgcgaaaaagtattgaagattagcttttaaaaactgaaaaaaaaaaatgaatgactcacatagaggttgagccaatgactgtggcctcattagattacattgtagttaaacaaagcaatttctccagacttaaaacatgatgagttgagctctatcttcatgtactcatcctgaatccttatttttctaaaatagcaccctttgttaattatttttatgg

SEQ ID NO: 8063 - DNA, 7669 bp, Homo sapiens
  source 1..7669: mol_type = unassigned DNA; mol_type = unassigned DNA
ggggagaacgcgtaagtgtgaggggcatgagtatacacgagtgtgcgtgtctttccctctcccttatttgtctccgtatgagtctctccttgtaccctccccctgcctcgatgatattactcccccagacttggaagccgctgccagagtgacgctttgatggtatctgcaagcgtttttgctgatcttatctctgccccctgaatattaattccctaatctggtagcaatccatctccccagtgaaggacctactagaggcaggtggggggagccaccatcagatcataagcataagaataatacaaaggggagggattcttctgcaaccaagaggcaagaggcgagagaaggaaaaaaaaaaaagcgatgagttcgccaaatatatggagcacaggaagctcagtctactcgactcctgtattttcacagaaaatgacggtgtggattctgctcctgctgtcgctctaccctggcttcactagccagaaatctgatgatgactatgaagattatgcttctaacaaaacatgggtcttgactccaaaagttcctgagggtgatgtcactgtcatcttaaacaacctgctggaaggatatgacaataaacttcggcctgatataggagtgaagccaacgttaattcacacagacatgtatgtgaatagcattggtccagtgaacgctatcaatatggaatacactattgatatattttttgcgcaaacgtggtatgacagacgtttgaaatttaacagcaccattaaagtcctccgattgaacagcaacatggtggggaaaatctggattccagacactttcttcagaaattccaaaaaagctgatgcacactggatcaccacccccaacaggatgctgagaatttggaatgatggtcgagtgctctacaccctaaggttgacaattgatgctgagtgccaattacaattgcacaactttccaatggatgaacactcctgccccttggagttctccagttatggctatccacgtgaagaaattgtttatcaatggaagcgaagttctgttgaagtgggcgacacaagatcctggaggctttatcaattctcatttgttggtctaagaaataccaccgaagtagtgaagacaacttccggagattatgtggtcatgtctgtctactttgatctgagcagaagaatgggatactttaccatccagacctatatcccctgcacactcattgtcgtcctatcctgggtgtctttctggatcaataaggatgctgttccagccagaacatctttaggtatcaccactgtcctgacaatgaccaccctcagcaccattgcccggaaatcgctccccaaggtctcctatgtcacagcgatggatctctttgtatctgtttgtttcatctttgtcttctctgctctggtggagtatggcaccttgcattattttgtcagcaaccggaaaccaagcaaggacaaagataaaaagaagaaaaaccctgtatgtatcattttccattggcaccattgaaatttttatgatttcggtttagtttgttttcattagcctatctgcaggctaaggctcagcagtttgggctccaagatgaaaacagcatgtatgagtttagccaggccataacgattcatttacagtcattagttacttgagagagactcaagtctgtttctattttctgtgtcagagttcttatgcaaatataattacctgctctctttattttgtggagactaaagccatttttgagaaatgtgaccttcttcttgttgctattattccaggtttcactgattttttgagatggagtgtcactctgttgctcaggctggagtgcagtggcgggatctcggcttactgcaacctctgcctcctaggttcaagcaattctcctgcctcagccccctgagtagctgggactataggcacacgccaccatgcctggttaatttttgtatttttagtacagacggggtttcaccatattggtcaggctggtctcgaactcctgacctcaggtgatccacctgtctcggcctcccaaagtgctgggattagatgcgtgagccactgcgcctggccatgataatattattaaatcactgatattttaaattaaaacttccatctcaggcattccactaggaagctataaggtccttgaagtttcaaggctgactacatttttgcaaatgatttagtgtgtgtatggaggtggaatgtgggtattgtcaccagataatttctattgatttcattctcgaaatgtatctttttgtttttaaaacaaatgatttactattatatgggcaagttagttagcctccttgtgtgttttatatatatatatgtagtgtattatttaaaaacacttgtcttatggggctcctatgagaaataaatgtggcaatgaagggcaaaacaaaaaatcccaaaatattacatagtactctacacatgaatgtacttaacattagtagttggtgatgatagttgattttgatgatttatacagtttccagcctggattgacttcagtgccacaatttgaaaacagggaggatgacttctacttgcaaccaaactttaaatagtgaggatgaagcataaacacaaatgcctaaagcaactgttttttattgtgagtgttgaggagagcacatagttacccatttacacacctgaacaaagtggctggctcatagaaatccccatgaaagttaaggtccattcccttccaagatatgggcaaagagaatcacctgacaatcctggatcatggccttctgctttgagagccgtaataacgctctacctatccaacccagagactttggaggttgaattgtaaggaaggaatttagctgattctaggttgtattctgatgcagctgcagaaacccaagtgaaatactacaagagtaatgtgtttatttgaatgtaagactttggaacatggaaagaaagaaacatcattattcttgatttaaaaaatgctttctttaattgctcaaatatttacaatgctttatgcagtccttcccttccctgtctgttttgcctctctctgactttccattttctctatccttgttttattttccttgttgtgttgtttttgtttgctccctcttgttcactttccatttcactctccctcaagaaggtggttctattgagagttggcatattacctgccagctataacaaggacatgaggactggctttcaaacaagttctgatgagtcctttggaaaaagccccttggccctctctgtcagctacgccattgcagagtagattttgttgcaaagatagaggcagattcccttattcagggtcatggaaatggcagaagaagaaaaggcagaggagaacaggataaaaatttgagaaaatgaaattacctgagaatttcatgcacttctttttaggcaattagatgattcatcagaactagcaagaaaataaactaggaatgagaagctgaaagtttattttcctgtttaatatgccttttggataattgtgtcaagactcacctattaagttatccgtgatgataattagaaaatagaatcatagtatttttaaacaggggaaccaggcaatagaaaacttccttgcaattgaacaactctggcttcttcagtcaagtaattgtagattaatttattaaaaatttcactagtaattacaaaattacacttaactttaagcaaatactttatcccaagctcagaactctccttctgtgtttataatttcagttcatttcacttactgtgttttcaaaatgtatttttaatttatcttgtctctctctttttttttcattttttttctcctttttattaaaaacaaatgcaattctcttttctgtctacaaacccaaagcttcttcggatgttttccttcaaggtataatgtttttggaatggaaattcactgcatgcaactgctaaatttaactattaatgcttacatggtgttttattttgttttatgagtagacatttaagcattctactagagataatatgttggagaaagttctacagacttctagagttgattcagcaactatacactaattcacataggttttaatcttacaccaagcccaaaagctataatccctgtgagatgtcataggtaaagaaggctgctttatccatcaaagccaaaatgagcttcctcttttcagatgaaaatgggattgagtcttactgattacgactaccaagtttgtactcttttaaaactaaaatttaactctgtaaatcttaattcaaaatgtattggttcattactgtttgtaaacttaatgatttctgtttttctgaacactacctgtaagttctgtaagaacaatattctttttgaaaggctttgagttaaaatatccattccttatttccagagtgatccctgagccttttggctctactataatgtgttgcaatgagatttctattcaaatataatagctgattctgagacgttagaatttctgtttagattatgctaaaatgaaatcatccaaattaacattaaatatatcatttagttgcatagaaatttaccaactggtctagcaggaaatttgacaagtagtaaccttcttttctcaatttccattcacatgtaggtaaacattgttgacattcttaagcttatagatggtgaatattagaaaaagaatcatagtcctttaaaacataagccataccattgtggtatacaatcaggaaaattctgtatttatatatattttaacattttctattaacatttaatacatttgctcagagtaatgggttttctatttgcctataactaagcatgacacaatatttgatttcagaattgatgcatttttatttctctgttccactcacatgcagcaccatcaaatgccttcatgtaaccaatgtcacatctaatacttactagaataagattccatgtaatttgatttaaatatttaactttgagttcttttggtgttcaatctccttgctatagctattagcttgatgatattattttcagctgcactgcttaagctcaaaatttgaaatctgcaaatgtgctatctttctaagttcaattttaccattgtagatcatgatgtcatagcaatttcctgagtacccattttcagattcatcatcacattggtgacattgtggaaaaacagcctaggatctctcgagaacaactaactgatccctctccttccctaccctcgtcccaggcccctaccattgatatccgcccaagatcagcaaccattcaaatgaataatgctacacaccttcaagagagagatgaagagtacggctatgagtgtctggacggcaaggactgtgccagttttttctgctgttttgaagattgtcgaacaggagcttggagacatgggaggatacatatccgcattgccaaaatggactcctatgctcggatcttcttccccactgccttctgcctgtttaatctggtctattgggtctcctacctctacctgtgaggaggtatgggttttactgatatggttcttattcactgagtctcatggagagatgtctgttctaagtccacttaaataatcctctatgtggttgataatgatctgaatctgtttctatgtccaaacctggtaaattttataatgtcatattgtttgtgcccagccctcctttggttagtgtactttgaacttcgatgtttgctgtgtttcaaacctgcaaggcaaagtaaaattagagcaagaacattcaaaccaaataagatatttttcagctacagcaaataaaacagtgaaagccctgactatttacagtagtggtatccttactagattcataatgcaattagatagaaaaggtccaaaactgtaccctatgttcactccgggtcaagttgtgataaatttgatcccaatagaatacctccctcatttaagaaaaatcataactcactttaaatatgaaagcctagtccagaaatctattacacctttatctcaagataggaagaaaatttcctccacattcatgtacaatgatgtaaatatttcaataacttagaatgcttcaagtttagtgcatgcatctctttagatccaaaataaatggactgaagttatcatcctattgtcttttattttgtgtccttgggctataaaagattcctgaatgtaattataaggatttgggtttggaaatggagggaggaattttcattgccttctccctcatgcatgaagattcgaacagcttattttttccttgtatgacatattacaacactttaagtaaaatatagactggataatcaacatttgccacctctaaatatgcccaatttcataactagagtataaagtaattgtatgtgcttgccgctatttttttcttccttttaggatgatagatcataacagaacttattctccatctcaagatctgcttctagtgattgtgagtgccttgtgggcagaatccttgtcatttcctctttgggtctgtagcaccttgcatagtgcctggcatatagttggtgctcaataaatatggtttgaagtgaattgccctcacatgcttctggcaaatctctgtgctggcctgaaaccagtgactcatcttctcacataggtgttgtcaagtgatatttgattttgtaaaaataaccagtaggatccaaagaactttagctatttatgttcatcttcaaaaaattattttaggcaaagtccatactccttttaaaacaatatttatgtcctatgtttgtgtatagacatgactctactagggcataattagagtttgtgtattatttttccaggtttggggatgagtcagtccttgcccatccacaattttgtttgtgaacttataacaggaataagcaaaattcatacctgactagtgttcagaatgtagcattctgtgcgaaaaagtattgaagattagcttttaaaaactgaaaaaaaaaaatgaatgactcacatagaggttgagccaatgactgtggcctcattagattacattgtagttaaacaaagcaatttctccagacttaaaacatgatgagttgagctctatcttcatgtactcatcctgaatccttatttttctaaaatagcaccctttgttaattatttttatggaaattattactctgtcataattaaatcatagctagtataactttacagataacctaaaaagaatagaaaagaagagagagtggctttgtcagtataaaaccatgtaaagtcatcatcaagtcatctggatgaatcttgaaacacatttagctgccagttttacaaacctttaatatatcagtgctccagtatataacctcaaacaaatgtaaatagaacgaattattttcttgttttgaattgtcaatatattaaatgttgactctttgggagagttgttggcaagtttcaatggtgagaaacattattgtcaacttgaaatgtgttctgtaatggggacactacaaaaagctagctttccaatgtgtgcatagtattggcaatatgaatatatattatatataatctaatacttattataagctgctccctgtctatgtatttggaaaccttttcacaaagggaattgccta

SEQ ID NO: 8064 - DNA, 2827 bp, Homo sapiens
  source 1..2827: mol_type = unassigned DNA; mol_type = unassigned DNA
gccagagtgacgctttgatggtatctgcaagcgtttttgctgatcttatctctgccccctgaatattaattccctaatctggtagcaatccatctccccagtgaaggacctactagaggcaggtggggggagccaccatcagatcataagcataagaataatacaaaggggagggattcttctgcaaccaagaggcaagaggcgagagaaggaaaaaaaaaaaagcgatgagttcgccaaatatatggagcacaggaagctcagtctactcgactcctgtattttcacagaaaatgacggtgtggattctgctcctgctgtcgctctaccctgggagattatgtggtcatgtctgtctactttgatctgagcagaagaatgggatactttaccatccagacctatatcccctgcacactcattgtcgtcctatcctgggtgtctttctggatcaataaggatgctgttccagccagaacatctttaggtatcaccactgtcctgacaatgaccaccctcagcaccattgcccggaaatcgctccccaaggtctcctatgtcacagcgatggatctctttgtatctgtttgtttcatctttgtcttctctgctctggtggagtatggcaccttgcattattttgtcagcaaccggaaaccaagcaaggacaaagataaaaagaagaaaaaccctcttcttcggatgttttccttcaaggcccctaccattgatatccgcccaagatcagcaaccattcaaatgaataatgctacacaccttcaagagagagatgaagagtacggctatgagtgtctggacggcaaggactgtgccagttttttctgctgttttgaagattgtcgaacaggagcttggagacatgggaggatacatatccgcattgccaaaatggactcctatgctcggatcttcttccccactgccttctgcctgtttaatctggtctattgggtctcctacctctacctgtgaggaggtatgggttttactgatatggttcttattcactgagtctcatggagagatgtctgttctaagtccacttaaataatcctctatgtggttgataatgatctgaatctgtttctatgtccaaacctggtaaattttataatgtcatattgtttgtgcccagccctcctttggttagtgtactttgaacttcgatgtttgctgtgtttcaaacctgcaaggcaaagtaaaattagagcaagaacattcaaaccaaataagatatttttcagctacagcaaataaaacagtgaaagccctgactatttacagtagtggtatccttactagattcataatgcaattagatagaaaaggtccaaaactgtaccctatgttcactccgggtcaagttgtgataaatttgatcccaatagaatacctccctcatttaagaaaaatcataactcactttaaatatgaaagcctagtccagaaatctattacacctttatctcaagataggaagaaaatttcctccacattcatgtacaatgatgtaaatatttcaataacttagaatgcttcaagtttagtgcatgcatctctttagatccaaaataaatggactgaagttatcatcctattgtcttttattttgtgtccttgggctataaaagattcctgaatgtaattataaggatttgggtttggaaatggagggaggaattttcattgccttctccctcatgcatgaagattcgaacagcttattttttccttgtatgacatattacaacactttaagtaaaatatagactggataatcaacatttgccacctctaaatatgcccaatttcataactagagtataaagtaattgtatgtgcttgccgctatttttttcttccttttaggatgatagatcataacagaacttattctccatctcaagatctgcttctagtgattgtgagtgccttgtgggcagaatccttgtcatttcctctttgggtctgtagcaccttgcatagtgcctggcatatagttggtgctcaataaatatggtttgaagtgaattgccctcacatgcttctggcaaatctctgtgctggcctgaaaccagtgactcatcttctcacataggtgttgtcaagtgatatttgattttgtaaaaataaccagtaggatccaaagaactttagctatttatgttcatcttcaaaaaattattttaggcaaagtccatactccttttaaaacaatatttatgtcctatgtttgtgtatagacatgactctactagggcataattagagtttgtgtattatttttccaggtttggggatgagtcagtccttgcccatccacaattttgtttgtgaacttataacaggaataagcaaaattcatacctgactagtgttcagaatgtagcattctgtgcgaaaaagtattgaagattagcttttaaaaactgaaaaaaaaaaatgaatgactcacatagaggttgagccaatgactgtggcctcattagattacattgtagttaaacaaagcaatttctccagacttaaaacatgatgagttgagctctatcttcatgtactcatcctgaatccttatttttctaaaatagcaccctttgttaattatttttatggaaattattactctgtcataattaaatcatagctagtataactttacagataacctaaaaagaatagaaaagaagagagagtggctttgtcagtataaaaccatgtaaagtcatcatcaagtcatctggatgaatcttgaaacacatttagctgccagttttacaaacctttaatatatcagtgctccagt

SEQ ID NO: 8065 - DNA, 3927 bp, Homo sapiens
  source 1..3927: mol_type = unassigned DNA; mol_type = unassigned DNA
cagagtgacgctttgatggtatctgcaagcgtttttgctgatcttatctctgccccctgaatattaattccctaatctggtagcaatccatctccccagtgaaggacctactagaggcaggtggggggagccaccatcagatcataagcataagaataatacaaaggggagggattcttctgcaaccaagaggcaagaggcgagagaaggaaaaaaaaaaaagcgatgagttcgccaaatatatggagcacaggaagctcagtctactcgactcctgtattttcacagaaaatgacggtgtggattctgctcctgctgtcgctctaccctggcttcactagccagaaatctgatgatgactatgaagattatgcttctaacaaaacatgggtcttgactccaaaagttcctgagggtgatgtcactgtcatcttaaacaacctgctggaaggatatgacaataaacttcggcctgatataggagtgaagccaacgttaattcacacagacatgtatgtgaatagcattggtccagtgaacgctatcaatatggaatacactattgatatattttttgcgcaaacgtggtatgacagacgtttgaaatttaacagcaccattaaagtcctccgattgaacagcaacatggtggggaaaatctggattccagacactttcttcagaaattccaaaaaagctgatgcacactggatcaccacccccaacaggatgctgagaatttggaatgatggtcgagtgctctacaccctaaggttgacaattgatgctgagtgccaattacaattgcacaactttccaatggatgaacactcctgccccttggagttctccagttggtctcgttctattgcccaggctggaatgtgcagtggtgtgatctcggctcactacagccttcgcttctggggctcaactgatcctcccaccttggcctccagagtagctgggatttcagatggctatccacgtgaagaaattgtttatcaatggaagcgaagttctgttgaagtgggcgacacaagatcctggaggctttatcaattctcatttgttggtctaagaaataccaccgaagtagtgaagacaacttccggagattatgtggtcatgtctgtctactttgatctgagcagaagaatgggatactttaccatccagacctatatcccctgcacactcattgtcgtcctatcctgggtgtctttctggatcaataaggatgctgttccagccagaacatctttaggtatcaccactgtcctgacaatgaccaccctcagcaccattgcccggaaatcgctccccaaggtctcctatgtcacagcgatggatctctttgtatctgtttgtttcatctttgtcttctctgctctggtggagtatggcaccttgcattattttgtcagcaaccggaaaccaagcaaggacaaagataaaaagaagaaaaaccctcttcttcggatgttttccttcaaggcccctaccattgatatccgcccaagatcagcaaccattcaaatgaataatgctacacaccttcaagagagagatgaagagtacggctatgagtgtctggacggcaaggactgtgccagttttttctgctgttttgaagattgtcgaacaggagcttggagacatgggaggatacatatccgcattgccaaaatggactcctatgctcggatcttcttccccactgccttctgcctgtttaatctggtctattgggtctcctacctctacctgtgaggaggtatgggttttactgatatggttcttattcactgagtctcatggagagatgtctgttctaagtccacttaaataatcctctatgtggttgataatgatctgaatctgtttctatgtccaaacctggtaaattttataatgtcatattgtttgtgcccagccctcctttggttagtgtactttgaacttcgatgtttgctgtgtttcaaacctgcaaggcaaagtaaaattagagcaagaacattcaaaccaaataagatatttttcagctacagcaaataaaacagtgaaagccctgactatttacagtagtggtatccttactagattcataatgcaattagatagaaaaggtccaaaactgtaccctatgttcactccgggtcaagttgtgataaatttgatcccaatagaatacctccctcatttaagaaaaatcataactcactttaaatatgaaagcctagtccagaaatctattacacctttatctcaagataggaagaaaatttcctccacattcatgtacaatgatgtaaatatttcaataacttagaatgcttcaagtttagtgcatgcatctctttagatccaaaataaatggactgaagttatcatcctattgtcttttattttgtgtccttgggctataaaagattcctgaatgtaattataaggatttgggtttggaaatggagggaggaattttcattgccttctccctcatgcatgaagattcgaacagcttattttttccttgtatgacatattacaacactttaagtaaaatatagactggataatcaacatttgccacctctaaatatgcccaatttcataactagagtataaagtaattgtatgtgcttgccgctatttttttcttccttttaggatgatagatcataacagaacttattctccatctcaagatctgcttctagtgattgtgagtgccttgtgggcagaatccttgtcatttcctctttgggtctgtagcaccttgcatagtgcctggcatatagttggtgctcaataaatatggtttgaagtgaattgccctcacatgcttctggcaaatctctgtgctggcctgaaaccagtgactcatcttctcacataggtgttgtcaagtgatatttgattttgtaaaaataaccagtaggatccaaagaactttagctatttatgttcatcttcaaaaaattattttaggcaaagtccatactccttttaaaacaatatttatgtcctatgtttgtgtatagacatgactctactagggcataattagagtttgtgtattatttttccaggtttggggatgagtcagtccttgcccatccacaattttgtttgtgaacttataacaggaataagcaaaattcatacctgactagtgttcagaatgtagcattctgtgcgaaaaagtattgaagattagcttttaaaaactgaaaaaaaaaaatgaatgactcacatagaggttgagccaatgactgtggcctcattagattacattgtagttaaacaaagcaatttctccagacttaaaacatgatgagttgagctctatcttcatgtactcatcctgaatccttatttttctaaaatagcaccctttgttaattatttttatggaaattattactctgtcataattaaatcatagctagtataactttacagataacctaaaaagaatagaaaagaagagagagtggctttgtcagtataaaaccatgtaaagtcatcatcaagtcatctggatgaatcttgaaacacatttagctgccagttttacaaacctttaatatatcagtgctccagtatataacctcaaacaaatgtaaatagaacgaattattttcttgttttgaattgtcaatatattaaatgttgactctttgggagagttgttggcaagtttcaatggtgagaaacattattgtcaacttgaaatgtgttctgtaatggggacactacaaaaagctagctttccaatgtgtgcatagtattggcaatatgaatatatattatatataatctaatacttattataagctgctccctgtctatgtatttggaaaccttttcacaaagggaattgcctaacatgtggacttttacaataaaaatgctgcattctaa

SEQ ID NO: 8066 - DNA, 1264 bp, Homo sapiens
  source 1..1264: mol_type = unassigned DNA; mol_type = unassigned DNA
agagtgacgctttgatggtatctgcaagcgtttttgctgatcttatctctgccccctgaatattaattccctaatctggtagcaatccatctccccagtgaaggacctactagaggcaggtggggggagccaccatcagatcataagcataagaataatacaaaggggagggattcttctgcaaccaagaggcaagaggcgagagaaggaaaaaaaaaaaagcgatgagttcgccaaatatatggagcacaggaagctcagtctactcgactcctgtattttcacagaaaatgacggtgtggattctgctcctgctgtcgctctaccctggcttcactagccagaaatctgatgatgactatgaagattatgcttctaacaaaacatgggtcttgactccaaaagttcctgagggtgatgtcactgtcatcttaaacaacctgctggaaggatatgacaataaacttcggcctgatataggaggtttgttaaagtcttttgcgttgtgctatagataggagcacataaacatgtctactttaatagataaaacatcagtgtagttcaagagcaaggaagatttaaattatacttttttatatgttgtaaaagtagtgtttaaatagcattcaggcctatgagtgggagaggtgtcaatacattcaaaatgaagaaatattattttcaagtgaagcttgagagctagagttagaaattcacatattgctagatatctcagatagaagctgtaggaaaaaaaaaacaatgacccctttatgaagcaacataaacaaatcaaacaagacaataacagtaaagagaggatatattgtttgcctgtttttgtgtaacaaacaaccagaaaatctcaatgacatatgacagtaaacatgtatataatactcccctcagagatatactaatctatgctaaagcaagctggagctgcttatttagggcaactgtactttacgtgttcctcgttctactcttgggaccagcaggtagctaggacaacccttctcacagtggtagaaaacagccagagagtaagtagaagctcatgaggctgaatgcttaggcctagcactggcacactcgcttttgtatatatattattagccgaagccaatcagatgatccagcccaaagtcgagaggcagaggaatagccttatccaggagaaggcaaggatgtgaatgccggttatagagaattcagtccaccacagtgagttaggacatgacactttcaaggaaaaaaa

SEQ ID NO: 8067 - DNA, 2145 bp, Homo sapiens
  source 1..2145: mol_type = unassigned DNA; mol_type = unassigned DNA
tgaaggacctactagaggcaggtggggggagccaccatcagatcataagcataagaataatacaaaggggagggattcttctgcaaccaagaggcaagaggcgagagaaggaaaaaaaaaaaagcgatgagttcgccaaatatatggagcacaggaagctcagtctactcgactcctgtattttcacagaaaatgacggtgtggattctgctcctgctgtcgctctaccctggcttcactagccagaaatctgatgatgactatgaagattatgcttctaacaaaacatgggtcttgactccaaaagttcctgagggtgatgtcactgtcatcttaaacaacctgctggaaggatatgacaataaacttcggcctgatataggagtgaagccaacgttaattcacacagacatgtatgtgaatagcattggtccagtgaacgctatcaatatgcaccattaaagtcctccgattgaacagcaacatggtggggaaaatctggattccagacactttcttcagaaattccaaaaaagctgatgcacactggatcaccacccccaacaggatgctgagaatttggaatgatggtcgagtgctctacaccctaaggttgacaattgatgctgagtgccaattacaattgcacaactttccaatggatgaacactcctgccccttggagttctccagttatggctatccacgtgaagaaattgtttatcaatggaagcgaagttctgttgaagtgggcgacacaagatcctggaggctttatcaattctcatttgttggtctaagaaataccaccgaagtagtgaagacaacttccggagattatgtggtcatgtctgtctactttgatctgagcagaagaatgggatactttaccatccagacctatatcccctgcacactcattgtcgtcctatcctgggtgtctttctggatcaataaggatgctgttccagccagaacatctttaggtatcaccactgtcctgacaatgaccaccctcagcaccattgcccggaaatcgctccccaaggtctcctatgtcacagcgatggatctctttgtatctgtttgtttcatctttgtcttctctgctctggtggagtatggcaccttgcattattttgtcagcaaccggaaaccaagcaaggacaaagataaaaagaagaaaaaccctgcccctaccattgatatccgcccaagatcagcaaccattcaaatgaataatgctacacaccttcaagagagagatgaagagtacggctatgagtgtctggacggcaaggactgtgccagttttttctgctgttttgaagattgtcgaacaggagcttggagacatgggaggatacatatccgcattgccaaaatggactcctatgctcggatcttcttccccactgccttctgcctgtttaatctggtctattgggtctcctacctctacctgtgaggaggtatgggttttactgatatggttcttattcactgagtctcatggagagatgtctgttctaagtccacttaaataatcctctatgtggttgataatgatctgaatctgtttctatgtccaaacctggtaaattttataatgtcatattgtttgtgcccagccctcctttggttagtgtactttgaacttcgatgtttgctgtgtttcaaacctgcaaggcaaagtaaaattagagcaagaacattcaaaccaaataagatatttttcagctacagcaaataaaacagtgaaagccctgactatttacagtagtggtatccttactagattcataatgcaattagatagaaaaggtccaaaactgtaccctatgttcactccgggtcaagttgtgataaatttgatcccaatagaatacctccctcatttaagaaaaatcataactcactttaaatatgaaagcctagtccagaaatctattacacctttatctcaagataggaagaaaatttcctccacattcatgtacaatgatgtaaatatttcaataacttagaatgcttcaagtttagtgcatgcatctctttagatccaaaataaatggactgaagttatcatcctattgtcttttattttgtgtccttgggctataaaagattcctgaatgtaattat

SEQ ID NO: 8068 - DNA, 3767 bp, Homo sapiens
  source 1..3767: mol_type = unassigned DNA; mol_type = unassigned DNA
tgaaggacctactagaggcaggtggggggagccaccatcagatcataagcataagaataatacaaaggggagggattcttctgcaaccaagaggcaagaggcgagagaaggaaaaaaaaaaaagcgatgagttcgccaaatatatggagcacaggaagctcagtctactcgactcctgtattttcacagaaaatgacggtgtggattctgctcctgctgtcgctctaccctggcttcactagccagaaatctgatgatgactatgaagattatgcttctaacaaaacatgggtcttgactccaaaagttcctgagggtgatgtcactgtcatcttaaacaacctgctggaaggatatgacaataaacttcggcctgatataggagtgaagccaacgttaattcacacagacatgtatgtgaatagcattggtccagtgaacgctatcaatatggaatacactattgatatattttttgcgcaaacgtggtatgacagacgtttgaaatttaacagcaccattaaagtcctccgattgaacagcaacatggtggggaaaatctggattccagacactttcttcagaaattccaaaaaagctgatgcacactggatcaccacccccaacaggatgctgagaatttggaatgatggtcgagtgctctacaccctaaggttgacaattgatgctgagtgccaattacaattgcacaactttccaatggatgaacactcctgccccttggagttctccagttggtctcgttctattgcccaggctggaatgtgcagtggtgtgatctcggctcactacagccttcgcttctggggctcaactgatcctcccaccttggcctccagagtagctgggatttcagatggctatccacgtgaagaaattgtttatcaatggaagcgaagttctgttgaagtgggcgacacaagatcctggaggctttatcaattctcatttgttggtctaagaaataccaccgaagtagtgaagacaacttccggagattatgtggtcatgtctgtctactttgatctgagcagaagaatgggatactttaccatccagacctatatcccctgcacactcattgtcgtcctatcctgggtgtctttctggatcaataaggatgctgttccagccagaacatctttaggtatcaccactgtcctgacaatgaccaccctcagcaccattgcccggaaatcgctccccaaggtctcctatgtcacagcgatggatctctttgtatctgtttgtttcatctttgtcttctctgctctggtggagtatggcaccttgcattattttgtcagcaaccggaaaccaagcaaggacaaagataaaaagaagaaaaaccctgcccctaccattgatatccgcccaagatcagcaaccattcaaatgaataatgctacacaccttcaagagagagatgaagagtacggctatgagtgtctggacggcaaggactgtgccagttttttctgctgttttgaagattgtcgaacaggagcttggagacatgggaggatacatatccgcattgccaaaatggactcctatgctcggatcttcttccccactgccttctgcctgtttaatctggtctattgggtctcctacctctacctgtgaggaggtatgggttttactgatatggttcttattcactgagtctcatggagagatgtctgttctaagtccacttaaataatcctctatgtggttgataatgatctgaatctgtttctatgtccaaacctggtaaattttataatgtcatattgtttgtgcccagccctcctttggttagtgtactttgaacttcgatgtttgctgtgtttcaaacctgcaaggcaaagtaaaattagagcaagaacattcaaaccaaataagatatttttcagctacagcaaataaaacagtgaaagccctgactatttacagtagtggtatccttactagattcataatgcaattagatagaaaaggtccaaaactgtaccctatgttcactccgggtcaagttgtgataaatttgatcccaatagaatacctccctcatttaagaaaaatcataactcactttaaatatgaaagcctagtccagaaatctattacacctttatctcaagataggaagaaaatttcctccacattcatgtacaatgatgtaaatatttcaataacttagaatgcttcaagtttagtgcatgcatctctttagatccaaaataaatggactgaagttatcatcctattgtcttttattttgtgtccttgggctataaaagattcctgaatgtaattataaggatttgggtttggaaatggagggaggaattttcattgccttctccctcatgcatgaagattcgaacagcttattttttccttgtatgacatattacaacactttaagtaaaatatagactggataatcaacatttgccacctctaaatatgcccaatttcataactagagtataaagtaattgtatgtgcttgccgctatttttttcttccttttaggatgatagatcataacagaacttattctccatctcaagatctgcttctagtgattgtgagtgccttgtgggcagaatccttgtcatttcctctttgggtctgtagcaccttgcatagtgcctggcatatagttggtgctcaataaatatggtttgaagtgaattgccctcacatgcttctggcaaatctctgtgctggcctgaaaccagtgactcatcttctcacataggtgttgtcaagtgatatttgattttgtaaaaataaccagtaggatccaaagaactttagctatttatgttcatcttcaaaaaattattttaggcaaagtccatactccttttaaaacaatatttatgtcctatgtttgtgtatagacatgactctactagggcataattagagtttgtgtattatttttccaggtttggggatgagtcagtccttgcccatccacaattttgtttgtgaacttataacaggaataagcaaaattcatacctgactagtgttcagaatgtagcattctgtgcgaaaaagtattgaagattagcttttaaaaactgaaaaaaaaaaatgaatgactcacatagaggttgagccaatgactgtggcctcattagattacattgtagttaaacaaagcaatttctccagacttaaaacatgatgagttgagctctatcttcatgtactcatcctgaatccttatttttctaaaatagcaccctttgttaattatttttatggaaattattactctgtcataattaaatcatagctagtataactttacagataacctaaaaagaatagaaaagaagagagagtggctttgtcagtataaaaccatgtaaagtcatcatcaagtcatctggatgaatcttgaaacacatttagctgccagttttacaaacctttaatatatcagtgctccagtatataacctcaaacaaatgtaaatagaacgaattattttcttgttttgaattgtcaatatattaaatgttgactctttgggagagttgttggcaagtttcaatggtgagaaacattattgtcaacttgaaatgtgttctgtaatggggacactacaaaaagctagctttccaatgtgtgcatagtattggcaatatgaatatatattatatataatctaatacttattataagctgctccctgtctatgtatttggaaaccttttcacaaagggaattgccta

SEQ ID NO: 8069 - DNA, 1581 bp, Homo sapiens
  source 1..1581: mol_type = unassigned DNA; mol_type = unassigned DNA
aaggggagggattcttctgcaaccaagaggcaagaggcgagagaaggaaaaaaaaaaaagcgatgagttcgccaaatatatggagcacaggaagctcagtctactcgactcctgtattttcacagaaaatgacggtgtggattctgctcctgctgtcgctctaccctggcttcactagccagaaatctgatgatgactatgaagattatgcttctaacaaaacatgggtcttgactccaaaagttcctgagggtgatgtcactgtcatcttaaacaacctgctggaaggatatgacaataaacttcggcctgatataggagtgaagccaacgttaattcacacagacatgtatgtgaatagcattggtccagtgaacgctatcaatatggaatacactattgatatattttttgcgcaaacgtggtatgacagacgtttgaaatttaacagcaccattaaagtcctccgattgaacagcaacatggtggggaaaatctggattccagacactttcttcagaaattccaaaaaagctgatgcacactggatcaccacccccaacaggatgctgagaatttggaatgatggtcgagtgctctacaccctaaggttgacaattgatgctgagtgccaattacaattgcacaactttccaatggatgaacactcctgccccttggagttctccagttatggctatccacgtgaagaaattgtttatcaatggaagcgaagttctgttgaagtgggcgacacaagatcctggaggctttatcaattctcatttgttggtctaagaaataccaccgaagtagtgaagacaacttccggagattatgtggtcatgtctgtctactttgatctgagcagaagaatgggatactttaccatccagacctatatcccctgcacactcattgtcgtcctatcctgggtgtctttctggatcaataaggatgctgttccagccagaacatctttaggtgagacacctttgtttatgttgcagtttctcaagataagtaccaaatacaagtaatttttatgtccatttctatgttgatctgctttaaatttagcctgcaattgcatagaaataccatttgtttcatattcaagagaactggcatttttaattcacaatagcaaagacttggaaccaacccaaatgtccatcaatgatagactggattaagaaaatgtggcacatatacaccatggaatactatgcagccataaaaaatgatgagttcatgtcctttgtagggacatggatgaagctggaaaccatcattctcagcaaactatcgcaaggacaaaaaaccaaacactgcatgttctcactcataggtgggaattgaacaatgagaacacatgcacataggaaggggaacatcacacaccggggcctgttgtggggtggagggattggggaggaaaagcattaggagatatacctaatgttaaatgacgagttaatgggtgcagcacaccagcatggcacatgtatacatatgtaacaaacctgcacgttgtgcacatgtaccctaaaacttaaagcataataaaaaaaaaaaaaa

SEQ ID NO: 8070 - DNA, 3628 bp, Homo sapiens
  source 1..3628: mol_type = unassigned DNA; mol_type = unassigned DNA
atgagttcgccaaatatatggagcacaggaagctcagtctactcgactcctgtattttcacagaaaatgacggtgtggattctgctcctgctgtcgctctaccctggcttcactagccagaaatctgatgatgactatgaagattatgcttctaacaaaacatgggtcttgactccaaaagttcctgagggtgatgtcactgtcatcttaaacaacctgctggaaggatatgacaataaacttcggcctgatataggagtgaagccaacgttaattcacacagacatgtatgtgaatagcattggtccagtgaacgctatcaatatggaatacactattgatatattttttgcgcaaacgtggtatgacagacgtttgaaatttaacagcaccattaaagtcctccgattgaacagcaacatggtggggaaaatctggattccagacactttcttcagaaattccaaaaaagctgatgcacactggatcaccacccccaacaggatgctgagaatttggaatgatggtcgagtgctctacaccctaaggttgacaattgatgctgagtgccaattacaattgcacaactttccaatggatgaacactcctgccccttggagttctccagttatggctatccacgtgaagaaattgtttatcaatggaagcgaagttctgttgaagtgggcgacacaagatcctggaggctttatcaattctcatttgttggtctaagaaataccaccgaagtagtgaagacaacttccggagattatgtggtcatgtctgtctactttgatctgagcagaagaatgggatactttaccatccagacctatatcccctgcacactcattgtcgtcctatcctgggtgtctttctggatcaataaggatgctgttccagccagaacatctttaggtatcaccactgtcctgacaatgaccaccctcagcaccattgcccggaaatcgctccccaaggtctcctatgtcacagcgatggatctctttgtatctgtttgtttcatctttgtcttctctgctctggtggagtatggcaccttgcattattttgtcagcaaccggaaaccaagcaaggacaaagataaaaagaagaaaaaccctattcatcatcacattggtgacattgtggaaaaacagcctaggatctctcgagaacaactaactgatccctctccttccctaccctcgtcccaggcccctaccattgatatccgcccaagatcagcaaccattcaaatgaataatgctacacaccttcaagagagagatgaagagtacggctatgagtgtctggacggcaaggactgtgccagttttttctgctgttttgaagattgtcgaacaggagcttggagacatgggaggatacatatccgcattgccaaaatggactcctatgctcggatcttcttccccactgccttctgcctgtttaatctggtctattgggtctcctacctctacctgtgaggaggtatgggttttactgatatggttcttattcactgagtctcatggagagatgtctgttctaagtccacttaaataatcctctatgtggttgataatgatctgaatctgtttctatgtccaaacctggtaaattttataatgtcatattgtttgtgcccagccctcctttggttagtgtactttgaacttcgatgtttgctgtgtttcaaacctgcaaggcaaagtaaaattagagcaagaacattcaaaccaaataagatatttttcagctacagcaaataaaacagtgaaagccctgactatttacagtagtggtatccttactagattcataatgcaattagatagaaaaggtccaaaactgtaccctatgttcactccgggtcaagttgtgataaatttgatcccaatagaatacctccctcatttaagaaaaatcataactcactttaaatatgaaagcctagtccagaaatctattacacctttatctcaagataggaagaaaatttcctccacattcatgtacaatgatgtaaatatttcaataacttagaatgcttcaagtttagtgcatgcatctctttagatccaaaataaatggactgaagttatcatcctattgtcttttattttgtgtccttgggctataaaagattcctgaatgtaattataaggatttgggtttggaaatggagggaggaattttcattgccttctccctcatgcatgaagattcgaacagcttattttttccttgtatgacatattacaacactttaagtaaaatatagactggataatcaacatttgccacctctaaatatgcccaatttcataactagagtataaagtaattgtatgtgcttgccgctatttttttcttccttttaggatgatagatcataacagaacttattctccatctcaagatctgcttctagtgattgtgagtgccttgtgggcagaatccttgtcatttcctctttgggtctgtagcaccttgcatagtgcctggcatatagttggtgctcaataaatatggtttgaagtgaattgccctcacatgcttctggcaaatctctgtgctggcctgaaaccagtgactcatcttctcacataggtgttgtcaagtgatatttgattttgtaaaaataaccagtaggatccaaagaactttagctatttatgttcatcttcaaaaaattattttaggcaaagtccatactccttttaaaacaatatttatgtcctatgtttgtgtatagacatgactctactagggcataattagagtttgtgtattatttttccaggtttggggatgagtcagtccttgcccatccacaattttgtttgtgaacttataacaggaataagcaaaattcatacctgactagtgttcagaatgtagcattctgtgcgaaaaagtattgaagattagcttttaaaaactgaaaaaaaaaaatgaatgactcacatagaggttgagccaatgactgtggcctcattagattacattgtagttaaacaaagcaatttctccagacttaaaacatgatgagttgagctctatcttcatgtactcatcctgaatccttatttttctaaaatagcaccctttgttaattatttttatggaaattattactctgtcataattaaatcatagctagtataactttacagataacctaaaaagaatagaaaagaagagagagtggctttgtcagtataaaaccatgtaaagtcatcatcaagtcatctggatgaatcttgaaacacatttagctgccagttttacaaacctttaatatatcagtgctccagtatataacctcaaacaaatgtaaatagaacgaattattttcttgttttgaattgtcaatatattaaatgttgactctttgggagagttgttggcaagtttcaatggtgagaaacattattgtcaacttgaaatgtgttctgtaatggggacactacaaaaagctagctttccaatgtgtgcatagtattggcaatatgaatatatattatatataatctaatacttattataagctgctccctgtctatgtatttggaaaccttttcacaaagggaattgcctaacatgtggactttt

SEQ ID NO: 8071 - DNA, 924 bp, Homo sapiens
  source 1..924: mol_type = unassigned DNA; mol_type = unassigned DNA
ctactcgactcctgtattttcacagaaaatgacggtgtggattctgctcctgctgtcgctctaccctggatggctatccacgtgaagaaattgtttatcaatggaagcgaagttctgttgaagtgggcgacacaagatcctggaggctttatcaattctcatttgttggtctaagaaataccaccgaagtagtgaagacaacttccggagattatgtggtcatgtctgtctactttgatctgagcagaagaatgggatactttaccatccagacctatatcccctgcacactcattgtcgtcctatcctgggtgtctttctggatcaataaggatgctgttccagccagaacatctttaggtatcaccactgtcctgacaatgaccaccctcagcaccattgcccggaaatcgctccccaaggtctcctatgtcacagcgatggatctctttgtatctgtttgtttcatctttgtcttctctgctctggtggagtatggcaccttgcattattttgtcagcaaccggaaaccaagcaaggacaaagataaaaagaagaaaaaccctcttcttcggatgttttccttcaaggcccctaccattgatatccgcccaagatcagcaaccattcaaatgaataatgctacacaccttcaagagagagatgaagagtacggctatgagtgtctggacggcaaggactgtgccagttttttctgctgttttgaagattgtcgaacaggagcttggagacatgggaggatacatatccgcattgccaaaatggactcctatgctcggatcttcttccccactgccttctgcctgtttaatctggtctattgggtctcctacctctacctgtgaggaggtatgggttttactgatatggttcttattcactgagtctcatggagagatgtct

SEQ ID NO: 8072 - DNA, 1923 bp, Homo sapiens
  source 1..1923: mol_type = unassigned DNA; mol_type = unassigned DNA
ctactcgactcctgtattttcacagaaaatgacggtgtggattctgctcctgctgtcgctctaccctggaagaaaactttcttcttacccacataaattgagatttgaaaatgaatgaagaaaaacattgatagaaataacctcaatatcaagttggagatcctgacagagctaagtcatgttctacattcttcactagccagaaatctgatgatgactatgaagattatgcttctaacaaaacatgggtcttgactccaaaagttcctgagggtgatgtcactgtcatcttaaacaacctgctggaaggatatgacaataaacttcggcctgatataggagtgaagccaacgttaattcacacagacatgtatgtgaatagcattggtccagtgaacgctatcaatatggaatacactattgatatattttttgcgcaaacgtggtatgacagacgtttgaaatttaacagcaccattaaagtcctccgattgaacagcaacatggtggggaaaatctggattccagacactttcttcagaaattccaaaaaagctgatgcacactggatcaccacccccaacaggatgctgagaatttggaatgatggtcgagtgctctacaccctaaggttgacaattgatgctgagtgccaattacaattgcacaactttccaatggatgaacactcctgccccttggagttctccagttatggctatccacgtgaagaaattgtttatcaatggaagcgaagttctgttgaagtgggcgacacaagatcctggaggctttatcaattctcatttgttggtctaagaaataccaccgaagtagtgaagacaacttccggagattatgtggtcatgtctgtctactttgatctgagcagaagaatgggatactttaccatccagacctatatcccctgcacactcattgtcgtcctatcctgggtgtctttctggatcaataaggatgctgttccagccagaacatctttaggtatcaccactgtcctgacaatgaccaccctcagcaccattgcccggaaatcgctccccaaggtctcctatgtcacagcgatggatctctttgtatctgtttgtttcatctttgtcttctctgctctggtggagtatggcaccttgcattattttgtcagcaaccggaaaccaagcaaggacaaagataaaaagaagaaaaaccctgcccctaccattgatatccgcccaagatcagcaaccattcaaatgaataatgctacacaccttcaagagagagatgaagagtacggctatgagtgtctggacggcaaggactgtgccagttttttctgctgttttgaagattgtcgaacaggagcttggagacatgggaggatacatatccgcattgccaaaatggactcctatgctcggatcttcttccccactgccttctgcctgtttaatctggtctattgggtctcctacctctacctgtgaggaggtatgggttttactgatatggttcttattcactgagtctcatggagagatgtctgttctaagtccacttaaataatcctctatgtggttgataatgatctgaatctgtttctatgtccaaacctggtaaattttataatgtcatattgtttgtgcccagccctcctttggttagtgtactttgaacttcgatgtttgctgtgtttcaaacctgcaaggcaaagtaaaattagagcaagaacattcaaaccaaataagatatttttcagctacagcaaataaaacagtgaaagccctgactatttacagtagtggtatccttactagattcataatgcaattagatagaaaaggtccaaaactgtaccctatgttcactccgggtcaagttgtgataaatttgatcccaatagaatacctccctcatttaaga

SEQ ID NO: 8073 - DNA, 3534 bp, Homo sapiens
  source 1..3534: mol_type = unassigned DNA; mol_type = unassigned DNA
ctactcgactcctgtattttcacagaaaatgacggtgtggattctgctcctgctgtcgctctaccctggcttcactagccagaaatctgatgatgactatgaagattatgcttctaacaaaacatgggtcttgactccaaaagttcctgagggtgatgtcactgtcatcttaaacaacctgctggaaggatatgacaataaacttcggcctgatataggagtgaagccaacgttaattcacacagacatgtatgtgaatagcattggtccagtgaacgctatcaatatggaatacactattgatatattttttgcgcaaacgtggtatgacagacgtttgaaatttaacagcaccattaaagtcctccgattgaacagcaacatggtggggaaaatctggattccagacactttcttcagaaattccaaaaaagctgatgcacactggatcaccacccccaacaggatgctgagaatttggaatgatggtcgagtgctctacaccctaaggttgacaattgatgctgagtgccaattacaattgcacaactttccaatggatgaacactcctgccccttggagttctccagttatggctatccacgtgaagaaattgtttatcaatggaagcgaagttctgttgaagtgggcgacacaagatcctggaggctttatcaattctcatttgttggtctaagaaataccaccgaagtagtgaagacaacttccgaagataagctacatgaaatcttggtgaatttgacattgggagattatgtggtcatgtctgtctactttgatctgagcagaagaatgggatactttaccatccagacctatatcccctgcacactcattgtcgtcctatcctgggtgtctttctggatcaataaggatgctgttccagccagaacatctttaggtatcaccactgtcctgacaatgaccaccctcagcaccattgcccggaaatcgctccccaaggtctcctatgtcacagcgatggatctctttgtatctgtttgtttcatctttgtcttctctgctctggtggagtatggcaccttgcattattttgtcagcaaccggaaaccaagcaaggacaaagataaaaagaagaaaaaccctcttcttcggatgttttccttcaaggcccctaccattgatatccgcccaagatcagcaaccattcaaatgaataatgctacacaccttcaagagagagatgaagagtacggctatgagtgtctggacggcaaggactgtgccagttttttctgctgttttgaagattgtcgaacaggagcttggagacatgggaggatacatatccgcattgccaaaatggactcctatgctcggatcttcttccccactgccttctgcctgtttaatctggtctattgggtctcctacctctacctgtgaggaggtatgggttttactgatatggttcttattcactgagtctcatggagagatgtctgttctaagtccacttaaataatcctctatgtggttgataatgatctgaatctgtttctatgtccaaacctggtaaattttataatgtcatattgtttgtgcccagccctcctttggttagtgtactttgaacttcgatgtttgctgtgtttcaaacctgcaaggcaaagtaaaattagagcaagaacattcaaaccaaataagatatttttcagctacagcaaataaaacagtgaaagccctgactatttacagtagtggtatccttactagattcataatgcaattagatagaaaaggtccaaaactgtaccctatgttcactccgggtcaagttgtgataaatttgatcccaatagaatacctccctcatttaagaaaaatcataactcactttaaatatgaaagcctagtccagaaatctattacacctttatctcaagataggaagaaaatttcctccacattcatgtacaatgatgtaaatatttcaataacttagaatgcttcaagtttagtgcatgcatctctttagatccaaaataaatggactgaagttatcatcctattgtcttttattttgtgtccttgggctataaaagattcctgaatgtaattataaggatttgggtttggaaatggagggaggaattttcattgccttctccctcatgcatgaagattcgaacagcttattttttccttgtatgacatattacaacactttaagtaaaatatagactggataatcaacatttgccacctctaaatatgcccaatttcataactagagtataaagtaattgtatgtgcttgccgctatttttttcttccttttaggatgatagatcataacagaacttattctccatctcaagatctgcttctagtgattgtgagtgccttgtgggcagaatccttgtcatttcctctttgggtctgtagcaccttgcatagtgcctggcatatagttggtgctcaataaatatggtttgaagtgaattgccctcacatgcttctggcaaatctctgtgctggcctgaaaccagtgactcatcttctcacataggtgttgtcaagtgatatttgattttgtaaaaataaccagtaggatccaaagaactttagctatttatgttcatcttcaaaaaattattttaggcaaagtccatactccttttaaaacaatatttatgtcctatgtttgtgtatagacatgactctactagggcataattagagtttgtgtattatttttccaggtttggggatgagtcagtccttgcccatccacaattttgtttgtgaacttataacaggaataagcaaaattcatacctgactagtgttcagaatgtagcattctgtgcgaaaaagtattgaagattagcttttaaaaactgaaaaaaaaaaatgaatgactcacatagaggttgagccaatgactgtggcctcattagattacattgtagttaaacaaagcaatttctccagacttaaaacatgatgagttgagctctatcttcatgtactcatcctgaatccttatttttctaaaatagcaccctttgttaattatttttatggaaattattactctgtcataattaaatcatagctagtataactttacagataacctaaaaagaatagaaaagaagagagagtggctttgtcagtataaaaccatgtaaagtcatcatcaagtcatctggatgaatcttgaaacacatttagctgccagttttacaaacctttaatatatcagtgctccagtatataacctcaaacaaatgtaaatagaacgaattattttcttgttttgaattgtcaatatattaaatgttgactctttgggagagttgttggcaagtttcaatggtgagaaacattattgtcaacttgaaatgtgttctgtaatggggacactacaaaaagctagctttccaatgtgtgcatagtattggcaatatgaatatatattatatataatctaatacttattataagctgctccctgtctatgtatttggaaaccttttcacaaa

SEQ ID NO: 8074 - DNA, 3069 bp, Homo sapiens
  source 1..3069: mol_type = unassigned DNA; mol_type = unassigned DNA
actcgactcctgtattttcacagaaaatgacggtgtggattctgctcctgctgtcgctctaccctggcttcactagccagaaatctgatgatgactatgaagattatgcttctaacaaaacatgggtcttgactccaaaagttcctgagggtgatgtcactgtcatcttaaacaacctgctggaaggatatgacaataaacttcggcctgatataggagtgaagccaacgttaattcacacagacatgtatgtgaatagcattggtccagtgaacgctatcaatatggaatacactattgatatattttttgcgcaaacgtggtatgacagacgtttgaaatttaacagcaccattaaagtcctccgattgaacagcaacatggtggggaaaatctggattccagacactttcttcagaaattccaaaaaagctgatgcacactggatcaccacccccaacaggatgctgagaatttggaatgatggtcgagtgctctacaccctaaggtattcttttgcaaaaggaaaggagtaattgttaggaagaaaacaaacaaacacaaaaatcaaccttaagtctctaaaagaaaaaaaaaaaaggaaataaatttcaagactgcatcagggttggcatgctatcaattagtatatgacatcaaaacattagttttttctttttgttatcaatgagctttttcaaagcactaattataggcaaagcttattttccacaactgctgtgaaaactattttttgtcacaactgacctgaaatttcctttgtcttgcaagatcatctgacctttgcacctacgctttgcactcttatgcttggcaatatcttcatttccaaggaaatagttgctaaaagagaatttttgaggtgtatgtctccatacatccttctctttttagcttcacaatagcaggcacctagaatctattatctttcatctcctggcaccccacttcccattatgttaataggctatttaaattaatttgttgtctatcttgggaatagacatgggagaaagttgaaggagctatggttcagcctctgaaattaaattctgaaattaaattgtgaaattagagtaaaatgctaccttaataaaataattattttatgccattaccttagcacttcatactttgcatttaaaacatttttacattgaattttctcattggtgggaatacattattagacagaataatagataagtacatagtcttacgaatcagacatccgactttggttcttagctctctctcttactatctgtaggaactagggcaacgctccagcatttctatataaagggacttaggggcagctatctggtagcaggacttttagtgttagaagctttgtttgcatagtaagcatgatgtttttacatggttatgtttttatttagaaaaattaagtgagaactgatggaaattattgggaaagaaagcacaaccatgctgtcccaccctgtactgcctctcccccgaccttgacatcacaactgagcaaactcttttacctttcatttctttaatttctataaaacagatatagttcttctgaccttacggagttgctataaggacaaaatagggtgataagtaaagtgattaacatagagcctgatatatagtaaatatagaaaatattaaaattatttatacattttcaatcaaaataagaataatgcaattctaaatcttcatatcaaatgattcatgttaaatgtgcttgctcaacatacaaaatataatacttgaataggctccaaaatctttattaattatatcagttattagaaaaagccacaattccaaaataaattcattccaggcattttatatttatcatggcttttgtaaacttagagatatagtaatgactgagtttatttttatttatttatttatttattttgagacagggtctcactgtgtcacccgctggagtgcagtggcatgatctgggctcactgcaatctctacctcccagaggttcaagtgatgttcccacctcagcctcccaagtagctgggaccacaggcacgtgccactacaccctgctaagaatttttttgtatttttttgtagagatagtcttactatgttgcccatgtggtcttgaactcctaggttcaagcggtcctcaactcagcctcccaaagtctggggattataggcgacagccatggcatctggccaatgcctgaatgtagaatctagtgggtacaaaattcgcctgatacatcagagctcagtccagcttttgaaatatgaagccaatcatactatctcaagtgtctttattgttcttataacattgtagtcattttgggacttaatttatggaatcattacattagttagttatgaaagccacctcaaaagtgtcactaatggagattcaatcaaagcttgaatggttaccagtctacatagagagatgattttgttctggctatctaaaatgagctatgagtgtgtttgtgtgtttttgtgcatgcccaaagacatttagatctgtatctatgtttgtatctgcaattatattattttcaattttaataattccagtttaatttggagtaataatactaataaaatatcaagtttaattgtagcttcctttatgaataaaactattcttccctttgaagagcatataaatatatagtaacaatgattaaaacctccagctttgaaggtagataatcttgggtccaaatttcaactgtgcctcttgttatgtgactttggacaagttcaggtacaataaatgcataataatacttattaaatgaggaagcaattcactctacccagtgcttcatagttaattaaggtctcaataattattagatatattttaacatcagtaattgctccgttatatcatagaatgatagattcttaattctgttcaattaaaaattatactaattagaaaatctcttaaaaataaattttcctaaaataatactttccttacatcaataatatctgtacaatgtaagagatatagctaaaaatatgaaattttaaaaatcatca

SEQ ID NO: 8075 - DNA, 8487 bp, Homo sapiens
  source 1..8487: mol_type = unassigned DNA; mol_type = unassigned DNA
actcgactcctgtattttcacagaaaatgacggtgtggattctgctcctgctgtcgctctaccctggcttcactagccagaaatctgatgatgactatgaagattatgcttctaacaaaacatgggtcttgactccaaaagttcctgagggtgatgtcactgtcatcttaaacaacctgctggaaggatatgacaataaacttcggcctgatataggagtgaagccaacgttaattcacacagacatgtatgtgaatagcattggtccagtgaacgctatcaatatggaatacactattgatatattttttgcgcaaacgtggtatgacagacgtttgaaatttaacagcaccattaaagtcctccgattgaacagcaacatggtggggaaaatctggattccagacactttcttcagaaattccaaaaaagctgatgcacactggatcaccacccccaacaggatgctgagaatttggaatgatggtcgagtgctctacaccctaaggttgacaattgatgctgagtgccaattacaattgcacaactttccaatggatgaacactcctgccccttggagttctccagttgtaagtaatattccttctccatttgtatcctccctcacctacagtctttctgattgccatgttaattaattgaaagaagcataacaaatttcaaagttgtattaagttatgttactgacttcgatgattttgaccatctctttcatcttaatcccagcttgctccgattagggtgattcctgcaaaagaagggctgattttattaagaattacaataggtttccttgagttgcaaacttttaatatattggttgcatagagccttttttttttttgtaagggattgtaaagccaaccctggactcaatagaaaaggtgcaatctttaattatatatcctcttcctttctctcctatgggcctaggaagggactatagcagcacattgctagttaaggcctgccccacaggacaattatttcattgataaaatatatgtgaactactacttgacacacataagatcaaatataaaaccattatttttacatttattatttttatcagatagataatagaatgtagcaagaggatccatgatgatctaacacagattatgctttagtaacctttacaaatatttcctgcctgaatcaaagccaagcaaacctaaatttcccaaaacattttccttactatttgttcagcatccatgaaaggtcaattgcttcttttacattttttgtctgccagttgtacatattggacagaataaaaatctgattatagattttaaaagtatgtttgtagaaatgtaatttctcaaccagggagtccaccaagtcatagtaatcacagtttgaaaaacgttgatgatcagagaagtaatcacctgtttatcacttcatcaataccagaggaaaccagaggaaaaatatcactggacatcatatttacctagaaaaattctcattataaaacttatttcatgttttcctgaatccaagaatgaaatatatttaattataaagttaaagcttccctgtgctttagagagataagccttcctttcttttaatactccaattgggactacttctttcttgcgtcagctaaaattcaagaactgttgatttctctgccatcaggtggccagttgaaaatgatcctctgaacccaaacacaatttaatattactcattgctatcagaataattcagtcaccagcacattctctgcctcatatcatcatttttgttgttgttgttgttgttttgttttgttttgttttggacagggtctcgttctattgcccaggctggaatgtgcagtggtgtgatctcggctcactacagccttcgcttctggggctcaactgatcctcccaccttggcctccagagtagctgggatttcaggcacgcaccaccatacccagctaatttctgtattttttgtagagatggggcgtcgccatgttgcccaagctggatattatcactgttttcctcaattttcatcacatactatcatatctctctccatcccctccatcccttctagggactctctcttttttttcctccctctttaattaatataaacatataatagataaagctgcatcaaaaggaacagaaagggggaactatgtgggattttattccaagtactcaatcagtgttcataatcaaactaatctttacatggcattattatttattatcacataataattagtattattagtagacaaactgttaaaatgatttctgatttttatttattttcttgaaaaagttaattctgcagttgacttcataataatgtttatccattcaacaaatatacattgaccatcaattctgtgagataagtactattatcctccctataagaggacaaacaatttaggaggaaaaatatacacttgtccagggtagaatggctgggaaatggtactcataaccactactttatctcacctccccagtgtgatgtcttcaatgaatactctctgttctattagtacaagctcattgatatcttcctcttagcatttctacttactactgctttgaattgtgtatttctgtgtatattaaaatggagtcccaacaaattgagaaagaaagataataaataatttaggttacgttttccaactatcttccacttcaaatgcattctttggagaagttttgagtctgtactgtcttattattttctgtttctatgtgactcaaaatcttgctctgttaactgcctttcactgtgatacaagactttgtatttctactatttattatagactggtcacttggtatgcactattccagatgatgtaaagtatgcatatggcatatataaaatcacatgtagtataccttctatgtcatttaaattattttcaagagtaaatttgacctttggatttttgaatctaacttcccattaggatgcaaagtcattgcaatttatgttctcattgcaatgccctttggtccaagatcctcatttagcttgtaactatctttctcagtctttacctcagtgtcatgttcatagaagatggttgctacatatgctaatttataatcatttttaatgtgagctttcctatctcacggcagatggctatccacgtgaagaaattgtttatcaatggaagcgaagttctgttgaagtgggcgacacaagatcctggaggctttatcaattctcatttgttggtctaagaaataccaccgaagtagtgaagacaacttccggagattatgtggtcatgtctgtctactttgatctgagcagaagaatgggatactttaccatccagacctatatcccctgcacactcattgtcgtcctatcctgggtgtctttctggatcaataaggatgctgttccagccagaacatctttaggtatcaccactgtcctgacaatgaccaccctcagcaccattgcccggaaatcgctccccaaggtctcctatgtcacagcgatggatctctttgtatctgtttgtttcatctttgtcttctctgctctggtggagtatggcaccttgcattattttgtcagcaaccggaaaccaagcaaggacaaagataaaaagaagaaaaaccctgtatgtatcattttccattggcaccattgaaatttttatgatttcggtttagtttgttttcattagcctatctgcaggctaaggctcagcagtttgggctccaagatgaaaacagcatgtatgagtttagccaggccataacgattcatttacagtcattagttacttgagagagactcaagtctgtttctattttctgtgtcagagttcttatgcaaatataattacctgctctctttattttgtggagactaaagccatttttgagaaatgtgaccttcttcttgttgctattattccaggtttcactgattttttgagatggagtgtcactctgttgctcaggctggagtgcagtggcgggatctcggcttactgcaacctctgcctcctaggttcaagcaattctcctgcctcagccccctgagtagctgggactataggcacacgccaccatgcctggttaatttttgtatttttagtacagacggggtttcaccatattggtcaggctggtctcgaactcctgacctcaggtgatccacctgtctcggcctcccaaagtgctgggattagatgcgtgagccactgcgcctggccatgataatattattaaatcactgatattttaaattaaaacttccatctcaggcattccactaggaagctataaggtccttgaagtttcaaggctgactacatttttgcaaatgatttagtgtgtgtatggaggtggaatgtgggtattgtcaccagataatttctattgatttcattctcgaaatgtatctttttgtttttaaaacaaatgatttactattatatgggcaagttagttagcctccttgtgtgttttatatatatatatgtagtgtattatttaaaaacacttgtcttatggggctcctatgagaaataaatgtggcaatgaagggcaaaacaaaaaatcccaaaatattacatagtactctacacatgaatgtacttaacattagtagttggtgatgatagttgattttgatgatttatacagtttccagcctggattgacttcagtgccacaatttgaaaacagggaggatgacttctacttgcaaccaaactttaaatagtgaggatgaagcataaacacaaatgcctaaagcaactgttttttattgtgagtgttgaggagagcacatagttacccatttacacacctgaacaaagtggctggctcatagaaatccccatgaaagttaaggtccattcccttccaagatatgggcaaagagaatcacctgacaatcctggatcatggccttctgctttgagagccgtaataacgctctacctatccaacccagagactttggaggttgaattgtaaggaaggaatttagctgattctaggttgtattctgatgcagctgcagaaacccaagtgaaatactacaagagtaatgtgtttatttgaatgtaagactttggaacatggaaagaaagaaacatcattattcttgatttaaaaaatgctttctttaattgctcaaatatttacaatgctttatgcagtccttcccttccctgtctgttttgcctctctctgactttccattttctctatccttgttttattttccttgttgtgttgtttttgtttgctccctcttgttcactttccatttcactctccctcaagaaggtggttctattgagagttggcatattacctgccagctataacaaggacatgaggactggctttcaaacaagttctgatgagtcctttggaaaaagccccttggccctctctgtcagctacgccattgcagagtagattttgttgcaaagatagaggcagattcccttattcagggtcatggaaatggcagaagaagaaaaggcagaggagaacaggataaaaatttgagaaaatgaaattacctgagaatttcatgcacttctttttaggcaattagatgattcatcagaactagcaagaaaataaactaggaatgagaagctgaaagtttattttcctgtttaatatgccttttggataattgtgtcaagactcacctattaagttatccgtgatgataattagaaaatagaatcatagtatttttaaacaggggaaccaggcaatagaaaacttccttgcaattgaacaactctggcttcttcagtcaagtaattgtagattaatttattaaaaatttcactagtaattacaaaattacacttaactttaagcaaatactttatcccaagctcagaactctccttctgtgtttataatttcagttcatttcacttactgtgttttcaaaatgtatttttaatttatcttgtctctctctttttttttcattttttttctcctttttattaaaaacaaatgcaattctcttttctgtctacaaacccaaagcttcttcggatgttttccttcaaggcccctaccattgatatccgcccaagatcagcaaccattcaaatgaataatgctacacaccttcaagagagagatgaagagtacggctatgagtgtctggacggcaaggactgtgccagttttttctgctgttttgaagattgtcgaacaggagcttggagacatgggaggatacatatccgcattgccaaaatggactcctatgctcggatcttcttccccactgccttctgcctgtttaatctggtctattgggtctcctacctctacctgtgaggaggtatgggttttactgatatggttcttattcactgagtctcatggagagatgtctgttctaagtccacttaaataatcctctatgtggttgataatgatctgaatctgtttctatgtccaaacctggtaaattttataatgtcatattgtttgtgcccagccctcctttggttagtgtactttgaacttcgatgtttgctgtgtttcaaacctgcaaggcaaagtaaaattagagcaagaacattcaaaccaaataagatatttttcagctacagcaaataaaacagtgaaagccctgactatttacagtagtggtatccttactagattcataatgcaattagatagaaaaggtccaaaactgtaccctatgttcactccgggtcaagttgtgataaatttgatcccaatagaatacctccctcatttaagaaaaatcataactcactttaaatatgaaagcctagtccagaaatctattacacctttatctcaagataggaagaaaatttcctccacattcatgtacaatgatgtaaatatttcaataacttagaatgcttcaagtttagtgcatgcatctctttagatccaaaataaatggactgaagttatcatcctattgtcttttattttgtgtccttgggctataaaagattcctgaatgtaattataaggatttgggtttggaaatggagggaggaattttcattgccttctccctcatgcatgaagattcgaacagcttattttttccttgtatgacatattacaacactttaagtaaaatatagactggataatcaacatttgccacctctaaatatgcccaatttcataactagagtataaagtaattgtatgtgcttgccgctatttttttcttccttttaggatgatagatcataacagaacttattctccatctcaagatctgcttctagtgattgtgagtgccttgtgggcagaatccttgtcatttcctctttgggtctgtagcaccttgcatagtgcctggcatatagttggtgctcaataaatatggtttgaagtgaattgccctcacatgcttctggcaaatctctgtgctggcctgaaaccagtgactcatcttctcacataggtgttgtcaagtgatatttgattttgtaaaaataaccagtaggatccaaagaactttagctatttatgttcatcttcaaaaaattattttaggcaaagtccatactccttttaaaacaatatttatgtcctatgtttgtgtatagacatgactctactagggcataattagagtttgtgtattatttttccaggtttggggatgagtcagtccttgcccatccacaattttgtttgtgaacttataacaggaataagcaaaattcatacctgactagtgttcagaatgtagcattctgtgcgaaaaagtattgaagattagcttttaaaaactgaaaaaaaaaaatgaatgactcacatagaggttgagccaatgactgtggcctcattagattacattgtagttaaacaaagcaatttctccagacttaaaacatgatgagttgagctctatcttcatgtactcatcctgaatccttatttttctaaaatagcaccctttgttaattatttttatggaaattattactctgtcataattaaatcatagctagtataactttacagataacctaaaaagaatagaaaagaagagagagtggctttgtcagtataaaaccatgtaaagtcatcatcaagtcatctggatgaatcttgaaacacatttagctgccagttttacaaacctttaatatatcagtgctccagtatataacctcaaacaaatgtaaatagaacgaattattttcttgttttgaattgtcaatatattaaatgttgactctttgggagagttgttggcaagtttcaatggtgagaaacattattgtcaacttgaaatgtgttctgtaatggggacactacaaaaagctagctttccaatgtgtgcatagtattggcaatatgaatatatattatatataatctaatacttattataagctgctccctgtctatgtatttggaaaccttttcacaaagggaatt

SEQ ID NO: 8076 - DNA, 3457 bp, Homo sapiens
  source 1..3457: mol_type = unassigned DNA; mol_type = unassigned DNA
agaaaatgacggtgtggattctgctcctgctgtcgctctaccctggcttcactagccagaaatctgatgatgactatgaagattatgcttctaacaaaacatgggtcttgactccaaaagttcctgagggtgatgtcactgtcatcttaaacaacctgctggaaggatatgacaataaacttcggcctgatataggagtgaagccaacgttaattcacacagacatgtatgtgaatagcattggtccagtgaacgctatcaatatgcaccattaaagtcctccgattgaacagcaacatggtggggaaaatctggattccagacactttcttcagaaattccaaaaaagctgatgcacactggatcaccacccccaacaggatgctgagaatttggaatgatggtcgagtgctctacaccctaaggttgacaattgatgctgagtgccaattacaattgcacaactttccaatggatgaacactcctgccccttggagttctccagttatggctatccacgtgaagaaattgtttatcaatggaagcgaagttctgttgaagtgggcgacacaagatcctggaggctttatcaattctcatttgttggtctaagaaataccaccgaagtagtgaagacaacttccggagattatgtggtcatgtctgtctactttgatctgagcagaagaatgggatactttaccatccagacctatatcccctgcacactcattgtcgtcctatcctgggtgtctttctggatcaataaggatgctgttccagccagaacatctttaggtatcaccactgtcctgacaatgaccaccctcagcaccattgcccggaaatcgctccccaaggtctcctatgtcacagcgatggatctctttgtatctgtttgtttcatctttgtcttctctgctctggtggagtatggcaccttgcattattttgtcagcaaccggaaaccaagcaaggacaaagataaaaagaagaaaaaccctcttcttcggatgttttccttcaaggcccctaccattgatatccgcccaagatcagcaaccattcaaatgaataatgctacacaccttcaagagagagatgaagagtacggctatgagtgtctggacggcaaggactgtgccagttttttctgctgttttgaagattgtcgaacaggagcttggagacatgggaggatacatatccgcattgccaaaatggactcctatgctcggatcttcttccccactgccttctgcctgtttaatctggtctattgggtctcctacctctacctgtgaggaggtatgggttttactgatatggttcttattcactgagtctcatggagagatgtctgttctaagtccacttaaataatcctctatgtggttgataatgatctgaatctgtttctatgtccaaacctggtaaattttataatgtcatattgtttgtgcccagccctcctttggttagtgtactttgaacttcgatgtttgctgtgtttcaaacctgcaaggcaaagtaaaattagagcaagaacattcaaaccaaataagatatttttcagctacagcaaataaaacagtgaaagccctgactatttacagtagtggtatccttactagattcataatgcaattagatagaaaaggtccaaaactgtaccctatgttcactccgggtcaagttgtgataaatttgatcccaatagaatacctccctcatttaagaaaaatcataactcactttaaatatgaaagcctagtccagaaatctattacacctttatctcaagataggaagaaaatttcctccacattcatgtacaatgatgtaaatatttcaataacttagaatgcttcaagtttagtgcatgcatctctttagatccaaaataaatggactgaagttatcatcctattgtcttttattttgtgtccttgggctataaaagattcctgaatgtaattataaggatttgggtttggaaatggagggaggaattttcattgccttctccctcatgcatgaagattcgaacagcttattttttccttgtatgacatattacaacactttaagtaaaatatagactggataatcaacatttgccacctctaaatatgcccaatttcataactagagtataaagtaattgtatgtgcttgccgctatttttttcttccttttaggatgatagatcataacagaacttattctccatctcaagatctgcttctagtgattgtgagtgccttgtgggcagaatccttgtcatttcctctttgggtctgtagcaccttgcatagtgcctggcatatagttggtgctcaataaatatggtttgaagtgaattgccctcacatgcttctggcaaatctctgtgctggcctgaaaccagtgactcatcttctcacataggtgttgtcaagtgatatttgattttgtaaaaataaccagtaggatccaaagaactttagctatttatgttcatcttcaaaaaattattttaggcaaagtccatactccttttaaaacaatatttatgtcctatgtttgtgtatagacatgactctactagggcataattagagtttgtgtattatttttccaggtttggggatgagtcagtccttgcccatccacaattttgtttgtgaacttataacaggaataagcaaaattcatacctgactagtgttcagaatgtagcattctgtgcgaaaaagtattgaagattagcttttaaaaactgaaaaaaaaaaatgaatgactcacatagaggttgagccaatgactgtggcctcattagattacattgtagttaaacaaagcaatttctccagacttaaaacatgatgagttgagctctatcttcatgtactcatcctgaatccttatttttctaaaatagcaccctttgttaattatttttatggaaattattactctgtcataattaaatcatagctagtataactttacagataacctaaaaagaatagaaaagaagagagagtggctttgtcagtataaaaccatgtaaagtcatcatcaagtcatctggatgaatcttgaaacacatttagctgccagttttacaaacctttaatatatcagtgctccagtatataacctcaaacaaatgtaaatagaacgaattattttcttgttttgaattgtcaatatattaaatgttgactctttgggagagttgttggcaagtttcaatggtgagaaacattattgtcaacttgaaatgtgttctgtaatggggacactacaaaaagctagctttccaatgtgtgcatagtattggcaatatgaatatatattatatataatctaatacttattataagctgctccctgtctatgtatttggaaaccttttcacaaagggaattgcctaacatgtggacttttacaataaaaatgctgcattct

SEQ ID NO: 8077 - DNA, 3058 bp, Homo sapiens
  source 1..3058: mol_type = unassigned DNA; mol_type = unassigned DNA
agacaaaattgcacctgtttaatgttttaatgtcctgtattatgggcaaaaagagggattttatttgcaagtaataatttgaacagggttgagtgatgttcttggcagatggcacatcctttctgctgaacctgttaatgtcagcctgagatggactatgacctccacaaagatggctatccacgtgaagaaattgtttatcaatggaagcgaagttctgttgaagtgggcgacacaagatcctggaggctttatcaattctcatttgttggtctaagaaataccaccgaagtagtgaagacaacttccggagattatgtggtcatgtctgtctactttgatctgagcagaagaatgggatactttaccatccagacctatatcccctgcacactcattgtcgtcctatcctgggtgtctttctggatcaataaggatgctgttccagccagaacatctttaggtatcaccactgtcctgacaatgaccaccctcagcaccattgcccggaaatcgctccccaaggtctcctatgtcacagcgatggatctctttgtatctgtttgtttcatctttgtcttctctgctctggtggagtatggcaccttgcattattttgtcagcaaccggaaaccaagcaaggacaaagataaaaagaagaaaaaccctgcccctaccattgatatccgcccaagatcagcaaccattcaaatgaataatgctacacaccttcaagagagagatgaagagtacggctatgagtgtctggacggcaaggactgtgccagttttttctgctgttttgaagattgtcgaacaggagcttggagacatgggaggatacatatccgcattgccaaaatggactcctatgctcggatcttcttccccactgccttctgcctgtttaatctggtctattgggtctcctacctctacctgtgaggaggtatgggttttactgatatggttcttattcactgagtctcatggagagatgtctgttctaagtccacttaaataatcctctatgtggttgataatgatctgaatctgtttctatgtccaaacctggtaaattttataatgtcatattgtttgtgcccagccctcctttggttagtgtactttgaacttcgatgtttgctgtgtttcaaacctgcaaggcaaagtaaaattagagcaagaacattcaaaccaaataagatatttttcagctacagcaaataaaacagtgaaagccctgactatttacagtagtggtatccttactagattcataatgcaattagatagaaaaggtccaaaactgtaccctatgttcactccgggtcaagttgtgataaatttgatcccaatagaatacctccctcatttaagaaaaatcataactcactttaaatatgaaagcctagtccagaaatctattacacctttatctcaagataggaagaaaatttcctccacattcatgtacaatgatgtaaatatttcaataacttagaatgcttcaagtttagtgcatgcatctctttagatccaaaataaatggactgaagttatcatcctattgtcttttattttgtgtccttgggctataaaagattcctgaatgtaattataaggatttgggtttggaaatggagggaggaattttcattgccttctccctcatgcatgaagattcgaacagcttattttttccttgtatgacatattacaacactttaagtaaaatatagactggataatcaacatttgccacctctaaatatgcccaatttcataactagagtataaagtaattgtatgtgcttgccgctatttttttcttccttttaggatgatagatcataacagaacttattctccatctcaagatctgcttctagtgattgtgagtgccttgtgggcagaatccttgtcatttcctctttgggtctgtagcaccttgcatagtgcctggcatatagttggtgctcaataaatatggtttgaagtgaattgccctcacatgcttctggcaaatctctgtgctggcctgaaaccagtgactcatcttctcacataggtgttgtcaagtgatatttgattttgtaaaaataaccagtaggatccaaagaactttagctatttatgttcatcttcaaaaaattattttaggcaaagtccatactccttttaaaacaatatttatgtcctatgtttgtgtatagacatgactctactagggcataattagagtttgtgtattatttttccaggtttggggatgagtcagtccttgcccatccacaattttgtttgtgaacttataacaggaataagcaaaattcatacctgactagtgttcagaatgtagcattctgtgcgaaaaagtattgaagattagcttttaaaaactgaaaaaaaaaaatgaatgactcacatagaggttgagccaatgactgtggcctcattagattacattgtagttaaacaaagcaatttctccagacttaaaacatgatgagttgagctctatcttcatgtactcatcctgaatccttatttttctaaaatagcaccctttgttaattatttttatggaaattattactctgtcataattaaatcatagctagtataactttacagataacctaaaaagaatagaaaagaagagagagtggctttgtcagtataaaaccatgtaaagtcatcatcaagtcatctggatgaatcttgaaacacatttagctgccagttttacaaacctttaatatatcagtgctccagtatataacctcaaacaaatgtaaatagaacgaattattttcttgttttgaattgtcaatatattaaatgttgactctttgggagagttgttggcaagtttcaatggtgagaaacattattgtcaacttgaaatgtgttctgtaatggggacactacaaaaagctagctttccaatgtgtgcatagtattggcaatatgaatatatattatatataatctaatacttattataagctgctccctgtctatgtatttggaaaccttttcacaaagggaattg

SEQ ID NO: 8078 - DNA, 429 bp, Homo sapiens
  source 1..429: mol_type = unassigned DNA; mol_type = unassigned DNA
accctgcttcggctcgcgcatggtgcgcgcacccactgacctgcgcccactgtctggcactccctagtgagatgaacccggtacctcagatggaaatgcagaaatcacccgtcttctgcgtcgctcaggctgggagctgtagaccggagctgttcatattccgccatcttggctcctccccccgcttcactagccagaaatctgatgatgactatgaagattatgcttctaacaaaacatgggtcttgactccaaaagttcctgagggtgatgtcactgtcatcttaaacaacctgctggaaggatatgacaataaacttcggcctgatataggagtgaagccaacgttaattcacacagacatgtatgtgaatagcattggtccagtgaacgctatcaatatggaatacactattgatatattttttg

SEQ ID NO: 8079 - DNA, 10768 bp, Homo sapiens
  source 1..10768: mol_type = unassigned DNA; mol_type = unassigned DNA
gccgcccggttgcgcggaccggcgctagtgcgcgggtgggggcggcgcgccgcggtggcccggcgtcccgtgtgcgtccagtgtgcgccccgcgggggcgcggccagcgccagagtagatacctgtcccgcccgccgcggccagcagcctcggaggaagccagggcaaagagggccggcggagaccaggtccgcgccggaggaagccgcgcccggccgaggccccggaccctgcgccccgagctccacggcaccatggccccgaagctgctgctcctcctctgcctgttctcgggcttgcacgcgcggtccagaaaggtggaagaggatgaatatgaagattcatcatcaaaccaaaagtgggtcttggctccaaaatcccaagacaccgacgtgactcttattctcaacaagttgctaagagaatatgataaaaagctgaggccagatattggaataaaaccgaccgtaattgacgttgacatttatgttaacagcattggtcctgtgtcatcaataaacatggaataccaaattgacatattttttgctcagacctggacagatagtcgccttcgattcaacagcacaatgaaaattcttactctgaacagcaacatggtggggttaatctggatcccagacaccatcttccgcaattctaaaaccgcagaggctcactggatcaccacacccaatcagctcctccggatttggaatgacgggaaaatcctttacactttgaggctcaccatcaatgctgagtgccagctgcagctgcacaacttccccatggacgaacactcctgcccgctgattttctccagctatggctatcccaaagaagaaatgatttatagatggagaaaaaattcagtggaggcagctgaccagaaatcatggcggctttatcagtttgacttcatgggcctcagaaacaccacagaaatcgtgacaacgtctgcaggtgattatgttgtcatgactatatattttgaattgagtagaagaatgggatacttcaccattcagacatacattccctgtatactgactgtggttttatcctgggtgtcattttggatcaaaaaagatgctacgccagcaagaacagcattaggcatcaccacggtgctgaccatgaccaccctgagcaccatcgccaggaagtccttgccacgcgtgtcctacgtgaccgccatggacctttttgtgaccgtgtgcttcctgtttgtcttcgccgcgctgatggagtatgccaccctcaactactattccagctgtagaaaaccaaccaccacgaagaagacaacatcgttactacatccagattcctcaagatggattcctgagcgaataagcctacaagccccttccaactattccctcctggacatgaggccaccaccaactgcgatgatcactttaaacaattccgtttactggcaggaatttgaagatacctgtgtctatgagtgtctggatggcaaagactgtcagagcttcttctgctgctatgaagaatgtaaatcaggatcctggaggaaagggcgtattcacatagacatcttggagctggactcgtactcccgggtctttttccccacgtccttcctgctctttaacctggtctactgggttggatacctgtatctctaagtgttgctcagagtgaagagtgaagagcatttggtacacacttgaccttctgtcgtccccagaccagtagtgaccaatcgggagtagcaaggaaggacactgcccagtgtatcttgttataaatgacctttcagcaacacaggaagtacccagcaaaggtttctattatgtattttacacacacacatacatacacacacacagctaattgagttttaaagtaatattcttgctaatccctactgaattgtagcttggtgttgtttctgaatggtttttggatattggaagcagccgctgattacccttgcaaagaaatctgtaaaatgtgcacgtgaatgtctgagatgctctctcaggcctctagtccttctgtatctttcctttgcagccctgggtgtagtagcactcaggagtgttgaatcacccctggccgagacccactcctgctggctcagcctgggcatgtgtgtgctccagtgtgaacagcagtgggttccaaccccagtctcctttctctgtggcctctctggctccagcaccatcatcgttagctggcactcctttacctaataacctcgttctaggcctggggagagtacactcgcattgtctacggtttccattggaggagaaaataagattttcaaaatgctcatgttgttggggtcaaagatgattatctctgaacatcagaaggttattactttattccaacttactgagagtcaacaatatttgaactttgggttcttggactagttcaacagcatttcaccttaagagctgtttttcactagaccaacgctcaaccctcgagtatgtgtccagcttatgttatattattatgggttcggtaattgtcattttgcaaagaaaggtatacagtgaacacaacctgttatcttgaagacatacaccggaatgtgaaagacatgtagataaaattttatttttattttatttttttgagacagagtcatgctctgtcacctggccaggctggagtgcagtggcacaatcttagctcactgcaacctctgcctcccatgttcaagcgattttcctgcctcagtttcccaagtggctgggactacaggtgtgcgctaccacacccggctaatttttgtatttttgttttttgttttttgggtttttttagtagagacggggtttcaccatgttggcctggctggtctcgaactcctgacctcaggtgatctgcccgcctcagcctcccaaagtgctaggattacaggcatgagccaccatgcccggccaaaattaaaaaaaaaaaattagtgaatattaattttcaactcaaaccaactttagatgcaaaaaaatgggcaatggtgatcatcaagtacatattttgatgaacaagattattttatactttgaaatatggatacatagcaaaatcccaaagaaaaaatatccccccaaatcaatactcttttgatatttttataatacaaaaccaacttgctgcttgctgttagttctttgttataactggatgccaatgtgaactgcagaagactgttttgaaacttctcctcaccaataggcaaaacacaagtcctaccagttagttaataatgctttggcattgttaaaatttgaaaccagaatctctgtgcttctcatctttctcacatagaaaactgaattaatttgacctagaaaccgtaatttttaaaattatctattgtgcataccataattacccagaaacgtaaaatattttgcagagaaagtatagaaaagtatcaatttcacacaatgtcctggatgtataccagacacagaagaggatgggagcagaagaggccagaaaaagtgaaattagattcatctgcttattcctattaagattgttgcatattaaacggatgcaaagatatagatatgtctgaatttccaaagatggagtctatacagcgtgagacattcaaacccattgtttctctccctgtcaactctctgtcttttggtttggtagttgctacataatccacaagccaattggcttcagtttagcaaattcagttttaaaaataaaagagtatttgtggagaaacaggttgaaaatattgtcttagatgcaatgtctcctctattggagaatttcacactctggtactctagttctgtctctcatgcataagcaacccccgccttggcagaagtattctgcaaggaccctgaccaaaggaatccaagtcacaccacagcactgagcgccaagggaaggtggcccaagggcagtcttaagacacaatgtcaaacgttatgaatgggtaatttctaacaagctgaagaactgcaacctgctacattgtaaacgaagttctggagagaactgaattttctagaaaaattcttattgggaggaaaataacctaaaacaactttttataacatggatttgtttgattttaccttaaaagaattttactgatgccttgtgtttcaaaaccactcaacatttggatattgttagcaaccctcctgaaattttacatgtaggataaatacaccaataacctcagttttctgaatccagccattctcttcttcccaacctcagcagccctcctgatcaaaacagatgagttcagcgctccttttctaggaaggagaaccttcatctcaagaaagtccaatggatttcactaactgagcatcatagtgtggattcctgcatatacagcaggctccccactagggggtctcaataaaaagagctaaagcaccccctaagagcatgtccatgccgggttctccgcaggcttgcataattcaagttctccatatcagtctcaactcctgagatgagccttttcagtccacaatgaggaagagatgggtgtgccttggtgaggtgcagagctcaggggatttttaatcatgtacatgtttactttctagaggaaggagaggagcagtgtggggagagtgggaaggaagtacgctttctttcactaaagactctctttgccaggatgcctgatcaggagggacgtgtgtgggcacgaggtgcaaggctgttccacacagctaagccccagcttgctttgcatgcagaattgggaaatatttggggtggaagttgtctgagtgatctgcattccaaaggtgctactgtgttcctcactttcagaaatactctaagttgaggagatgacagttctgtattttgacatggaatccaaatttctgaccactgtggatcacacttaaaactgtgactgtctgtcttttaagctgcatactgggtggggggaaagcaaagaaaaggcatttcacattaatggaattggagaaaaatgtctcttcagagcctagaaagcttcagcttctgcaaagtcccaacaccacctaccagaacagagactccctacataccagacagagaaggacaaagttagtataatttactctggacccagccaatactgcccccaatttacccaaaacatgccttaaaatgaaacagaaagctcaaataatacacatcttttaagattttccatttcctgcagttagctatatttcatgccaagttttatttatcttttatgaatggatggaaataggatttcatttctttatatgccaaacagtcttacccttaattttacatcaaaccaattaagtacaaagattttgcaggctctttgactgagaaaatgcgtgttctcaagagcaaagcattttcactctacataagggaaattggggccaatctaaaatgtcagcaacacagtcctgatggggatgagtgtctctaatagaaactccgcaccaaatcattttacctggtgatagcttgctgcagtaagtttgcaggcatgttgcttcgttgttctgcaatataaccacactcgaagcaacaggagaggggccggtaacccattctgcattgactccagctccctatgactaggaagcaatgagccactctatctaaagggctagaacacaaaacagacaaaacctcttcttccttgatcatttttatctcagctgccaaaatggaaattttctgtgatttcctttgagacttgaagaattacacctggtctccaaccattattcttatcaccgtatcggttcagtgctctcaaggcacaaagcacttggaattcactccatgatcttgcaactctttttgagtgcttttcctgagcgattttaaactctacccgtaagaaatttcatctgcaatttctgtaaaaaaaaaaaaaaaaaaaaagaatggcttaagctccacataatctgatgtaaatatacattgaaacgttaagttctatttgtactgaaacactgtccaccttagactttagaacactatcatttaacagatattcagaaaggttccggaaatacgggggaaagaaccagactacgaatacattggaaatgttaaatttacaatattctcctgagcccccttccaatttcccaaaattgagaaagtgtgtaatctgtacctattttttttctcaaattggcctggaggaaacattcaggttcagagagtttagcagtgcctctatgtttgtgttctctgtgtaatcacatgaaagaaccaacaaataactcttcaggataaatgacacctgcatcgctgatcccttgttgacttatgttttattataaaaatagatctctatcattatagggataaaacgtgtatgttttgagatgatttggtaagaactcagccattcagtatttctggaagaattaaaaacttggctttctttttcttaatgtctaatagttttgaagactagatattagggcattttctttcctccttttaaaatttctactgattacaagctagcaatttcaggatatcagcttgatctagttgtattaaggccaaaaggcagactttctttatatttatttttattatttatttatttatttatttatttatttatttatttattttgagatgaagttttactcttgttgcccaggctggagtgcagtggcgccatctcggctcactgcaacctccacctcccgggttcaagcaattctcttgcctcagcttcccgagtagctgggattacaggcacccaccaccatgtctggctaattttttatatttttagtagagatgggctttcaccatgttggccaggctggtctcgaactcctgaccttcaggtgatccacccgccttggcctcccaaagtactgggattacaggcgtgagccaccgcgcccaacctgtatttacttttttaatgccacctagctgaataatgctttgggttttactgttgtcaataaaaccccttataccttttattgtcctgcttacttataaaagccaaattttaggcgaacttaaataaatcagtgctgaaaaactagttgaacaatcagtcactgacaagttttcaatgttttgagttaaccaagtgggcttttcagattaggttattcaagagcatgagctagaaaataattaggcagacaaaacatatgttctcacacacacaccacttccaaaacagacatgatttgaatgtagcattcaggttattgaggtgaacgtaaattgctttgcttgaacaattgagataatcacctactttcgccacttcacttttcacatttgtaaacacacacagggtttttccagcccagtgagcaggctacacaatgtgaggatgataatggttcctgcagggaagccagagcctctatgtctgccgaacagtttaaattgaacaggttggaaagaacattgattgccaataattaaatgccccagactgagcaggtagctgctacattttctcttctcttttctagttattcagggttccttctttgattttcatgagaaaggaacatttacacttcctgtgaggggcttagactccgatttctcccagttgcctcacttactgaagttcgatcccagtgaatgatgtgtatgtacccaacacatccaatttgtattttcttaaatatgtgtttcttaggtatctaaggatacatgagcgagcccacagcacaattattgcagtccccaagatgtcagtcttctcaaaatgacaacattgtcactaaccactttttaaaaaagaactgaaattcccattttttgttaaacgtttttccaatacatagcaatgtgtaaaatagactcccaaatctcctttgggaaaggaacctgtggaccctggagctaagttgtcattttagggacatggtgataatcaggactgatgccagtaagtgggaagttcattacggcaaggcagtgggaaggtgccagcatcccctttccacctgagatgggctgaattttcacccggaagtctgaagcctctggaagggcaggtggaatcgctcctggcaagggcatgaccgtgcacaggctgacatgattttccttttgggtggattggagttttacaactggattcattagcacacgtgtgggaacatgtgcctgtgcccacccacagcacttccttggaactctaagctgcttctctaatctaaggaggtctattcgaaaggatagtgcttgactttcaatttataaaagattattggaaacaccttaagtagtcctaacccactgtcagcttccaattttcaggagcaaatgatgactgctttgatttggttaggctttcttacaacaggtttttataaaatattgtttatatttgtaacaggaaggattttcaatgtcaatttcatccatgagtgaagaccccccactgcacagagcagcacttctgtcactctcatggggagatcagggtacccactcctctacgtagcttggcagacccagaccaccctgagccagcctgccacatccgctagtccatgcacctccagggtggccttgggagctacagagaggaaaaaaagaaaaaatgttgcattcttaagcaattaaagactccttccaatgtaattaaaaaataagtaatgtggcaaaagatgcacataacttgctccctcaagttctaaattgtcaccaaatatgaaaggtttttagatgaagtacatctacatcataaccatcatcaccctcattgtcctcttccatgtttctactagtactcagctattgattcaacacaaaggcttagagccttttctgaactataacgaaatcagaacttacatcgtggaaaaagcgaaaaagtttcattagagtttaaacattaagtatacagatcctactccaaaattttgctcgcctaaaacatttccagaactgctgtgttccccagcagtcctgcctgccctgcctcaatcagaatttcaaattactatttagaagaacattccattcaattgttgtttgttgattgctttctctctttttttttccgtttttaccttagttggctattttattccttttcgtaaagataacgtttgaattgtctaacaactatcttttttcactaaaatacatgcatctttggaaactgcaaattttgtgagctcaaaaagacaatcactgtgcttcttatcatctaatttgagtctaggctttgtttccccctaacttatcctggcatttttactttgaatagaaatagtcacaggcaaaatatattcatgaaatgtacagtgcttactattatatgatctctgtttagaataactattttattaaaacagtctaaaagacactgtccatcattcttgacatttgatatgtctaattttgtgctagtgaaccaagtttacctgctcacacgtttgtacaactacacaatgtgttttcctttacgtgcagctccggtactgagcaaaaggttcgttgtttaggagtgaaattttctgtgaaagttttgggagagtaattattttcagggatcagacctatgtgttgttaggagcaagaggccatcttgtgtttacatgcagtggtctgtgtatttgtgtctgtacgtacagtggtaaaactgaaacaacttattaataatgtgtgtcactctacccatcaccccaaatttagctgaaacaagtagaaaggagcgcagttttctagcgatagcgtattagcactaagcctctggttaggataaaaaggagcaagggagagggagaaagagaggacagagggagagagagaaagtggcaatctgtacatttcctgacaaagtgggatcatgttctttccaagaaaaggaaaagaaatccagcttcactacctgatcaggagtccctctggggtccacacaagcctgcctcctttggagagcccttgagcatcactgttgtgaccggggtgcacacctgggcgactccttgatcattcgtgcattctggtcaagttgacccgataagccaaaagtacttttcaagatttagatggcaaacagccatccccacccttgtctaggaagtcgtattcgcaggtcacaggaaggcgtcaggtcaggcttgaagcagccggggtgtgggcagggtcctctctctgtgaagcctgtgtgggaggtgaaactgtcaggggtcctgggagatggcccaggcaggaagggaaggagagaggcgcggactgctctctgttcccatggaatccttcctgcctgtgaagccattgtcctccagatgggaggtaggccgggagattccagaatccgaaaacattttggaatcatcttagagcaccggtgtggatgcgcttggccccgagggggccgcgccctgccccagtgcgtgcgcctcctgccccagcagggacccgccctcaccaagtggcctccagtagcccctgtgtccctgtcgtcccgcgagggattggaggccctggctccgggcggtcccgaggtcccgccgccctcctcccctgcgcagaggacgtggctccccgctatccgtgcggctcgtggtgtcctagtgaaatgagggcgcactggcgcccgacgtgccttggcgacacgggcggcgccgcgccccgcttcgtgcgtcccgtccccgccgtgccctcagctgggcctcgtggctgggccgccctctgtatttgtatttggattcctacgtttgtacttctaatacaaataaatgcacatgttgtcagaaatacctga

SEQ ID NO: 8080 - DNA, 1405 bp, Homo sapiens
  source 1..1405: mol_type = unassigned DNA; mol_type = unassigned DNA
agagtagatacctgtcccgcccgccgcggccagcagcctcggaggaagccagggcaaagagggccggcggagaccaggtccgcgccggaggaagccgcgcccggccgaggccccggaccctgcgccccgagctccacggcaccatggccccgaagctgctgctcctcctctgcctgttctcgggcttgcacgcgcggtccagaaaggtggaagaggatgaatatgaagattcatcatcaaaccaaaagtgggtcttggctccaaaatcccaagacaccgacgtgactcttattctcaacaagttgctaagagaatatgataaaaagctgaggccagatattggaataaaaccgaccgtaattgacgttgacatttatgttaacagcattggtcctgtgtcatcaataaacatggaataccaaattgacatattttttgctcagacctggacagatagtcgccttcgattcaacagcacaatgaaaattcttactctgaacagcaacatggtggggttaatctggatcccagacaccatcttccgcaattctaaaaccgcagaggctcactggatcaccacacccaatcagctcctccggatttggaatgacgggaaaatcctttacactttgaggctcaccatcaatgctgagtgccagctgcagctgcacaacttccccatggacgaacactcctgcccgctgattttctccagctatggctatcccaaagaagaaatgatttatagatggagaaaaaattcagtggaggcagctgaccagaaatcatggcggctttatcagtttgacttcatgggcctcagaaacaccacagaaatcgtgacaacgtctgcaggtaggaatttactgaaagaggcacagctctcaaaagccagagaggcctaaggccatatgtagtcatatccttaatgtacaagccttttgggcaaccatgatacataagtgatatttgagacaaaacaagtgattcaaagtgaaactatgttttcatgttttaattggtatgggagagggatgttagaaataattcatatttttgaatccaggctgtgtttgcataatgtctataaacctagctataaacttaacctaactcattactgaccatatttacataaaccaattttgctgatggggagagttctgcaaatttccacgtacataagaagaatcaaatattattgagaatccacacataaaagaagctggtgtgatatgtcctttgagtttcaattgcttttatttactctaagttttatctttaactttgagtttctttttcaatgattgaaagtaattacctaccaatttgattttatgaagtgatcattatatgcatattcaaaatcctgtaattaaataaaaagagttgttctgcctatgaa

SEQ ID NO: 8081 - DNA, 615 bp, Homo sapiens
  source 1..615: mol_type = unassigned DNA; mol_type = unassigned DNA
gggcaaagagggccggcggagaccaggtccgcgccggaggaagccgcgcccggccgaggccccggaccctgcgccccgagctccacggcaccatggccccgaagctgctgctcctcctctgcctgttctcgggcttgcacgcgcggtccagaaaggtggaagaggatgaatatgaagattcatcatcaaaccaaaagtgggtcttggctccaaaatcccaagacaccgacgtgactcttattctcaacaagttgctaagagaatatgataaaaagctgaggccagatattggaataaaaccgaccgtaattgacgttgacatttatgttaacagcattggtcctgtgtcatcaataaacatggtaagaagctcctttattttctgatctaacggctgttgcacctcttcttgttacattctcattgtggatttctgtttgagatttatcatgccggtttaaaactcacactgacttcttaaatctgtaacacttattggaatattgaaaatggtaaaaaaaaaaatgaagaaagatagcttgtgatggtagtagcatttccacttttagtttcttctttcaacatccaagagacctgtcttttatagtgtttctt

SEQ ID NO: 8082 - DNA, 446 bp, Homo sapiens
  source 1..446: mol_type = unassigned DNA; mol_type = unassigned DNA
agaagctggggtgaggggtacagaagaggatggctgctgggtatgcaacctagagtcagtcagtcagtcacaaacatggcaggaaaataagctgtctgcctcctacaccctgatctggatgtttgtaagaagaaaaggtgcaacagaatttattccggaatggagaagacacaccctcagcgcgccctcgtcagaacccagaatggtcagaatagctggccaaagaggaaggagacctggccaggtgcaattctcgaaggacaaatgaagcactggtcagattccggggcatcagttcacccaatcttgagaaaattctgggggaaaagagttccattcatggtgaatgaaagaagaagctttctagaactaatctgaaagcaaagtgtccctaaagagaaacccatcaaaagtcactgctggattttcacccaaagtgaggcaga

SEQ ID NO: 8083 - DNA, 774 bp, Homo sapiens
  source 1..774: mol_type = unassigned DNA; mol_type = unassigned DNA
gaagctggggtgaggggtacagaagaggatggctgctgggtatgcaacctagagtcagtcagtcagtcacaaacatggcaggaaaataagctgtctgaataccaaattgacatattttttgctcagacctggacagatagtcgccttcgattcaacagcacaatgaaaattcttactctgaacagcaacatggtggggttaatctggatcccagacaccatcttccgcaattctaaaaccgcagaggctcactggatcaccacacccaatcagctcctccggatttggaatgacgggaaaatcctttacactttgaggctcaccatcaatgctgagtgccagctgcagctgcacaacttccccatggacgaacactcctgcccgctgattttctccagctatggctatcccaaagaagaaatgatttatagatggagaaaaaattcagtggaggcagctgaccagaaatcatggcggctttatcagtttgacttcatgggcctcagaaacaccacagaaatcgtgacaacgtctgcaggtgattatgttgtcatgactatatattttgaattgagtagaagaatgggatacttcaccattcagacatacattccctgtatactgactgtggttttatcctgggtgtcattttggatcaaaaaagatgctacgccagcaagaacagcattaggcatcaccacggtgctgaccatgaccaccctgagcaccatcgccaggaagtccttgccacgcgtgtcctacgtgaccgccatg

SEQ ID NO: 8084 - DNA, 342 bp, Homo sapiens
  source 1..342: mol_type = unassigned DNA; mol_type = unassigned DNA
atgctgagtgccagctgcagctgcacaacttccccatggacgaacactcctgcccgctgattttctccagctccaccatcttggccttcagattgtctcttcatgcatatcgctgacgtttaaaagtttcaagcttgatggtgtcttacagatcacctcctcggagactcgcttccattcgtggggaaatgaaggctcagagaggttgcatttgcctccatggggcccacagagctggctggtggttgctgtgaattgggaaatcacattttctgacttctcatcgcgtgttctcactactcaacactgggaggaaccattgaattaaaagttcaaaatcaa

SEQ ID NO: 8085 - DNA, 717 bp, Homo sapiens
  source 1..717: mol_type = unassigned DNA; mol_type = unassigned DNA
gtgattatgttgtcatgactatatattttgaattgagtagaagaatgggatacttcaccattcagacatacattccctgtatactgactgtggttttatcctgggtgtcattttggatcaaaaaagatgctacgccagcaagaacagcattaggcatcaccacggtgctgaccatgaccaccctgagcaccatcgccaggaagtccttgccacgcgtgtcctacgtgaccgccatggacctttttgtgaccgtgtgcttcctgtttgtcttcgccgcgctgatggagtatgccaccctcaactactattccagctgtagaaaaccaaccaccacgaagaagacaacatcgttactacatccagattcctcaagatggattcctgagcgaataagcctacaagccccttccaagccatcctgctgccctgcctgtggcctccaagggttgccctttagatctctggtgagccatccccgcatcagcagagccttctgcctccccgtctaagtcagaatcttcctgtgtggctgccttaccttgcaaatggccagacttctcctctgtgtctccggtagctcccagttccatccacatagcaagggactacacagaggcatgaagcaacgagtggatgaatgtctggctgatcactgtcaaagcacacgtgtaggaaacctttattgcaattgtttgttaataaaggcagatctttcaa

SEQ ID NO: 8086 - DNA, 1235 bp, Homo sapiens
  source 1..1235: mol_type = unassigned DNA; mol_type = unassigned DNA
ggaataccaaattgacatattttttgctcagacctggacagatagtcgccttcgattcaacagcacaatgaaaattcttactctgaacagcaacatggtggggttaatctggatcccagacaccatcttccgcaattctaaaaccgcagaggctcactggatcaccacacccaatcagctcctccggatttggaatgacgggaaaatcctttacactttgaggctcaccatcaatgctgagtgccagctgcagctgcacaacttccccatggacgaacactcctgcccgctgattttctccagctatggctatcccaaagaagaaatgatttatagatggagaaaaaattcagtggaggcagctgaccagaaatcatggcggctttatcagtttgacttcatgggcctcagaaacaccacagaaatcgtgacaacgtctgcaggtgattatgttgtcatgactatatattttgaattgagtagaagaatgggatacttcaccattcagacatacattccctgtatactgactgtggttttatcctgggtgtcattttggatcaaaaaagatgctacgccagcaagaacagcattaggcatcaccacggtgctgaccatgaccaccctgagcaccatcgccaggaagtccttgccacgcgtgtcctacgtgaccgccatggacctttttgtgaccgtgtgcttcctgtttgtcttcgccgcgctgatggagtatgccaccctcaactactattccagctgtagaaaaccaaccaccacgaagaagacaacatcgttactacatccagattcctcaagatggattcctgagcgaataagcctacaagccccttccaactattccctcctggacatgaggccaccaccaactgcgatgatcactttaaacaattccgtttactggcaggaatttgaagatacctgtgtctatgagtgtctggatggcaaagactgtcagagcttcttctgctgctatgaagaatgtaaatcaggatcctggaggaaagggcgtattcacatagacatcttggagctggactcgtactcccgggtctttttccccacgtccttcctgctctttaacctggtctactgggttggatacctgtatctctaagtgttgctcagagtgaagagtgaagagcatttggtacacacttgaccttctgtcgtccccagaccagtagtgaccaatcgggagtagcaaggaaggacac

SEQ ID NO: 8087 - DNA, 818 bp, Homo sapiens
  source 1..818: mol_type = unassigned DNA; mol_type = unassigned DNA
acaataaataaaacagttggtgtcaatacaactccccttattttctctcaagtcacctggatcgtcctgaccccgggaaccccgtctgcagcaccaggccccctccgtggagaaaagatggagccggattaagcacccagtgctaaggcgactaagacgccactgcccgcaggccctgccggaaaatactcagagagtgcagcaggcgccgcgattccttagaaagtgctggcgtggcctctcctgacacagaaagccggctcctggatgcttacaaaggactggcccgcgcaacaccgttgctcctcaacccgggccacactccaaggacctctactgagcttcagcttgctcaccgaaaacggcgcggccccctctacccgggatgtcggagcccaggagaccctgagagcccccagctctttccgtaattgcaggagaaggggcaagcgggtccgtagccgggggccctccagtggcattatcctgaaccgccacgcccgcacgtggcccggctagagctccctggcgaaggatcacctgttcctacagtgacaactggacctggcccgaacccctggcatctggcaacattattacctgtcgaaacagaagtagagatttgaaatagaggatgcctgttcccatttcctcctgctgtctggaaggaagtctggctttccagcccaactctaagctcatctttacatacaaaataagggtatgtttacatggaaagcaaaaatagaaccatggatttacagaaggttccatagcagcaaataacagtgcttatgaaataaacattttaaatatta

SEQ ID NO: 8088 - DNA, 5858 bp, Homo sapiens
  source 1..5858: mol_type = unassigned DNA; mol_type = unassigned DNA
gcggccgcccgcacttcccgcctctggctcgcccgaggacgcgctggcacgcctcccaccccctcactctgactccagctggcgtgcatggtctgcctcgcatcctcacgactcagctccctccctctctcgtgtttttttcctccgccgccccctcattcatccccactgggctccctttccctcaaatgctctggggctctccgcgctttcctgagtccgggctccgaggacccttaggtagtcccggtctcttttaaagctccccggcttccaaagggttgccacgtccctaaaccctgtctccagctcgcatacacacacgcacagacacgcacgttttctgttcctgcgtgacacccgccctcgccgctcggccccgccggtccccgcgcggtgccctcctcccgccacacgggcacgcacgcgcgcgcagggccaagcccgaggcagctcgcccgcagctcgcactcgcaggcgacctgctccagtctccaaagccgatggcatctccgggctctggcttttggtctttcgggtcggaagatggctctggggattccgagaatcccggcacagcgcgagcctggtgccaagtggctcagaagttcacgggcggcatcggaaacaaactgtgcgccctgctctacggagacgccgagaagccggcggagagcggcgggagccaacccccgcgggccgccgcccggaaggccgcctgcgcctgcgaccagaagccctgcagctgctccaaagtggatgtcaactacgcgtttctccatgcaacagacctgctgccggcgtgtgatggagaaaggcccactttggcgtttctgcaagatgttatgaacattttacttcagtatgtggtgaaaagtttcgatagatcaaccaaagtgattgatttccattatcctaatgagcttctccaagaatataattgggaattggcagaccaaccacaaaatttggaggaaattttgatgcattgccaaacaactctaaaatatgcaattaaaacagggcatcctagatacttcaatcaactttctactggtttggatatggttggattagcagcagactggctgacatcaacagcaaatactaacatgttcacctatgaaattgctccagtatttgtgcttttggaatatgtcacactaaagaaaatgagagaaatcattggctggccagggggctctggcgatgggatattttctcccggtggcgccatatctaacatgtatgccatgatgatcgcacgctttaagatgttcccagaagtcaaggagaaaggaatggctgctcttcccaggctcattgccttcacgtctgaacatagtcatttttctctcaagaagggagctgcagccttagggattggaacagacagcgtgattctgattaaatgtgatgagagagggaaaatgattccatctgatcttgaaagaaggattcttgaagccaaacagaaagggtttgttcctttcctcgtgagtgccacagctggaaccaccgtgtacggagcatttgaccccctcttagctgtcgctgacatttgcaaaaagtataagatctggatgcatgtggatgcagcttggggtgggggattactgatgtcccgaaaacacaagtggaaactgagtggcgtggagagggccaactctgtgacgtggaatccacacaagatgatgggagtccctttgcagtgctctgctctcctggttagagaagagggattgatgcagaattgcaaccaaatgcatgcctcctacctctttcagcaagataaacattatgacctgtcctatgacactggagacaaggccttacagtgcggacgccacgttgatgtttttaaactatggctgatgtggagggcaaaggggactaccgggtttgaagcgcatgttgataaatgtttggagttggcagagtatttatacaacatcataaaaaaccgagaaggatatgagatggtgtttgatgggaagcctcagcacacaaatgtctgcttctggtacattcctccaagcttgcgtactctggaagacaatgaagagagaatgagtcgcctctcgaaggtggctccagtgattaaagccagaatgatggagtatggaaccacaatggtcagctaccaacccttgggagacaaggtcaatttcttccgcatggtcatctcaaacccagcggcaactcaccaagacattgacttcctgattgaagaaatagaacgccttggacaagatttataataaccttgctcaccaagctgttccacttctctaggtagacaattaagttgtcacaaactgtgtgaatgtatttgtagtttgttccaaagtaaatctatttctatattgtggtgtcaaagtagagtttaaaaattaaacaaaaaagacattgctccttttaaaagtcctttcttaagtttagaatacctctctaagaattcgtgacaaaaggctatgttctaatcaataaggaaaagcttaaaattgttataaatacttcccttacttttaatatagtgtgcaaagcaaactttattttcacttcagactagtaggactgaatagtgccaaattgcccctgaatcataaaaggttctttggggtgcagtaaaaaggacaaagtaaatataaaatatatgttgacaataaaaactcttgcctttttcatagtattagaaaaaaatttctaatttacctatagcaacatttcaaatgtatttaaatacatataattttacaaaaggaaaatatatatattaaaaaagatatcctattttgtaacatatagatttttattttatataggttatacaaactgcgggggcagatataaaatctaagccagatttttttttcctttctcttaatggaggcacaataaaacacttagcaaagttattttgaaacattgacccacgaaattcttaaaaggtattattgcttctttctatacatgttatggcttatcacatctctaaagttagtatttcaagacaaacacaaaagaatactgcgagttctttaaaataattgatcccattggcagtaagattctcttcccctttaagttttccacccattttactcttagcggactcactctgcaagcgtgacaaaccaggcttcatctcagattaaattagggtaattgtctctattctgctttccagttcggcctgttttgaacagaaggttgatgctagttcttgaggcatcttccaaatagtattcttttattaggtcatttgaattaattagagaaagtaaaaataaaaccttatcagcctgagcaaagaggaatgaagcacactcccagaatgtggtgagcccagaaaattaaagttggccttgggagaagagatctctgtgggacaataatgacatcatcctggcgccatattgccactgtccaggaaagagaaatttacctccaggccagttgcgcatttccatcccctccccattcctccccacaaagtctctcccactagactccctaccactgggacccaaaatagttactttatattccatgggtggttgtttttcttccatgaaatgagcctctcaccctagattttgaggcattatcttaagattttcctttatccatctcccatcgagatccaaagtgaccagaatatgcagaaataataagatccttagaattcaaaatagtatttttaaaacatccttctttccctgtgaacctgatagaaaaacatgagctaacaaaagcttccatagatatttatggggtcacacatcgtcagattccaagtgctgattggagaacaatagattgatatgcagactgcaaatgcaaatttaggaacattctccatttctgaatggaccaggtagttcagtactcagactgcaggtatacaagggaagagagaaggccctgcccttcaacgggtagaaatgccctacaatataacatagagaaatgccctataatataaccacaggatccagccatctgaaattttcataagcttccccctacattatttctcctaggctatatgcaaaaacagtgataacttgatatgaacatggctttgggccctttctgtctagaaaaacaaatgggttcactatgacaatcagaaataaactctttcatctgtcccgcagaatttcatgaaggagtaaccttccattctaggctttgtctaatggccaagcattagacaaagcattagaaagcagttcctttctcaaaactgcctgctgagaataagcacatagctgcccgactatccggagcctcaggcccaaaggttccacttcagagacagagatgctaattgatccaacctgctgtccttcgtggagaagacagtggggcccagtgccctggtgaaccaaccctgctgtactccaggatgctttatcttttgagttacagatcctagattataaactgctgctttttaggttaatgagatggtaaaattttaaaggacaatttgtgcctatatatgaaattccagcaaaacaattctagcaacaacaatagctcttcttccccgctcccctaccccttcccagtactccttcaaattggctgagagccttgctcaggcctgtgcagggaaatccttaccaactgtagcccaaagaaggaagcaaataaaagcctagtaggtcccagtagtttaataaatcatcttgaaaggagatgtggaatcaggtcagaagagagtaagggaggaagggagggagggagggagggagggaaggagggagggaggaaggaaatgaagggagggagggagggaggaaagaagggagattatttttaatattagcccaaattcccagtgccatggtctttatgtgtgcccattctttacaaatcttagaaaagtttggttttagctttaatcagaactgacatggccattttcatttatacagcaatattgtgtttatcatttaaaatacttgaacaaacaagtgtgatatgtctttatctgagacctatacatggtatggacttcatatactgccacaggatgtgaggaaagaaaaggaaatcaattctgactgtgttgcctttattatctggataatactgtcttgtcacctcagattggggttgtgcactttagatctgaactgtacagtgttgcaaatcaacatgtgtttctgtaaaagcttgtacaatatattattgatatgtctttttctgtgtggtagctgtattgaactttgatattatgaaaactacatttgcatctgttcctgttctctctctctctctctttcctaactatatgccctccacatcggctctaatagagaacatgccctcagctaagccccctactgagaaacttcctttgagaattgtgcgacttcacaaaatgcaaggtgaacaccactttgtctctgagaacagacgttaccaattatggagtgtcaccagctgccaaaatcgtaggtgttggctctgctggtcactggagtagttgctactcttcagaatatggacaaagaaggcacaggtgtaaatatagtagcaggatgaggaacctcaaactgggtatcattttgcacgtgctcttctgttctcaaatgctaaatgcaaacactgtgtatttattagttaggtgtgccaaactaccgttcccaaattggtgtttctgaatgacatcaacattcccccaacattactccattactaaagacagaaaaaaataaaaacataaaatatacaaacatgtggcaacctgttcttcctaccaaatataaacttgtgtatgatccaagtattttatctgtgttgtctctctaaacccaaataaatgtgtaaatgtggacaca

SEQ ID NO: 8089 - DNA, 2462 bp, Homo sapiens
  source 1..2462: mol_type = unassigned DNA; mol_type = unassigned DNA
acccgccctcgccgctcggccccgccggtccccgcgcggtgccctcctcccgccacacgggcacgcacgcgcgcgcagggccaagcccgaggcagctcgcccgcagctcgcactcgcaggcgacctgctccagtctccaaagccgatggcatctccgggctctggcttttggtctttcgggtcggaagatggctctggggattccgagaatcccggcacagcgcgagcctggtgccaagtggctcagaagttcacgggcggcatcggaaacaaactgtgcgccctgctctacggagacgccgagaagccggcggagagcggcgggagccaacccccgcgggccgccgcccggaaggccgcctgcgcctgcgaccagaagccctgcagctgctccaaagtggatgtcaactacgcgtttctccatgcaacagacctgctgccggcgtgtgatggagaaaggcccactttggcgtttctgcaagatgttatgaacattttacttcagtatgtggtgaaaagtttcgatagatcaaccaaagtgattgatttccattatcctaatgagcttctccaagaatataattgggaattggcagaccaaccacaaaatttggaggaaattttgatgcattgccaaacaactctaaaatatgcaattaaaacagggcatcctagatacttcaatcaactttctactggtttggatatggttggattagcagcagactggctgacatcaacagcaaatactaacatgttcacctatgaaattgctccagtatttgtgcttttggaatatgtcacactaaagaaaatgagagaaatcattggctggccagggggctctggcgatgggatattttctcccggtggcgccatatctaacatgtatgccatgatgatcgcacgctttaagatgttcccagaagtcaaggagaaaggaatggctgctcttcccaggctcattgccttcacgtctgaacatagtcatttttctctcaagaagggagctgcagccttagggattggaacagacagcgtgattctgattaaatgtgatgagagagggaaaatgattccatctgatcttgaaagaaggattcttgaagccaaacagaaagggtttgttcctttcctcgtgagtgccacagctggaaccaccgtgtacggagcatttgaccccctcttagctgtcgctgacatttgcaaaaagtataagatctggatgcatgtggatgcagcttggggtgggggattactgatgtcccgaaaacacaagtggaaactgagtggcgtggagagggccaactctgtgacgtggaatccacacaagatgatgggagtccctttgcagtgctctgctctcctggttagagaagagggattgatgcagaattgcaaccaaatgcatgcctcctacctctttcagcaagataaacattatgacctgtcctatgacactggagacaaggccttacagtgcggacgccacgttgatgtttttaaactatggctgatgtggagggcaaaggggactaccgggtttgaagcgcatgttgataaatgtttggagttggcagagtatttatacaacatcataaaaaaccgagaaggatatgagatggtgtttgatgggaagcctcagcacacaaatgtctgcttctggtacattcctccaagcttgcgtactctggaagacaatgaagagagaatgagtcgcctctcgaaggtggctccagtgattaaagccagaatgatggagtatggaaccacaatggtcagctaccaacccttgggagacaaggtcaatttcttccgcatggtcatctcaaacccagcggcaactcaccaagacattgacttcctgattgaagaaatagaacgccttggacaagatttataataaccttgctcaccaagctgttccacttctctagagaacatgccctcagctaagccccctactgagaaacttcctttgagaattgtgcgacttcacaaaatgcaaggtgaacaccactttgtctctgagaacagacgttaccaattatggagtgtcaccagctgccaaaatcgtaggtgttggctctgctggtcactggagtagttgctactcttcagaatatggacaaagaaggcacaggtgtaaatatagtagcaggatgaggaacctcaaactgggtatcattttgcacgtgctcttctgttctcaaatgctaaatgcaaacactgtgtatttattagttaggtgtgccaaactaccgttcccaaattggtgtttctgaatgacatcaacattcccccaacattactccattactaaagacagaaaaaaataaaaacataaaatatacaaacatgtggcaacctgttcttcctaccaaatataaacttgtgtatgatccaagtattttatctgtgttgtctctctaaacccaaataaatgtgtaaatgtggacaca

SEQ ID NO: 8090 - DNA, 641 bp, Homo sapiens
  source 1..641: mol_type = unassigned DNA; mol_type = unassigned DNA
gcgcgcgcagggccaagcccgaggcagctcgcccgcagctcgcactcgcaggcgacctgctccagtctccaaagccgatggcatctccgggctctggcttttggtctttcgggtcggaagatggctctggggattccgagaatcccggcacagcgcgagcctggtgccaagtggctcagaagttcacgggcggcatcggaaacaaactgtgcgccctgctctacggagacgccgagaagccggcggagagcggcgggagccaacccccgcgggccgccgcccggaaggccgcctgcgcctgcgaccagaagccctgcagctgctccaaagtggatgtcaactacgcgtttctccatgcaacagacctgctgccggcgtgtgatggagaaaggcccactttggcgtttctgcaagatgttatgaacattttacttcagtatgtggtgaaaagtttcgatagatcaaccaaagtgattgatttccattatcctaatgagcttctccaagaatataattgggaattggcagaccaaccacaaaatttggaggaaattttgatgcattgccaaacaactctaaaatatgcaattaaaacaggtattgtctcatcgaaaataataaagctcttttttcgtttacaa

SEQ ID NO: 8091 - DNA, 680 bp, Homo sapiens
  source 1..680: mol_type = unassigned DNA; mol_type = unassigned DNA
tccaagagggctctgaggccgtggcgctcttcccccagcgcggcccttgggatggcgggtggccgacgatccaggcgctcgtgcgctcactgaatcgatgacggctggcttccctaggccgctggggcctcggacctgctgccggcgtgtgatggagaaaggcccactttggcgtttctgcaagatgttatgaacattttacttcagtatgtggtgaaaagtttcgatagatcaaccaaagtgattgatttccattatcctaatgagcttctccaagaatataattgggaattggcagaccaaccacaaaatttggaggaaattttgatgcattgccaaacaactctaaaatatgcaattaaaacagggcatcctagatacttcaatcaactttctactggtttggatatggttggattagcagcagactggctgacatcaacagcaaatactaacatgttcacctatgaaattgctccagtatttgtgcttttggaatatgtcacactaaagaaaatgagagaaatcattggctggccagggggctctggcgatgggatattttctcccggtacatgatatttcaactttctttgtgttttttcttctaatatgcaatgccttgttgtaaacctagggaagattaaaaatctagcctatgcctctgcttaggttaaata

SEQ ID NO: 8092 - DNA, 1496 bp, Homo sapiens
  source 1..1496: mol_type = unassigned DNA; mol_type = unassigned DNA
ctgactccaggagctggggtcaaattgctggagcaggctgatttgcatagcccaatggccaagctgcatgcaaatgaggcggaaggtggttggctgagggttggcaggataaccccggagagcggggccctttgtcctccagtggctggtaggcagtggctgggaggcagcggcccaattagtgtcgtgcggcccgtggcgaggcgaggtccggggagcgagcgagcaagcaaggcgggaggggtggccggagctgcggcggctggcacaggaggaggagcccgggcgggcgaggggcggccggagagcgccagggcctgagctgccggagcggcgcctgtgagtgagtgcagaaagcaggcgcccgcgcgctagccgtggcaggagcagcccgcacgccgcgctctctccctgggcgacctgcagtttgcaatatgactttggaggaattctcggctggagagcagaagaccgaaaggatggataaggtgggggatgccctggaggaagtgctcagcaaagccctgagtcagcgcacgatcactgtcggggtgtacgaagcggccaagctgctcaacgtcgaccccgataacgtggtgttgtgcctgctggcggcggacgaggacgacgacagagatgtggctctgcagatccacttcaccctgatccaggcgttttgctgcgagaacgacatcaacatcctgcgcgtcagcaacccgggccggctggcggagctcctgctcttggagaccgacgctggccccgcggcgagcgagggcgccgagcagcccccggacctgcactgcgtgctggtgacgaatccacattcatctcaatggaaggatcctgccttaagtcaacttatttgtttttgccgggaaagtcgctacatggatcaatgggttccagtgattaatctccctgaacggtgatggcatctgaatgaaaataactgaaccaaattgcactgaagtttttgaaatacctttgtagttactcaagcagttactccctacactgatgcaaggattacagaaactgatgccaaggggctgagtgagttcaactacatgttctgggggcccggagatagatgactttgcagatggaaagaggtgaaaatgaagaaggaagctgtgttgaaacagaaaaataagtcaaaaggaacaaaaattacaaagaaccatgcaggaaggaaaactatgtattaatttagaatggttgagttacattaaaataaaccaaatatgttaaagtttaagtgtgcagccatagtttgggtatttttggtttatatgccctcaagtaaaagaaaagccgaaagggttaatcatatttgaaaaccatattttattgtattttgatgagatattaaattctcaaagttttattataaattctactaagttattttatgacatgaaaagttatttatgctataaattttttgaaacacaatacctacaataaactggtatgaataattgcatcatttc

SEQ ID NO: 8093 - DNA, 803 bp, Homo sapiens
  source 1..803: mol_type = unassigned DNA; mol_type = unassigned DNA
agtggctggtaggcagtggctgggaggcagcggcccaattagtgtcgtgcggcccgtggcgaggcgaggtccggggagcgagcgagcaagcaaggcgggaggggtggccggagctgcggcggctggcacaggaggaggagcccgggcgggcgaggggcggccggagagcgccagggcctgagctgccggagcggcgcctgtgagtgagtgcagaaagcaggcgcccgcgcgctagccgtggcaggagcagcccgcacgccgcgctctctccctgggcgacctgcagtttgcaatatgactttggaggaattctcggctggagagcagaagaccgaaagcgaccccgataacgtggtgttgtgcctgctggcggcggacgaggacgacgacagagatgtggctctgcagatccacttcaccctgatccaggcgttttgctgcgagaacgacatcaacatcctgcgcgtcagcaacccgggccggctggcggagctcctgctcttggagaccgacgctggccccgcggcgagcgagggcgccgagcagcccccggacctgcactgcgtgctggtgacgaatccacattcatctcaatggaaggatcctgccttaagtcaacttatttgtttttgccgggaaagtcgctacatggatcaatgggttccagtgattaatctccctgaacggtgatggcatctgaatgaaaataactgaaccaaattgcactgaagtttttgaaatacctttgtagttactcaagcagttactccctacactgatgcaaggattacagaaactgatgc

SEQ ID NO: 8094 - DNA, 874 bp, Homo sapiens
  source 1..874: mol_type = unassigned DNA; mol_type = unassigned DNA
agcggcccaattagtgtcgtgcggcccgtggcgaggcgaggtccggggagcgagcgagcaagcaaggcgggaggggtggccggagctgcggcggctggcacaggaggaggagcccgggcgggcgaggggcggccggagagcgccagggcctgagctgccggagcggcgcctgtgagtgagtgcagaaagcaggcgcccgcgcgctagccgtggcaggagcagcccgcacgccgcgctctctccctgggcgacctgcagtttgcaatatgactttggaggaattctcggctggagagcagaagaccgaaaggatggataaggtgggggatgccctggaggaagtgctcagcaaagccctgagtcagcgcacgatcactgtcggggtgtacgaagcggccaagctgctcaacgtgtaagtggggcccttgcgcgtcccccatggcaccccttcccgccccagcccgggaggtcgccttggctgggcgcccctcgcccggccgcgccacttcctgtcgcttttctgcctgtctcggaagggagggggcgagcgggccgggcggcgacccccagggacccgggcagtggttgagggcgcccgcgcttctgcgctcactggccccgcccgctgcccccagcgaccccgataacgtggtgttgtgcctgctggcggcggacgaggacgacgacagagatgtggctctgcagatccacttcaccctgatccaggcgttttgctgcgagaacgacatcaacatcctgcgcgtcagcaacccgggccggctggcggagctcctgctcttggagaccgacgctggccccgcggcgagcgagggcgccgagcagcccccggacctgcactgcgtgctggtgacgg

SEQ ID NO: 8095 - DNA, 688 bp, Homo sapiens
  source 1..688: mol_type = unassigned DNA; mol_type = unassigned DNA
gggactctccgtggagctcccacggactgaaagagcgtgccccccaacccgaacgagccccgccggggcctttgcaaagggcagcagtggccgtcgctgcccgtgcggctcccgtggctggcagcctgtggcaggggcactctcgggacttctcacgggacgcccggtccttgggcgtgcaggggtcatggggggtgacggggccgcgggagcgccgggttttcgtagagcccaggtgcgcggtggtgcttgcattcgagagggaggggcgtggtaccggacgaggggggcggcgatggccccgagggcaccggggctgacgggacccctcgcccttgcccgcgtgtaggatggataaggtgggggatgccctggaggaagtgctcagcaaagccctgagtcagcgcacgatcactgtcggggtgtacgaagcggccaagctgctcaacgtcgaccccgataacgtggtgttgtgcctgctggcggcggacgaggacgacgacagagatgtggctctgcagatccacttcaccctgatccaggcgttttgctgcgagaacgacatcaacatcctgcgcgtcagcaacccgggccggctggcggagctcctgctcttggagaccgacgctggccccgcggcgagcgagggcgccgagcagcccccggacctgcactgcgtgctggtgac

SEQ ID NO: 8096 - DNA, 1142 bp, Homo sapiens
  source 1..1142: mol_type = unassigned DNA; mol_type = unassigned DNA
ggagagcggggccctttgtcctccagtggctggtaggcagtggctgggaggcagcggcccaattagtgtcgtgcggcccgtggcgaggcgaggtccggggagcgagcgagcaagcaaggcgggaggggtggccggagctgcggcggctggcacaggaggaggagcccgggcgggcgaggggcggccggagagcgccagggcctgagctgccggagcggcgcctgtgagtgagtgcagaaagcaggcgcccgcgcgctagccgtggcaggagcagcccgcacgccgcgctctctccctgggcgacctgcagtttgcaatatgactttggaggaattctcggctggagagcagaagaccgaaaggatggataaggtgggggatgccctggaggaagtgctcagcaaagccctgagtcagcgcacgatcactgtcggggtgtacgaagcggccaagctgctcaacgtaatccacattcatctcaatggaaggatcctgccttaagtcaacttatttgtttttgccgggaaagtcgctacatggatcaatgggttccagtgattaatctccctgaacggtgatggcatctgaatgaaaataactgaaccaaattgcactgaagtttttgaaatacctttgtagttactcaagcagttactccctacactgatgcaaggattacagaaactgatgccaaggggctgagtgagttcaactacatgttctgggggcccggagatagatgactttgcagatggaaagaggtgaaaatgaagaaggaagctgtgttgaaacagaaaaataagtcaaaaggaacaaaaattacaaagaaccatgcaggaaggaaaactatgtattaatttagaatggttgagttacattaaaataaaccaaatatgttaaagtttaagtgtgcagccatagtttgggtatttttggtttatatgccctcaagtaaaagaaaagccgaaagggttaatcatatttgaaaaccatattttattgtattttgatgagatattaaattctcaaagttttattataaattctactaagttattttatgacatgaaaagttatttatgctataaattttttgaaacacaatacctacaataaactggtatgaataattgcatcatttc

SEQ ID NO: 8097 - DNA, 1635 bp, Homo sapiens
  source 1..1635: mol_type = unassigned DNA; mol_type = unassigned DNA
actattgcagcctccctgattccagaaggtaccttggtgtctgagatgctgccaccgcagaagaagccctgggagtccatggctaaggggctggtgctgggcgcgctcttcactagtttcctgctgctggtgtactcctatgccgtgcccccgctgcatgccggcctggcctccacgaccccggaggccgcagcgtcctgctctccacctgcactcgagccagaggcagtgatccgggccaacggctcggcgggggagtgccagccgcggcgcaacatcgtgttcttgaagacgcacaagacggccagcagcaccctgctcaacatcctgttccgcttcggccagaagcaccggctcaagttcgccttccctaacggccgcaatgacttcgactacccgaccttcttcgcccgcagcctggtgcaggactatcggcccggggcctgcttcaacatcatctgcaaccacatgcgcttccactacgacgaggtgcgcggcctggtgccgaccaacgccatcttcatcacggtgctccgcgaccccgcccgcttgttcgagtcctccttccactacttcgggccggtggtgcccctcacgtggaagctctcggccggcgacaagctgaccgagttcctgcaagacccggatcgctactacgaccccaacggcttcaatgcccactacctccgaaacctgctcttcttcgacctgggctatgacaacagcctggaccccagcagcccgcaggtgcaggagcacatcctggaggtggagcgtcgcttccacctggtgctccttcaagagtacttcgacgagtcgctggtgctgctgaaggacctgctgtgctgggagctggaggacgtgctctacttcaagctcaacgcccgccgcgactcgcccgtgccgcggctctcgggggagctgtatgggcgcgccaccgcctggaacatgctggactcccacctctaccgccacttcaacgccagcttctggcgcaaggtggaggccttcgggcgggagcgcatggcccgcgaggtggccgccctgcgccatgccaacgagcgcatgcggaccatctgcatcgacgggggccacgccgtggacgccgccgccatccaggacgaggccatgcagccctggcagccgctgggcaccaagtccatcctgggctacaacctcaagaagagcatcgggcagcggcacgcgcagctctgccggcgcatgctcacgcccgagatccagtacctgatggacctcggcgccaacctgtgggtcaccaagctctggaagttcattcgcgatttcctgcggtggtgacgtcccaccgcccagcggcttgcctgcctgctcgctccctgcagaggggctgagcaggacgccgctggtgctggccgcccccagccccctcctggtgccacctcagaccccggggtgagggggggctccctggggggaggcagccagccaagactgggcccatgaacacagagagggcctaaccgagatcagtatttaactaattataccagtttttattaaacccctttccctccccgataaagaatgttctatttctgcctccccttaaaggggagacctcagaagtaaaggaatttgatgttgtgtttttgttaa

SEQ ID NO: 8098 - DNA, 1908 bp, Homo sapiens
  source 1..1908: mol_type = unassigned DNA; mol_type = unassigned DNA
gaatctttctgtgcccttggatgaaagagctgcttgcttgttggggtccaaagagaggtgaggactggccagagctgtccagtggaggcagaaggcctgggcaacacctgcagggtactggggtgtgccacctgctatccccaggaagcaaactcatgaatattcacaccactggagtgggagggagccagccagcttgctgctgggtgtcattggagcattcctgtctcccagtgatcgcagaggcagcctgggagttggacgtggctcaggcagtgggtagaaaggggcagccagccacagcccgaggtgtctgagatgctgccaccgcagaagaagccctgggagtccatggctaaggggctggtgctgggcgcgctcttcactagtttcctgctgctggtgtactcctatgccgtgcccccgctgcatgccggcctggcctccacgaccccggaggccgcagcgtcctgctctccacctgcactcgagccagaggcagtgatccgggccaacggctcggcgggggagtgccagccgcggcgcaacatcgtgttcttgaagacgcacaagacggccagcagcaccctgctcaacatcctgttccgcttcggccagaagcaccggctcaagttcgccttccctaacggccgcaatgacttcgactacccgaccttcttcgcccgcagcctggtgcaggactatcggcccggggcctgcttcaacatcatctgcaaccacatgcgcttccactacgacgaggtgcgcggcctggtgccgaccaacgccatcttcatcacggtgctccgcgaccccgcccgcttgttcgagtcctccttccactacttcgggccggtggtgcccctcacgtggaagctctcggccggcgacaagctgaccgagttcctgcaagacccggatcgctactacgaccccaacggcttcaatgcccactacctccgaaacctgctcttcttcgacctgggctatgacaacagcctggaccccagcagcccgcaggtgcaggagcacatcctggaggtggagcgtcgcttccacctggtgctccttcaagagtacttcgacgagtcgctggtgctgctgaaggacctgctgtgctgggagctggaggacgtgctctacttcaagctcaacgcccgccgcgactcgcccgtgccgcggctctcgggggagctgtatgggcgcgccaccgcctggaacatgctggactcccacctctaccgccacttcaacgccagcttctggcgcaaggtggaggccttcgggcgggagcgcatggcccgcgaggtggccgccctgcgccatgccaacgagcgcatgcggaccatctgcatcgacgggggccacgccgtggacgccgccgccatccaggacgaggccatgcagccctggcagccgctgggcaccaagtccatcctgggctacaacctcaagaagagcatcgggcagcggcacgcgcagctctgccggcgcatgctcacgcccgagatccagtacctgatggacctcggcgccaacctgtgggtcaccaagctctggaagttcattcgcgatttcctgcggtggtgacgtcccaccgcccagcggcttgcctgcctgctcgctccctgcagaggggctgagcaggacgccgctggtgctggccgcccccagccccctcctggtgccacctcagaccccggggtgagggggggctccctggggggaggcagccagccaagactgggcccatgaacacagagagggcctaaccgagatcagtatttaactaattataccagtttttattaaacccctttccctccccgataaagaatgttctatttctgcctccccttaaaggggagacctcagaagtaaaggaatttgatgttgtgtttttgttaa

SEQ ID NO: 8099 - DNA, 1712 bp, Homo sapiens
  source 1..1712: mol_type = unassigned DNA; mol_type = unassigned DNA
aggcctggtggagcggggggcccggccgggtgcgccccgccgcccagtgagcgcccgggcggcgcggcccgggccgagccagccacgctgaggcggaggaggacggggacaaggtgtctgagatgctgccaccgcagaagaagccctgggagtccatggctaaggggctggtgctgggcgcgctcttcactagtttcctgctgctggtgtactcctatgccgtgcccccgctgcatgccggcctggcctccacgaccccggaggccgcagcgtcctgctctccacctgcactcgagccagaggcagtgatccgggccaacggctcggcgggggagtgccagccgcggcgcaacatcgtgttcttgaagacgcacaagacggccagcagcaccctgctcaacatcctgttccgcttcggccagaagcaccggctcaagttcgccttccctaacggccgcaatgacttcgactacccgaccttcttcgcccgcagcctggtgcaggactatcggcccggggcctgcttcaacatcatctgcaaccacatgcgcttccactacgacgaggtgcgcggcctggtgccgaccaacgccatcttcatcacggtgctccgcgaccccgcccgcttgttcgagtcctccttccactacttcgggccggtggtgcccctcacgtggaagctctcggccggcgacaagctgaccgagttcctgcaagacccggatcgctactacgaccccaacggcttcaatgcccactacctccgaaacctgctcttcttcgacctgggctatgacaacagcctggaccccagcagcccgcaggtgcaggagcacatcctggaggtggagcgtcgcttccacctggtgctccttcaagagtacttcgacgagtcgctggtgctgctgaaggacctgctgtgctgggagctggaggacgtgctctacttcaagctcaacgcccgccgcgactcgcccgtgccgcggctctcgggggagctgtatgggcgcgccaccgcctggaacatgctggactcccacctctaccgccacttcaacgccagcttctggcgcaaggtggaggccttcgggcgggagcgcatggcccgcgaggtggccgccctgcgccatgccaacgagcgcatgcggaccatctgcatcgacgggggccacgccgtggacgccgccgccatccaggacgaggccatgcagccctggcagccgctgggcaccaagtccatcctgggctacaacctcaagaagagcatcgggcagcggcacgcgcagctctgccggcgcatgctcacgcccgagatccagtacctgatggacctcggcgccaacctgtgggtcaccaagctctggaagttcattcgcgatttcctgcggtggtgacgtcccaccgcccagcggcttgcctgcctgctcgctccctgcagaggggctgagcaggacgccgctggtgctggccgcccccagccccctcctggtgccacctcagaccccggggtgagggggggctccctggggggaggcagccagccaagactgggcccatgaacacagagagggcctaaccgagatcagtatttaactaattataccagtttttattaaacccctttccctccccgataaagaatgttctatttctgcctccccttaaaggggagacctcagaagtaaaggaatttgatgttgtgtttttgttaa

SEQ ID NO: 8100 - DNA, 1791 bp, Homo sapiens
  source 1..1791: mol_type = unassigned DNA; mol_type = unassigned DNA
ggcagcctgggagttggacgtggctcaggcagtgggtagaaaggggcagccagccacagcccgagggtctcactgtgtcatccagagctggagtgcagcggcacagtcatggctcactggaactcaggctcaagcaatcctcccgcctcagccttccaagtaactaggactacaggcatgtgccaccacgcctggtgtctgagatgctgccaccgcagaagaagccctgggagtccatggctaaggggctggtgctgggcgcgctcttcactagtttcctgctgctggtgtactcctatgccgtgcccccgctgcatgccggcctggcctccacgaccccggaggccgcagcgtcctgctctccacctgcactcgagccagaggcagtgatccgggccaacggctcggcgggggagtgccagccgcggcgcaacatcgtgttcttgaagacgcacaagacggccagcagcaccctgctcaacatcctgttccgcttcggccagaagcaccggctcaagttcgccttccctaacggccgcaatgacttcgactacccgaccttcttcgcccgcagcctggtgcaggactatcggcccggggcctgcttcaacatcatctgcaaccacatgcgcttccactacgacgaggtgcgcggcctggtgccgaccaacgccatcttcatcacggtgctccgcgaccccgcccgcttgttcgagtcctccttccactacttcgggccggtggtgcccctcacgtggaagctctcggccggcgacaagctgaccgagttcctgcaagacccggatcgctactacgaccccaacggcttcaatgcccactacctccgaaacctgctcttcttcgacctgggctatgacaacagcctggaccccagcagcccgcaggtgcaggagcacatcctggaggtggagcgtcgcttccacctggtgctccttcaagagtacttcgacgagtcgctggtgctgctgaaggacctgctgtgctgggagctggaggacgtgctctacttcaagctcaacgcccgccgcgactcgcccgtgccgcggctctcgggggagctgtatgggcgcgccaccgcctggaacatgctggactcccacctctaccgccacttcaacgccagcttctggcgcaaggtggaggccttcgggcgggagcgcatggcccgcgaggtggccgccctgcgccatgccaacgagcgcatgcggaccatctgcatcgacgggggccacgccgtggacgccgccgccatccaggacgaggccatgcagccctggcagccgctgggcaccaagtccatcctgggctacaacctcaagaagagcatcgggcagcggcacgcgcagctctgccggcgcatgctcacgcccgagatccagtacctgatggacctcggcgccaacctgtgggtcaccaagctctggaagttcattcgcgatttcctgcggtggtgacgtcccaccgcccagcggcttgcctgcctgctcgctccctgcagaggggctgagcaggacgccgctggtgctggccgcccccagccccctcctggtgccacctcagaccccggggtgagggggggctccctggggggaggcagccagccaagactgggcccatgaacacagagagggcctaaccgagatcagtatttaactaattataccagtttttattaaacccctttccctccccgataaagaatgttctatttctgcctccccttaaaggggagacctcagaagtaaaggaatttgatgttgtgtttttgtt

SEQ ID NO: 8101 - DNA, 1819 bp, Homo sapiens
  source 1..1819: mol_type = unassigned DNA; mol_type = unassigned DNA
gcatggaccaggcctggtggagcggggggcccggccgggtgcgccccgccgcccagtgagcgcccgggcggcgcggcccgggccgagccagccacgctgaggcggaggaggacggggacaagggtctcactgtgtcatccagagctggagtgcagcggcacagtcatggctcactggaactcaggctcaagcaatcctcccgcctcagccttccaagtaactaggactacaggtgtctgagatgctgccaccgcagaagaagccctgggagtccatggctaaggggctggtgctgggcgcgctcttcactagtttcctgctgctggtgtactcctatgccgtgcccccgctgcatgccggcctggcctccacgaccccggaggccgcagcgtcctgctctccacctgcactcgagccagaggcagtgatccgggccaacggctcggcgggggagtgccagccgcggcgcaacatcgtgttcttgaagacgcacaagacggccagcagcaccctgctcaacatcctgttccgcttcggccagaagcaccggctcaagttcgccttccctaacggccgcaatgacttcgactacccgaccttcttcgcccgcagcctggtgcaggactatcggcccggggcctgcttcaacatcatctgcaaccacatgcgcttccactacgacgaggtgcgcggcctggtgccgaccaacgccatcttcatcacggtgctccgcgaccccgcccgcttgttcgagtcctccttccactacttcgggccggtggtgcccctcacgtggaagctctcggccggcgacaagctgaccgagttcctgcaagacccggatcgctactacgaccccaacggcttcaatgcccactacctccgaaacctgctcttcttcgacctgggctatgacaacagcctggaccccagcagcccgcaggtgcaggagcacatcctggaggtggagcgtcgcttccacctggtgctccttcaagagtacttcgacgagtcgctggtgctgctgaaggacctgctgtgctgggagctggaggacgtgctctacttcaagctcaacgcccgccgcgactcgcccgtgccgcggctctcgggggagctgtatgggcgcgccaccgcctggaacatgctggactcccacctctaccgccacttcaacgccagcttctggcgcaaggtggaggccttcgggcgggagcgcatggcccgcgaggtggccgccctgcgccatgccaacgagcgcatgcggaccatctgcatcgacgggggccacgccgtggacgccgccgccatccaggacgaggccatgcagccctggcagccgctgggcaccaagtccatcctgggctacaacctcaagaagagcatcgggcagcggcacgcgcagctctgccggcgcatgctcacgcccgagatccagtacctgatggacctcggcgccaacctgtgggtcaccaagctctggaagttcattcgcgatttcctgcggtggtgacgtcccaccgcccagcggcttgcctgcctgctcgctccctgcagaggggctgagcaggacgccgctggtgctggccgcccccagccccctcctggtgccacctcagaccccggggtgagggggggctccctggggggaggcagccagccaagactgggcccatgaacacagagagggcctaaccgagatcagtatttaactaattataccagtttttattaaacccctttccctccccgataaagaatgttctatttctgcctccccttaaaggggagacctcagaagtaaaggaatttgatgttg

SEQ ID NO: 8102 - DNA, 894 bp, Homo sapiens
  source 1..894: mol_type = unassigned DNA; mol_type = unassigned DNA
cctagagagaaggcgactctggtctgccttgtggcagtttaagctctggtgtctgagatgctgccaccgcagaagaagccctgggagtccatggctaaggggctggtgctgggcgcgctcttcactagtttcctgctgctggtgtactcctatgccgtgcccccgctgcatgccggcctggcctccacgaccccggaggccgcagcgtcctgctctccacctgcactcgagccagaggcagtgatccgggccaacggctcggcgggggagtgccagccgcggcgcaacatcgtgttcttgaagacgcacaagacggccagcagcaccctgctcaacatcctgttccgcttcggccagaagcaccggctcaagttcgccttccctaacggccgcaatgacttcgactacccgaccttcttcgcccgcagcctggtgcaggactatcggcccggggcctgcttcaacatcatctgcaaccacatgcgcttccactacgacgaggtgcgcggcctggtgccgaccaacgccatcttcatcacggtgctccgcgaccccgcccgcttgttcgagtcctccttccactacttcgggccggtggtgcccctcacgtggaagctctcggccggcgacaagctgaccgagttcctgcaagacccggatcgctactacgaccccaacggcttcaatgcccactacctccgaaacctgctcttcttcgacctgggctatgacaacagcctggaccccagcagcccgcaggtgcaggagcacatcctggaggtggagcgtcgcttccacctggtgctccttcaagagtacttcgacgagtcgctggtgctgctgaaggacctgctgtgctgggagctggaggacgtgctctacttcaagctcaac

SEQ ID NO: 8103 - DNA, 851 bp, Homo sapiens
  source 1..851: mol_type = unassigned DNA; mol_type = unassigned DNA
cccgggccgagccagccacgctgaggcggaggaggacggggacaaggtgtctgagatgctgccaccgcagaagaagccctgggagtccatggctaaggggctggtgctgggcgcgctcttcactagtttcctgctgctggtgtactcctatgccgtgcccccgctgcatgccggcctggcctccaccaggaccccggaggccgcagcgtcctgctctccacctgcactcgagccagaggcagtgatccgggccaacggctcggcgggggagtgccagccgcggcgcaacatcgtgttcttgaagacgcacaagacggccagcagcaccctgctcaacatcctgttccgcttcggccagaagcaccggctcaagttcgccttccctaacggccgcaatgacttcgactacccgaccttcttcgcccgcagcctggtgcaggactatcggcccggggcctgcttcaacatcatctgcaaccacatgcgcttccactacgacgaggtgcgcggcctggtgccgaccaacgccatcttcatcacggtgctccgcgaccccgcccgcttgttcgagtcctccttccactacttcgggccggtggtgcccctcacgtggaagctctcggccggcgacaagctgaccgagttcctgcaagacccggatcgctactacgaccccaacggcttcaatgcccactacctccgaaacctgctcttcttcgacctgggctatgacaacagcctggaccccagcagcccgcaggtgcaggagcacatcctggaggtggagcgtcgcttccacctggtgctccttcaagagtacttcgacgagtcgctggtgctgctgaaggacc

SEQ ID NO: 8104 - DNA, 882 bp, Homo sapiens
  source 1..882: mol_type = unassigned DNA; mol_type = unassigned DNA
actattgcagcctccctgattccagaaggtaccttgggtctcactgtgtcatccagagctggagtgcagcggcacagtcatggctcactggaactcaggctcaagcaatcctcccgcctcagccttccaagtaactaggactacaggtgtctgagatgctgccaccgcagaagaagccctgggagtccatggctaaggggctggtgctgggcgcgctcttcactagtttcctgctgctggtgtactcctatgccgtgcccccgctgcatgccggcctggcctccacgaccccggaggccgcagcgtcctgctctccacctgcactcgagccagaggcagtgatccgggccaacggctcggcgggggagtgccagccgcggcgcaacatcgtgttcttgaagacgcacaagacggccagcagcaccctgctcaacatcctgttccgcttcggccagaagcaccggctcaagttcgccttccctaacggccgcaatgacttcgactacccgaccttcttcgcccgcagcctggtgcaggactatcggcccggggcctgcttcaacatcatctgcaaccacatgcgcttccactacgacgaggtgcgcggcctggtgccgaccaacgccatcttcatcacggtgctccgcgaccccgcccgcttgttcgagtcctccttccactacttcgggccggtggtgcccctcacgtggaagctctcggccggcgacaagctgaccgagttcctgcaagacccggatcgctactacgaccccaacggcttcaatgcccactacctccgaaacctgctcttcttcgacctgggctatgacaacagcctggaccccagcagcccgcaggtgcaggagcacatcctggaggtgg

SEQ ID NO: 8105 - DNA, 755 bp, Homo sapiens
  source 1..755: mol_type = unassigned DNA; mol_type = unassigned DNA
gattccagaaggtaccttgggtctcactgtgtcatccagagctggagtgcagcggcacagtcatggctcactggaactcaggctcaagcaatcctcccgcctcagccttccaagtaactaggactacaggcatgtgccaccacgcctggtgtctgagatgctgccaccgcagaagaagccctgggagtccatggctaaggggctggtgctgggcgcgctcttcactagtttcctgctgctggtgtactcctatgccgtgcccccgctgcatgccggcctggcctccacgaccccggaggccgcagcgtcctgctctccacctgcactcgagccagaggcagtgatccgggccaacggctcggcgggggagtgccagccgcggcgcaacatcgtgttcttgaagacgcacaagacggccagcagcaccctgctcaacatcctgttccgcttcggccagaagcaccggctcaagttcgccttccctaacggccgcaatgacttcgactacccgaccttcttcgcccgcagcctggtgcaggactatcggcccggggcctgcttcaacatcatctgcaaccacatgcgcttccactacgacgaggtgcgcggcctggtgccgaccaacgccatcttcatcacggtgctccgcgaccccgcccgcttgttcgagtcctccttccactacttcgggccggtggtgcccctcacgtggaagctctcggccggcgacaagctgaccgagttcctgcaagacc

SEQ ID NO: 8106 - DNA, 582 bp, Homo sapiens
  source 1..582: mol_type = unassigned DNA; mol_type = unassigned DNA
acaaatggaattctgggcccggctgcaggctcctgaagggctccttgcttcactttgactgggtgtctgagatgctgccaccgcagaagaagccctgggagtccatggctaaggggctggtgctgggcgcgctcttcactagtttcctgctgctggtgtactcctatgccgtgcccccgctgcatgccggcctggcctccacgaccccggaggccgcagcgtcctgctctccacctgcactcgagccagaggcagtgatccgggccaacggctcggcgggggagtgccagccgcggcgcaacatcgtgttcttgaagacgcacaagacggccagcagcaccctgctcaacatcctgttccgcttcggccagaagcaccggctcaagttcgccttccctaacggccgcaatgacttcgactacccgaccttcttcgcccgcagcctggtgcaggactatcggcccggggcctgcttcaacatcatctgcaaccacatgcgcttccactacgacgaggtgcgcggcctggtgccgaccaacgccatcttcatcacggtgctccgcgaccccgcccgcttgttcg

SEQ ID NO: 8107 - DNA, 533 bp, Homo sapiens
  source 1..533: mol_type = unassigned DNA; mol_type = unassigned DNA
attgcagcctccctgattccagaaggtaccttggtgtctgagatgctgccaccgcagaagaagccctgggagtccatggctaaggggctggtgctgggcgcgctcttcactagtttcctgctgctggtgtactcctatgccgtgcccccgctgcatgccggcctggcctccaccaggaccccggaggccgcagcgtcctgctctccacctgcactcgagccagaggcagtgatccgggccaacggctcggcgggggagtgccagccgcggcgcaacatcgtgttcttgaagacgcacaagacggccagcagcaccctgctcaacatcctgttccgcttcggccagaagcaccggctcaagttcgccttccctaacggccgcaatgacttcgactacccgaccttcttcgcccgcagcctggtgcaggactatcggcccggggcctgcttcaacatcatctgcaaccacatgcgcttccactacgacgaggtgcgcggcctggtgccgaccaacgccatcttcatcacggtgct

SEQ ID NO: 8108 - DNA, 656 bp, Homo sapiens
  source 1..656: mol_type = unassigned DNA; mol_type = unassigned DNA
attcctgtctcccagtgatcgcagaggcagcctgggagttggacgtggctcaggcagtgggtagaaaggggcagccagccacagcccgagggtctcactgtgtcatccagagctggagtgcagcggcacagtcatggctcactggaactcaggctcaagcaatcctcccgcctcagccttccaagtaactaggactacaggtgtctgagatgctgccaccgcagaagaagccctgggagtccatggctaaggggctggtgctgggcgcgctcttcactagtttcctgctgctggtgtactcctatgccgtgcccccgctgcatgccggcctggcctccacgaccccggaggccgcagcgtcctgctctccacctgcactcgagccagaggcagtgatccgggccaacggctcggcgggggagtgccagccgcggcgcaacatcgtgttcttgaagacgcacaagacggccagcagcaccctgctcaacatcctgttccgcttcggccagaagcaccggctcaagttcgccttccctaacggccgcaatgacttcgactacccgaccttcttcgcccgcagcctggtgcaggactatcggcccggggcctgcttcaacatcatctgcaaccacatgcgcttccactacgacgaggtg

SEQ ID NO: 8109 - DNA, 584 bp, Homo sapiens
  source 1..584: mol_type = unassigned DNA; mol_type = unassigned DNA
gaagggctccttgcttcactttgactgggtgaggaatatggatgagcccttttaggggctccacacgactccaaacagggcagagcaggatggaacacaggtgcccatgggggtcatcaggctggggactgctggaatctccaggtgtctgagatgctgccaccgcagaagaagccctgggagtccatggctaaggggctggtgctgggcgcgctcttcactagtttcctgctgctggtgtactcctatgccgtgcccccgctgcatgccggcctggcctccacgaccccggaggccgcagcgtcctgctctccacctgcactcgagccagaggcagtgatccgggccaacggctcggcgggggagtgccagccgcggcgcaacatcgtgttcttgaagacgcacaagacggccagcagcaccctgctcaacatcctgttccgcttcggccagaagcaccggctcaagttcgccttccctaacggccgcaatgacttcgactacccgaccttcttcgcccgcagcctggtgcaggactatcggcccggggcctgcttcaacatcatctgcaaccacatgcgctt

SEQ ID NO: 8110 - DNA, 639 bp, Homo sapiens
  source 1..639: mol_type = unassigned DNA; mol_type = unassigned DNA
atgcacaaatggaattctgggcccggctgcaggctcctgaagggctccttgcttcactttgactgggtgaggaatatggatgagcccttttaggggctccacacgactccaaacagggcagagcaggatggaacacaggtgcccatgggggtcatcaggctggggactgctggaatctccagggtctcactgtgtcatccagagctggagtgcagcggcacagtcatggctcactggaactcaggctcaagcaatcctcccgcctcagccttccaagtaactaggactacaggtgtctgagatgctgccaccgcagaagaagccctgggagtccatggctaaggggctggtgctgggcgcgctcttcactagtttcctgctgctggtgtactcctatgccgtgcccccgctgcatgccggcctggcctccaccaggaccccggaggccgcagcgtcctgctctccacctgcactcgagccagaggcagtgatccgggccaacggctcggcgggggagtgccagccgcggcgcaacatcgtgttcttgaagacgcacaagacggccagcagcaccctgctcaacatcctgttccgcttcggccagaagcaccggctcaagttcgccttccctaacggccg

SEQ ID NO: 8111 - DNA, 553 bp, Homo sapiens
  source 1..553: mol_type = unassigned DNA; mol_type = unassigned DNA
agtgatcgcagaggcagcctgggagttggacgtggctcaggcagtgggtagaaaggggcagccagccacagcccgaggatgctaaataaacctgcgctttgactgagacctgtcacgtgaggtcagggtctcactgtgtcatccagagctggagtgcagcggcacagtcatggctcactggaactcaggctcaagcaatcctcccgcctcagccttccaagtaactaggactacaggtgtctgagatgctgccaccgcagaagaagccctgggagtccatggctaaggggctggtgctgggcgcgctcttcactagtttcctgctgctggtgtactcctatgccgtgcccccgctgcatgccggcctggcctccacgaccccggaggccgcagcgtcctgctctccacctgcactcgagccagaggcagtgatccgggccaacggctcggcgggggagtgccagccgcggcgcaacatcgtgttcttgaagacgcacaagacggccagcagcaccctgctcaacatcctgttccgcttcggccagaagcaccg

SEQ ID NO: 8112 - DNA, 639 bp, Homo sapiens
  source 1..639: mol_type = unassigned DNA; mol_type = unassigned DNA
tcagccagcttaaaaattaaaaggagtggaaagtttggggccctggttctctacccggttcattttaatttttaaattttaaccttctccctgccccattccccaacctctctttgagttgcttcacccaccgtctctgcaaccctggggctgtctctttccaggtggttgtcagtctatctctccagtgcctctctgtccctgtctggaccctgctggggggccacagagcaggcaaaggcagggctcaactgccaggcctgggcagccttgggggctccctggggccagcttcctgacacttgccctactctgtgctgcccctgcaggtgtctgagatgctgccaccgcagaagaagccctgggagtccatggctaaggggctggtgctgggcgcgctcttcactagtttcctgctgctggtgtactcctatgccgtgcccccgctgcatgccggcctggcctccacgaccccggaggccgcagcgtcctgctctccacctgcactcgagccagaggcagtgatccgggccaacggctcggcgggggagtgccagccgcggcgcaacatcgtgttcttgaagacgcacaagacggccagcagcaccctgctcaacatcctgttccgcttcggccaga

SEQ ID NO: 8113 - DNA, 563 bp, Homo sapiens
  source 1..563: mol_type = unassigned DNA; mol_type = unassigned DNA
tcctgaagggctccttgcttcactttgactgggtgaggaatatggatgagcccttttaggggctccacacgactccaaacagggcagagcaggatggaacacaggtgcccatgggggtcatcaggctggggactgctggaatctccagggtctcactgtgtcatccagagctggagtgcagcggcacagtcatggctcactggaactcaggctcaagcaatcctcccgcctcagccttccaagtaactaggactacaggtgtctgagatgctgccaccgcagaagaagccctgggagtccatggctaaggggctggtgctgggcgcgctcttcactagtttcctgctgctggtgtactcctatgccgtgcccccgctgcatgccggcctggcctccacgaccccggaggccgcagcgtcctgctctccacctgcactcgagccagaggcagtgatccgggccaacggctcggcgggggagtgccagccgcggcgcaacatcgtgttcttgaagacgcacaagacggccagcagcaccctgctcaacatcctgttccgcttcgg

SEQ ID NO: 8114 - DNA, 567 bp, Homo sapiens
  source 1..567: mol_type = unassigned DNA; mol_type = unassigned DNA
gattccagaaggtaccttgaaaagttctccagagaatggctaggggcgcctccagctttctcattttacagatgaaaaactgagactccatgagggttcttggcttgtctgaaatcacagtgctggattgaaacacaggcttgagggtcccagagcctgagggtctcactgtgtcatccagagctggagtgcagcggcacagtcatggctcactggaactcaggctcaagcaatcctcccgcctcagccttccaagtaactaggactacaggtgtctgagatgctgccaccgcagaagaagccctgggagtccatggctaaggggctggtgctgggcgcgctcttcactagtttcctgctgctggtgtactcctatgccgtgcccccgctgcatgccggcctggcctccacgaccccggaggccgcagcgtcctgctctccacctgcactcgagccagaggcagtgatccgggccaacggctcggcgggggagtgccagccgcggcgcaacatcgtgttcttgaagacgcacaagacggccagcagcaccctgctcaacatcctgtt

SEQ ID NO: 8115 - DNA, 572 bp, Homo sapiens
  source 1..572: mol_type = unassigned DNA; mol_type = unassigned DNA
gatgcacaaatggaattctgggcccggctgcaggctcctgaagggctccttgcttcactttgactgggtgaggaatatggatgagcccttttaggggctccacacgactccaaacagggcagagcaggatggaacacaggtgcccatgggggtcatcaggctggggactgctggaatctccagccttagagcctgttctgggctctctgcaggcgtctgcggttgctgtgtccttggcccaaggatacctggaatctttctgtgcccttggatgaaagagctgcttgcttgttggggtccaaagagaggtgtctgagatgctgccaccgcagaagaagccctgggagtccatggctaaggggctggtgctgggcgcgctcttcactagtttcctgctgctggtgtactcctatgccgtgcccccgctgcatgccggcctggcctccacgaccccggaggccgcagcgtcctgctctccacctgcactcgagccagaggcagtgatccgggccaacggctcggcgggggagtgccagccgcggcgcaacatcgtgttcttgaagacgcacaag

SEQ ID NO: 8116 - DNA, 567 bp, Homo sapiens
  source 1..567: mol_type = unassigned DNA; mol_type = unassigned DNA
ggaattctgggcccggctgcaggctcctgaagggctccttgcttcactttgactgggtgaggaatatggatgagcccttttaggggctccacacgactccaaacagggcagagcaggatggaacacaggtgcccatgggggtcatcaggctggggactgctggaatctccaggatgctaaataaacctgcgctttgactgagacctgtcacgtgaggtcagggtctcactgtgtcatccagagctggagtgcagcggcacagtcatggctcactggaactcaggctcaagcaatcctcccgcctcagccttccaagtaactaggactacaggtgtctgagatgctgccaccgcagaagaagccctgggagtccatggctaaggggctggtgctgggcgcgctcttcactagtttcctgctgctggtgtactcctatgccgtgcccccgctgcatgccggcctggcctccacgaccccggaggccgcagcgtcctgctctccacctgcactcgagccagaggcagtgatccgggccaacggctcggcgggggagtgccagccgcggcg

SEQ ID NO: 8117 - DNA, 575 bp, Homo sapiens
  source 1..575: mol_type = unassigned DNA; mol_type = unassigned DNA
gatgcacaaatggaattctgggcccggctgcaggctcctgaagggctccttgcttcactttgactggccttagagcctgttctgggctctctgcaggcgtctgcggttgctgtgtccttggcccaaggatacctggaatctttctgtgcccttggatgaaagagctgcttgcttgttggggtccaaagagaggatgctaaataaacctgcgctttgactgagacctgtcacgtgaggtcagggtctcactgtgtcatccagagctggagtgcagcggcacagtcatggctcactggaactcaggctcaagcaatcctcccgcctcagccttccaagtaactaggactacaggtgtctgagatgctgccaccgcagaagaagccctgggagtccatggctaaggggctggtgctgggcgcgctcttcactagtttcctgctgctggtgtactcctatgccgtgcccccgctgcatgccggcctggcctccacgaccccggaggccgcagcgtcctgctctccacctgcactcgagccagaggcagtgatccgggccaacggctcggcgggggagtg

SEQ ID NO: 8118 - DNA, 1782 bp, Homo sapiens
  source 1..1782: mol_type = unassigned DNA; mol_type = unassigned DNA
ctggggctgtctctttccaggtggttgtcagtctatctctccagtgcctctctgtccctgtctggaccctgctggggggccacagagcaggcaaaggcagggctcaactgccaggcctgggcagccttgggggctccctggggccagcttcctgacacttgccctactctgtgctgcccctgcaggtgtctgagatgctgccaccgcagaagaagccctgggagtccatggctaaggggctggtgctgggcgcgctcttcactagtttcctgctgctggtgtactcctatgccgtgcccccgctgcatgccggcctggcctccacgaccccggaggccgcagcgtcctgctctccacctgcactcgagccagaggcagtgatccgggccaacggctcggcgggggagtgccagccgcggcgcaacatcgtgttcttgaagacgcacaagacggccagcagcaccctgctcaacatcctgttccgcttcggccagaagcaccggctcaagttcgccttccctaacggccgcaatgacttcgactacccgaccttcttcgcccgcagcctggtgcaggactatcggcccggggcctgcttcaacatcatctgcaaccacatgcgcttccactacgacgaggtgcgcggcctggtgccgaccaacgccatcttcatcacggtgctccgcgaccccgcccgcttgttcgagtcctccttccactacttcgggccggtggtgcccctcacgtggaagctctcggccggcgacaagctgaccgagttcctgcaagacccggatcgctactacgaccccaacggcttcaatgcccactacctccgaaacctgctcttcttcgacctgggctatgacaacagcctggaccccagcagcccgcaggtgcaggagcacatcctggaggtggagcgtcgcttccacctggtgctccttcaagagtacttcgacgagtcgctggtgctgctgaaggacctgctgtgctgggagctggaggacgtgctctacttcaagctcaacgcccgccgcgactcgcccgtgccgcggctctcgggggagctgtatgggcgcgccaccgcctggaacatgctggactcccacctctaccgccacttcaacgccagcttctggcgcaaggtggaggccttcgggcgggagcgcatggcccgcgaggtggccgccctgcgccatgccaacgagcgcatgcggaccatctgcatcgacgggggccacgccgtggacgccgccgccatccaggacgaggccatgcagccctggcagccgctgggcaccaagtccatcctgggctacaacctcaagaagagcatcgggcagcggcacgcgcagctctgccggcgcatgctcacgcccgagatccagtacctgatggacctcggcgccaacctgtgggtcaccaagctctggaagttcattcgcgatttcctgcggtggtgacgtcccaccgcccagcggcttgcctgcctgctcgctccctgcagaggggctgagcaggacgccgctggtgctggccgcccccagccccctcctggtgccacctcagaccccggggtgagggggggctccctggggggaggcagccagccaagactgggcccatgaacacagagagggcctaaccgagatcagtatttaactaattataccagtttttattaaacccctttccctccccgataaagaatgttctatttctgcctccccttaaaggggagacctcagaagtaaaggaatttgatgttgtgtttttgtt

SEQ ID NO: 8119 - DNA, 548 bp, Homo sapiens
  source 1..548: mol_type = unassigned DNA; mol_type = unassigned DNA
aagctcgggcttcagaaggaactctgcaacgctgacagaggcaaaaatctgctaactcagggggcagactcaaccaagactgtgagcaggcctggggaatgaccccccgatctccaaccagtgccttccgcagctgcacggctgtctccagctgtctctgcccctcttcctggccctggctccatctctctgtcacctcacccttccctgtgccacatgggccctctctctcctgccaggacgctgcggctctggggacctcggagcctgggggtggctctgggagtcttcatgaccattggctttgcactccagctcttgggagggcccttccagaggaggctacctgggctacagctccgacagccctcggccccatccctacgaccagcccttccgtcctgcccaccccggcagcgactggtgttcctgaagacacataaatccgggagcagctctgtgctgagcctgcttcaccgctatggggaccagcacgggctgcgcttcgccctccctgcccgctaccagtttggctacccaaagctctt

SEQ ID NO: 8120 - DNA, 735 bp, Homo sapiens
  source 1..735: mol_type = unassigned DNA; mol_type = unassigned DNA
gtctctctgtccctctgtctctctctctctgtttctctgtgtgtgtgtgtgtgtgtgtgtgtgtctctctctctttctgtctccctctccagccccaccctttcagtctcctccgggtgcactgataaggttggaaagtggaatggtggacgctgacagaggcaaaaatctgctaactcagggggcagactcaaccaagactgtgagcaggcctggggaatgaccccccgatctccaaccagtgccttccgcagctgcacggctgtctccagctgtctctgcccctcttcctggccctggctccatctctctgtcacctcacccttccctgtgccacatgggccctctctctcctgccaggacgctgcggctctggggacctcggagcctgggggtggctctgggagtcttcatgaccattggctttgcactccagctcttgggagggcccttccagaggaggctacctgggctacagctccgacagccctcggccccatccctacgaccagcccttccgtcctgcccaccccggcagcgactggtgttcctgaagacacataaatccgggagcagctctgtgctgagcctgcttcaccgctatggggaccagcacgggctgcgcttcgccctccctgcccgctaccagtttggctacccaaagctcttccaggcctctagggtaaaaggctaccgcccacagggtggaggcacccagctccccttccacatcct

SEQ ID NO: 8121 - DNA, 579 bp, Homo sapiens
  source 1..579: mol_type = unassigned DNA; mol_type = unassigned DNA
gattaggaagctcgggcttcagaaggaactctgcaacgctgacagaggcaaaaatctgctaactcagggggcagactcaaccaagactgtgagcaggcctggggaatgaccccccgatctccaaccagtgccttccgcagctgcacggctgtctccagctgtctctgcccctcttcctggccctggctccatctctctgtcacctcacccttccctgtgccacatgggccctctctctcctgccaggacgctgcggctctggggacctcggagcctgggggtggctctgggagtcttcatgaccattggctttgcactccagctcttgggagggcccttccagaggaggtacttcaggtcatgccttctgacagcttctttttttccattgtccgagacccagcggctctggctcgctctgccttctcctactataaatccacctcatcagccttccgcaagtcaccatctttggctgccttcctggccaatcctcgaggcttctacaggcctggggcccgtggggaccactacgctcgcaacttactatggtttgactttggcctgccctttccccca

SEQ ID NO: 8122 - DNA, 1404 bp, Homo sapiens
  source 1..1404: mol_type = unassigned DNA; mol_type = unassigned DNA
gtgagcaggcctggggaatgaccccccgatctccaaccagtgccttccgcagctgcacggctgtctccagctgtctctgcccctcttcctggccctggctccatctctctgtcacctcacccttccctgtgccacatgggccctctctctcctgccaggacgctgcggctctggggacctcggagcctgggggtggctctgggagtcttcatgaccattggctttgcactccagctcttgggagggcccttccagaggaggtacttcaggtcatgccttctgacagcttctttttttccattgtccgagacccagcggctctggctcgctctgccttctcctactataaatccacctcatcagccttccgcaagtcaccatctttggctgccttcctggccaatcctcgaggcttctacaggcctggggcccgtggggaccactacgctcgcaacttactatggtttgactttggcctgccctttcccccagagaagagggccaagagagggaatattcatccccccagagaccccaaccccccacagctgcaggtcttgccttctggtgctggccctcgagcccaaaccctcaatcccaatgccctcatccatcctgtttccactgttactgatcatcgcagccagatatcaagccctgcctctttcgatttggggtcttcatccttcatccagtggggtctggcatggctggactctgtctttgacctggtcatggtggctgagtacttcgatgagtcattggttctgctggcagatgccctgtgctggggtctagatgacgtggtgggcttcatgcacaatgcccaggctggacataagcagggcctcagcactgtcagcaacagtggactgactgcggaggaccggcagctgactgcacgggcccgagcctggaacaacctggactgggctctctatgtccacttcaaccgcagtctctgggcacggatagagaaatacggccagggccggctgcagacagctgtggccgagctccgggctcgccgagaggccctagcgaaacattgtctggtagggggtgaggcttctgaccccaaatacatcactgatcgccggttccgccccttccagtttgggtcagctaaggttttgggctatatacttcggagtggattgagcccccaagaccaagaggaatgtgagcgcctagctacccctgagctccagtacaaggacaagctggatgccaagcagttcccccctaccgtctcactgcccctcaagacttcaaggccactctccccataaacatcagactacagatttaggtggaagagcagccatgtttgaagggcacatgtgatgagtggggggcagcaagatgccatttctgcatctcccagaagggatgagtctttgt

SEQ ID NO: 8123 - DNA, 1695 bp, Homo sapiens
  source 1..1695: mol_type = unassigned DNA; mol_type = unassigned DNA
gtcgggcggtggctgggatgggcgggagggcccggcccgatttcccttgctgctccccttgtggcctgacgctgacagaggcaaaaatctgctaactcagggggcagactcaaccaagactgtgagcaggcctggggaatgaccccccgatctccaaccagtgccttccgcagctgcacggctgtctccagctgtctctgcccctcttcctggccctggctccatctctctgtcacctcacccttccctgtgccacatgggccctctctctcctgccaggacgctgcggctctggggacctcggagcctgggggtggctctgggagtcttcatgaccattggctttgcactccagctcttgggagggcccttccagaggaggtacttcaggtcatgccttctgacagcttctttttttccattgtccgagacccagcggctctggctcgctctgccttctcctactataaatccacctcatcagccttccgcaagtcaccatctttggctgccttcctggccaatcctcgaggcttctacaggcctggggcccgtggggaccactacgctcgcaacttactatggtttgactttggcctgccctttcccccagagaagagggccaagagagggaatattcatccccccagagaccccaaccccccacagctgcaggtcttgccttctggtgctggccctcgagcccaaaccctcaatcccaatgccctcatccatcctgtttccactgttactgatcatcgcagccagatatcaagccctgcctctttcgatttggggtcttcatccttcatccagtggggtctggcatggctggactctgtctttgacctggtcatggtggctgagtacttcgatgagtcattggttctgctggcagatgccctgtgctggggtctagatgacgtggtgggcttcatgcacaatgcccaggctggacataagcagggcctcagcactgtcagcaacagtggactgactgcggaggaccggcagctgactgcacgggcccgagcctggaacaacctggactgggctctctatgtccacttcaaccgcagtctctgggcacggatagagaaatacggccagggccggctgcagacagctgtggccgagctccgggctcgccgagaggccctagcgaaacattgtctggtagggggtgaggcttctgaccccaaatacatcactgatcgccggttccgccccttccagtttgggtcagctaaggttttgggctatatacttcggagtggattgagcccccaagaccaagaggaatgtgagcgcctagctacccctgagctccagtacaaggacaagctggatgccaagcagttcccccctaccgtctcactgcccctcaagacttcaaggccactctccccataaacatcagactacagatttaggtggaagagcagccatgtttgaagggcacatgtgatgagtggggggcagcaagatgccatttctgcatctcccagaagggatgagtctttgtcccgatgcaagccccctcttcgctgggctcccagcagtgcttccctcctccaccctccactcattttgttctttccccccaactttttttttttttgaaacggagtcttgctctgtcccccaggctggagtgcagtggcatgatctcggctcactgcaacctctgcctcc

SEQ ID NO: 8124 - DNA, 2537 bp, Homo sapiens
  source 1..2537: mol_type = unassigned DNA; mol_type = unassigned DNA
gaggggaagatgcagcgagggagagacctagaaccgcgatcaaagctgcagcagctgctggggctggcggcacaaagggaggagggaggagcctgggcgctgagaaagttcttggggaaagttgagctgagccaagagtcgggcggtggctgggatgggcgggagggcccggcccgatttcccttgctgctccccttgtggcctgacgctgacagaggcaaaaatctgctaactcagggggcagactcaaccaagactgtgagcaggcctggggaatgaccccccgatctccaaccagtgccttccgcagctgcacggctgtctccagctgtctctgcccctcttcctggccctggctccatctctctgtcacctcacccttccctgtgccacatgggccctctctctcctgccaggacgctgcggctctggggacctcggagcctgggggtggctctgggagtcttcatgaccattggctttgcactccagctcttgggagggcccttccagaggaggctacctgggctacagctccgacagccctcggccccatccctacgaccagcccttccgtcctgcccaccccggcagcgactggtgttcctgaagacacataaatccgggagcagctctgtgctgagcctgcttcaccgctatggggaccagcacgggctgcgcttcgccctccctgcccgctaccagtttggctacccaaagctcttccaggcctctagggtaaaaggctaccgcccacagggtggaggcacccagctccccttccacatcctctgtcaccacatgaggttcaacctgaaagaggtacttcaggtcatgccttctgacagcttctttttttccattgtccgagacccagcggctctggctcgctctgccttctcctactataaatccacctcatcagccttccgcaagtcaccatctttggctgccttcctggccaatcctcgaggcttctacaggcctggggcccgtggggaccactacgctcgcaacttactatggtttgactttggcctgccctttcccccagagaagagggccaagagagggaatattcatccccccagagaccccaaccccccacagctgcaggtcttgccttctggtgctggccctcgagcccaaaccctcaatcccaatgccctcatccatcctgtttccactgttactgatcatcgcagccagatatcaagccctgcctctttcgatttggggtcttcatccttcatccagtggggtctggcatggctggactctgtctttgacctggtcatggtggctgagtacttcgatgagtcattggttctgctggcagatgccctgtgctggggtctagatgacgtggtgggcttcatgcacaatgcccaggctggacataagcagggcctcagcactgtcagcaacagtggactgactgcggaggaccggcagctgactgcacgggcccgagcctggaacaacctggactgggctctctatgtccacttcaaccgcagtctctgggcacggatagagaaatacggccagggccggctgcagacagctgtggccgagctccgggctcgccgagaggccctagcgaaacattgtctggtagggggtgaggcttctgaccccaaatacatcactgatcgccggttccgccccttccagtttgggtcagctaaggttttgggctatatacttcggagtggattgagcccccaagaccaagaggaatgtgagcgcctagctacccctgagctccagtacaaggacaagctggatgccaagcagttcccccctaccgtctcactgcccctcaagacttcaaggccactctccccataaacatcagactacagatttaggtggaagagcagccatgtttgaagggcacatgtgatgagtggggggcagcaagatgccatttctgcatctcccagaagggatgagtctttgtcccgatgcaagccccctcttcgctgggctcccagcagtgcttccctcctccaccctccactcattttgttctttccccccaactttttttttttttgaaacggagtcttgctctgtcccccaggctggagtgcagtggcatgatctcggctcactgcaacctctgcctcccaggttcaagcgattctcctgcctcagcctccagagtagctaggattacagatacgtgccaccatacccggctaatttttatatttttagagacagggattcaacatgttggttaggctggtcttgaactcctcacctcaggtgatccacatgactctgcctcccaaagtgctgccattacaggcgtgagccactaggcctgacctccccttcccctttcctgccccaaggcagatccacatcaccgaagctccctagaggggcaaaagatggagtgagccacaggaagtttggggcgtggtgagttggaatgatacgtccatttctctatgaaatatttgctactagactgttcatttctctctgacatgtttgttgaatgaataaataatttgaaactt

SEQ ID NO: 8125 - DNA, 3162 bp, Homo sapiens
  source 1..3162: mol_type = unassigned DNA; mol_type = unassigned DNA
ctgcagttagtgtttgcgcctttctccttatctttgtgtcatagtctctctgtccctctgtctctctctctctgtttctctgtgtgtgtgtgtgtgtgtgtgtgtgtctctctctctttctgtctccctctccagccccaccctttcagtctcctccgggtgcactgataaggttggaaagtggaatggtgggtaagtccagggatctgggctttataagtagccacacgtctcccccagcccctgtcatacatgggggtctgccccgtgctgagacagagaaaaaagaggcgcgggaatttataacccaatggctcttacccattgcaatgccactcctggaagtccaacctcccttcctcctgcctgggttcatacacctgtgtcctgtctgatcctcattcccactgtatggcttcccttcctggtcctgggatagggctctttatccccatctgtgacagccagaggggctctggaggaaaccaggttcccgaccatggtctgacctgactgtgttaatgagctgattgatctgatctctctctctcttgctggctgtttcattcacgagctggggctttttctctccttcccttataaatccccaaggctcagggacaactgtaggtggggagcgggaggaactggagataagaaagtgatagagcagagacagtagttgtggggccacctaggagagtctgggtatagacaacatccccagccactccccttccctgaaggaggtctcagctgcagcaggagagaaggctgcctctgcctctctccttagacttcccttcttcccccctcatttcccttctagacgctgacagaggcaaaaatctgctaactcagggggcagactcaaccaagactgtgagcaggcctggggaatgaccccccgatctccaaccagtgccttccgcagctgcacggctgtctccagctgtctctgcccctcttcctggccctggctccatctctctgtcacctcacccttccctgtgccacatgggccctctctctcctgccaggacgctgcggctctggggacctcggagcctgggggtggctctgggagtcttcatgaccattggctttgcactccagctcttgggagggcccttccagaggaggctacctgggctacagctccgacagccctcggccccatccctacgaccagcccttccgtcctgcccaccccggcagcgactggtgttcctgaagacacataaatccgggagcagctctgtgctgagcctgcttcaccgctatggggaccagcacgggctgcgcttcgccctccctgcccgctaccagtttggctacccaaagctcttccaggcctctagggtaaaaggctaccgcccacagggtggaggcacccagctccccttccacatcctctgtcaccacatgaggttcaacctgaaagaggtacttcaggtcatgccttctgacagcttctttttttccattgtccgagacccagcggctctggctcgctctgccttctcctactataaatccacctcatcagccttccgcaagtcaccatctttggctgccttcctggccaatcctcgaggcttctacaggcctggggcccgtggggaccactacgctcgcaacttactatggtttgactttggcctgccctttcccccagagaagagggccaagagagggaatattcatccccccagagaccccaaccccccacagctgcaggtcttgccttctggtgctggccctcgagcccaaaccctcaatcccaatgccctcatccatcctgtttccactgttactgatcatcgcagccagatatcaagccctgcctctttcgatttggggtcttcatccttcatccagtggggtctggcatggctggactctgtctttgacctggtcatggtggctgagtacttcgatgagtcattggttctgctggcagatgccctgtgctggggtctagatgacgtggtgggcttcatgcacaatgcccaggctggacataagcagggcctcagcactgtcagcaacagtggactgactgcggaggaccggcagctgactgcacgggcccgagcctggaacaacctggactgggctctctatgtccacttcaaccgcagtctctgggcacggatagagaaatacggccagggccggctgcagacagctgtggccgagctccgggctcgccgagaggccctagcgaaacattgtctggtagggggtgaggcttctgaccccaaatacatcactgatcgccggttccgccccttccagtttgggtcagctaaggttttgggctatatacttcggagtggattgagcccccaagaccaagaggaatgtgagcgcctagctacccctgagctccagtacaaggacaagctggatgccaagcagttcccccctaccgtctcactgcccctcaagacttcaaggccactctccccataaacatcagactacagatttaggtggaagagcagccatgtttgaagggcacatgtgatgagtggggggcagcaagatgccatttctgcatctcccagaagggatgagtctttgtcccgatgcaagccccctcttcgctgggctcccagcagtgcttccctcctccaccctccactcattttgttctttccccccaactttttttttttttgaaacggagtcttgctctgtcccccaggctggagtgcagtggcatgatctcggctcactgcaacctctgcctcccaggttcaagcgattctcctgcctcagcctccagagtagctaggattacagatacgtgccaccatacccggctaatttttatatttttagagacagggattcaacatgttggttaggctggtcttgaactcctcacctcaggtgatccacatgactctgcctcccaaagtgctgccattacaggcgtgagccactaggcctgacctccccttcccctttcctgccccaaggcagatccacatcaccgaagctccctagaggggcaaaagatggagtgagccacaggaagtttggggcgtggtgagttggaatgatacgtccatttctctatgaaatatttgctactagactgttcatttctctctgacatgtttgttgaatgaataaataatttgaaacttc

SEQ ID NO: 8126 - DNA, 2334 bp, Homo sapiens
  source 1..2334: mol_type = unassigned DNA; mol_type = unassigned DNA
gacgctgacagaggcaaaaatctgctaactcagggggcagactcaaccaagactgtgagcaggcctggggaatgaccccccgatctccaaccagtgccttccgcagctgcacggctgtctccagctgtctctgcccctcttcctggccctggctccatctctctgtcacctcacccttccctgtgccacatgggccctctctctcctgccaggacgctgcggctctggggacctcggagcctgggggtggctctgggagtcttcatgaccattggctttgcactccagctcttgggagggcccttccagaggaggctacctgggctacagctccgacagccctcggccccatccctacgaccagcccttccgtcctgcccaccccggcagcgactggtgttcctgaagacacataaatccgggagcagctctgtgctgagcctgcttcaccgctatggggaccagcacgggctgcgcttcgccctccctgcccgctaccagtttggctacccaaagctcttccaggcctctagggtaaaaggctaccgcccacagggtggaggcacccagctccccttccacatcctctgtcaccacatgaggttcaacctgaaagaggtacttcaggtcatgccttctgacagcttctttttttccattgtccgagacccagcggctctggctcgctctgccttctcctactataaatccacctcatcagccttccgcaagtcaccatctttggctgccttcctggccaatcctcgaggcttctacaggcctggggcccgtggggaccactacgctcgcaacttactatggtttgactttggcctgccctttcccccagagaagagggccaagagagggaatattcatccccccagagaccccaaccccccacagctgcaggtcttgccttctggtgctggccctcgagcccaaaccctcaatcccaatgccctcatccatcctgtttccactgttactgatcatcgcagccagatatcaagccctgcctctttcgatttggggtcttcatccttcatccagtggggtctggcatggctggactctgtctttgacctggtcatggtggctgagtacttcgatgagtcattggttctgctggcagatgccctgtgctggggtctagatgacgtggtgggcttcatgcacaatgcccaggctggacataagcagggcctcagcactgtcagcaacagtggactgactgcggaggaccggcagctgactgcacgggcccgagcctggaacaacctggactgggctctctatgtccacttcaaccgcagtctctgggcacggatagagaaatacggccagggccggctgcagacagctgtggccgagctccgggctcgccgagaggccctagcgaaacattgtctggtagggggtgaggcttctgaccccaaatacatcactgatcgccggttccgccccttccagtttgggtcagctaaggttttgggctatatacttcggagtggattgagcccccaagaccaagaggaatgtgagcgcctagctacccctgagctccagtacaaggacaagctggatgccaagcagttcccccctaccgtctcactgcccctcaagacttcaaggccactctccccataaacatcagactacagatttaggtggaagagcagccatgtttgaagggcacatgtgatgagtggggggcagcaagatgccatttctgcatctcccagaagggatgagtctttgtcccgatgcaagccccctcttcgctgggctcccagcagtgcttccctcctccaccctccactcattttgttctttccccccaactttttttttttttgaaacggagtcttgctctgtcccccaggctggagtgcagtggcatgatctcggctcactgcaacctctgcctcccaggttcaagcgattctcctgcctcagcctccagagtagctaggattacagatacgtgccaccatacccggctaatttttatatttttagagacagggattcaacatgttggttaggctggtcttgaactcctcacctcaggtgatccacatgactctgcctcccaaagtgctgccattacaggcgtgagccactaggcctgacctccccttcccctttcctgccccaaggcagatccacatcaccgaagctccctagaggggcaaaagatggagtgagccacaggaagtttggggcgtggtgagttggaatgatacgtccatttctctatgaaatatttgctactagactgttcatttctctctgacatgtttgttgaatgaataaataatttgaaacttc

SEQ ID NO: 8127 - DNA, 2169 bp, Homo sapiens
  source 1..2169: mol_type = unassigned DNA; mol_type = unassigned DNA
ctgaccgccggggggtgcccccgggacgtagcgccgcggagaggaagcggcaaaggggaccatgcggcgcctgactcgtcggctggttctgccagtcttcggggtgctctggatcacggtgctgctgttcttctgggtaaccaagaggaagttggaggtgccgacgggacctgaagtgcagacccctaaggtttggtccttgtttttcaaggtggctgggatgagcccttgggcgcctcaggtgcctgtatcacccactcctccctaccaaagagggcatcttcctacaggaggacaccttgctgtatgtcatttcccatgtctcttgcaagaagctcagttccatttgcagactcaggtctttcttcaagtcagatgcacactgctggtgtattgcacggaccttccacccactagcatcatcatcaccttccacaacgaggcccgctccacgctgctcaggaccatccgcagtgtattaaaccgcacccctacgcatctgatccgggaaatcatattagtggatgacttcagcaatgaccctgatgactgtaaacagctcatcaagttgcccaaggtgaaatgcttgcgcaataatgaacggcaaggtctggtccggtcccggattcggggcgctgacatcgcccagggcaccactctgactttcctcgacagccactgtgaggtgaacagggactggctccagcctctgttgcacagggtcaaagaggactacacgcgggtggtgtgccctgtgatcgatatcattaacctggacaccttcacctacatcgagtctgcctcggagctcagaggggggtttgactggagcctccacttccagtgggagcagctctccccagagcagaaggctcggcgcctggaccccacggagcccatcaggactcctatcatagctggagggctcttcgtgatcgacaaagcttggtttgattacctggggaaatatgatatggacatggacatctggggtggggagaactttgaaatctccttccgagtgtggatgtgcgggggcagcctagagatcgtcccctgcagccgagtggggcacgtcttccggaagaagcacccctacgttttccctgatggaaatgccaacacgtatataaagaacaccaagcggacagctgaagtgtggatggatgaatacaagcaatactattacgctgcccggccattcgccctggagaggcccttcgggaatgttgagagcagattggacctgaggaagaatctgcgctgccagagcttcaagtggtacctggagaatatctaccctgaactcagcatccccaaggagtcctccatccagaagggcaatatccgacagagacagaagtgcctggaatctcaaaggcagaacaaccaagaaaccccaaacctaaagttgagcccctgtgccaaggtcaaaggcgaagatgcaaagtcccaggtatgggccttcacatacacccagcagatcctccaggaggagctgtgcctgtcagtcatcaccttgttccctggcgccccagtggttcttgtcctttgcaagaatggagatgaccgacagcaatggaccaaaactggttcccacatcgagcacatagcatcccacctctgcctcgatacagatatgttcggtgatggcaccgagaacggcaaggaaatcgtcgtcaacccatgtgagtcctcactcatgagccagcactgggacatggtgagctcttgaggacccctgccagaagcagcaagggccatggggtggtgcttccctggaccagaacagactggaaactgggcagcaagcagcctgcaaccacctcagacatcctggactgggaggtggaggcagagccccccaggacaggagcaactgtctcagggaggacagaggaaaacatcacaagccaatggggctcaaagacaaatcccacatgttctcaaggccgttaagttccagtcctggccagtcattccctgattggtatctggagacagaaacctaatgggaagtgtttattgttccttttcctacaaaggaagcagtctctggaggccagaaagaaaagccttctttttcactaggccaggactacattgagagatgaagaatggaggttgtttccaaaagaaataaagagaaacttagaagttgtctctgga

SEQ ID NO: 8128 - DNA, 2733 bp, Homo sapiens
  source 1..2733: mol_type = unassigned DNA; mol_type = unassigned DNA
ggcatcccgagtgcaccgctcccgccccgccccgccttgccccaacccacgatggtctgggagctgcgcccagggcttggcgctggcggccccgcaacagcaccgagcgtttcggtcggcgggcggcggtagcgccccctctcagagccccgctcactcccacctgggctcgctccgagtcggcctgtctgtcgggcccgccctccccgctcactccctccgccctcgtgctcctcccggggtgcttggcacagcctcggattcctccctctcgctgctcgagtcagtttccctatcggcggcagcgggcaaggcggcggcggcggcggcggcagccgcggtggcggcgtggggaacatctcggcagccaccgcgcttctcccgctggagcgggcgtccagcttggctgccctcggtccttccctgccacgtttcgggtcgccctgcaccccccacccaggctcgcttctcttcgaagcgggaagggcgccttgcaggatcctgccgcccctccaaccggatcctgggtctagagctccccagagcgaggcgctcgccaggactcctgccccgccaaccctgaccgccggggggtgcccccgggacgtagcgccgcggagaggaagcggcaaaggggaccatgcggcgcctgactcgtcggctggttctgccagtcttcggggtgctctggatcacggtgctgctgttcttctgggtaaccaagaggaagttggaggtgccgacgggacctgaagtgcagacccctaagccttcggacgctgactgggacgacctgtgggaccagtttgatgagcggcggtatctgaatgccaaaaagtggcgcgttggtgacgacccctataagctgtatgctttcaaccagcgggagagtgagcggatctccagcaatcgggccatcccggacactcgccatctgagatgcacactgctggtgtattgcacggaccttccacccactagcatcatcatcaccttccacaacgaggcccgctccacgctgctcaggaccatccgcagtgtattaaaccgcacccctacgcatctgatccgggaaatcatattagtggatgacttcagcaatgaccctgatgactgtaaacagctcatcaagttgcccaaggtgaaatgcttgcgcaataatgaacggcaaggtctggtccggtcccggattcggggcgctgacatcgcccagggcaccactctgactttcctcgacagccactgtgaggtgaacagggactggctccagcctctgttgcacagggtcaaagaggactacacgcgggtggtgtgccctgtgatcgatatcattaacctggacaccttcacctacatcgagtctgcctcggagctcagaggggggtttgactggagcctccacttccagtgggagcagctctccccagagcagaaggctcggcgcctggaccccacggagcccatcaggactcctatcatagctggagggctcttcgtgatcgacaaagcttggtttgattacctggggaaatatgatatggacatggacatctggggtggggagaactttgaaatctccttccgagtgtggatgtgcgggggcagcctagagatcgtcccctgcagccgagtggggcacgtcttccggaagaagcacccctacgttttccctgatggaaatgccaacacgtatataaagaacaccaagcggacagctgaagtgtggatggatgaatacaagcaatactattacgctgcccggccattcgccctggagaggcccttcgggaatgttgagagcagattggacctgaggaagaatctgcgctgccagagcttcaagtggtacctggagaatatctaccctgaactcagcatccccaaggagtcctccatccagaagggcaatatccgacagagacagaagtgcctggaatctcaaaggcagaacaaccaagaaaccccaaacctaaagttgagcccctgtgccaaggtcaaaggcgaagatgcaaagtcccaggtatgggccttcacatacacccagcagatcctccaggaggagctgtgcctgtcagtcatcaccttgttccctggcgccccagtggttcttgtcctttgcaagaatggagatgaccgacagcaatggaccaaaactggttcccacatcgagcacatagcatcccacctctgcctcgatacagatatgttcggtgatggcaccgagaacggcaaggaaatcgtcgtcaacccatgtgagtcctcactcatgagccagcactgggacatggtgagctcttgaggacccctgccagaagcagcaagggccatggggtggtgcttccctggaccagaacagactggaaactgggcagcaagcagcctgcaaccacctcagacatcctggactgggaggtggaggcagagccccccaggacaggagcaactgtctcagggaggacagaggaaaacatcacaagccaatggggctcaaagacaaatcccacatgttctcaaggccgttaagttccagtcctggccagtcattccctgattggtatctggagacagaaacctaatgggaagtgtttattgttccttttcctacaaaggaagcagtctctggaggccagaaagaaaagccttctttttcactaggccaggactacattgagagatgaagaatggaggttgtttccaaaagaaataaagagaaacttagaagttgtctctgga

SEQ ID NO: 8129 - DNA, 2496 bp, Homo sapiens
  source 1..2496: mol_type = unassigned DNA; mol_type = unassigned DNA
actgaaaaattagctggtgcctgtatttcaggcttattgtttcctaggatctcagggagatcaggccacgtggtctgtggattaattaaggcacccagataattggctattaatagatggccaattgatggctgccagctgggtgctgaattgactaatgtccttatggtgggcaggtggtctttatcagaagaggagctagctgaaagactttactaattaaagggtgaatcaggaaaagaagataagaggtagcttttttccccaccacttggtgtgatgttttacagtttacaaagcatttatatccacagttgcctcatttgatccttactgcgactttgtgaggtttggtccttgtttttcaaggtggctgggatgagcccttgggcgcctcaggtgcctgtatcacccactcctccctaccaaagagggcatcttcctacaggaggacaccttgctgtatgtcatttcccatgtctcttgcaagaagctcagttccatttgcagactcaggtctttcttcaagtcagccttcggacgctgactgggacgacctgtgggaccagtttgatgagcggcggtatctgaatgccaaaaagtggcgcgttggtgacgacccctataagctgtatgctttcaaccagcgggagagtgagcggatctccagcaatcgggccatcccggacactcgccatctgagatgcacactgctggtgtattgcacggaccttccacccactagcatcatcatcaccttccacaacgaggcccgctccacgctgctcaggaccatccgcagtgtattaaaccgcacccctacgcatctgatccgggaaatcatattagtggatgacttcagcaatgaccctgatgactgtaaacagctcatcaagttgcccaaggtgaaatgcttgcgcaataatgaacggcaaggtctggtccggtcccggattcggggcgctgacatcgcccagggcaccactctgactttcctcgacagccactgtgaggtgaacagggactggctccagcctctgttgcacagggtcaaagaggactacacgcgggtggtgtgccctgtgatcgatatcattaacctggacaccttcacctacatcgagtctgcctcggagctcagaggggggtttgactggagcctccacttccagtgggagcagctctccccagagcagaaggctcggcgcctggaccccacggagcccatcaggactcctatcatagctggagggctcttcgtgatcgacaaagcttggtttgattacctggggaaatatgatatggacatggacatctggggtggggagaactttgaaatctccttccgagtgtggatgtgcgggggcagcctagagatcgtcccctgcagccgagtggggcacgtcttccggaagaagcacccctacgttttccctgatggaaatgccaacacgtatataaagaacaccaagcggacagctgaagtgtggatggatgaatacaagcaatactattacgctgcccggccattcgccctggagaggcccttcgggaatgttgagagcagattggacctgaggaagaatctgcgctgccagagcttcaagtggtacctggagaatatctaccctgaactcagcatccccaaggagtcctccatccagaagggcaatatccgacagagacagaagtgcctggaatctcaaaggcagaacaaccaagaaaccccaaacctaaagttgagcccctgtgccaaggtcaaaggcgaagatgcaaagtcccaggtatgggccttcacatacacccagcagatcctccaggaggagctgtgcctgtcagtcatcaccttgttccctggcgccccagtggttcttgtcctttgcaagaatggagatgaccgacagcaatggaccaaaactggttcccacatcgagcacatagcatcccacctctgcctcgatacagatatgttcggtgatggcaccgagaacggcaaggaaatcgtcgtcaacccatgtgagtcctcactcatgagccagcactgggacatggtgagctcttgaggacccctgccagaagcagcaagggccatggggtggtgcttccctggaccagaacagactggaaactgggcagcaagcagcctgcaaccacctcagacatcctggactgggaggtggaggcagagccccccaggacaggagcaactgtctcagggaggacagaggaaaacatcacaagccaatggggctcaaagacaaatcccacatgttctcaaggccgttaagttccagtcctggccagtcattccctgattggtatctggagacagaaacctaatgggaagtgtttattgttccttttcctacaaaggaagcagtctctggaggccagaaagaaaagccttctttttcactaggccaggactacattgagagatgaagaatggaggttgtttccaaaagaaataaagagaaacttagaagttgtctctgg

SEQ ID NO: 8130 - DNA, 844 bp, Homo sapiens
  source 1..844: mol_type = unassigned DNA; mol_type = unassigned DNA
tgttgagagcagattggacctgaggaagaatctgcgctgccagagcttcaagtggtacctggagaatatctaccctgaactcagtggactctcctctctccctgtgactctcctccagcatccccaaggagtcctccatccagaagggcaatatccgacagagacagaagtgcctggaatctcaaaggcagaacaaccaagaaaccccaaacctaaagttgagcccctgtgccaaggtcaaaggcgaagatgcaaagtcccaggtatgggccttcacatacacccagcagatcctccaggaggagctgtgcctgtcagtcatcaccttgttccctggcgccccagtggttcttgtcctttgcaagaatggagatgaccgacagcaatggaccaaaactggttcccacatcgagcacatagcatcccacctctgcctcgatacagatatgttcggtgatggcaccgagaacggcaaggaaatcgtcgtcaacccatgtgagtcctcactcatgagccagcactgggacatggtgagctcttgaggacccctgccagaagcagcaagggccatggggtggtgcttccctggaccagaacagactggaaactgggcagcaagcagcctgcaaccacctcagacatcctggactgggaggtggaggcagagccccccaggacaggagcaactgtctcagggaggacagaggaaaacatcacaagccaatggggctcaaagacaaatcccacatgttctcaaggccgttaagttccagtcctggccagtcattccctgattggtatctggagacagaaacctaatgggaagtgtttattgttccttttc

SEQ ID NO: 8131 - DNA, 1045 bp, Homo sapiens
  source 1..1045: mol_type = unassigned DNA; mol_type = unassigned DNA
tttcctcgacagccactgtgaggtgaacagggactggctccagcctctgttgcacagggtcaaagaggactacacgcgggtggtgtgccctgtgatcgatatcattaacctggacaccttcacctacatcgagtctgcctcggagctcagaggggggtttgactggagcctccacttccagtgggagcagctctccccagagcagaaggctcggcgcctggaccccacggagcccatcaggactcctatcatagctggagggctcttcgtgatcgacaaagcttggtttgattacctggggaaatatgatatggacatggacatctggggtggggagaactttgaaatctccttccgagtgtggatgtgcgggggcagcctagagatcgtcccctgcagccgagtggggcacgtcttccggaagaagcacccctacgttttccctgatggaaatgccaacacgtatataaagaacaccaagcggacagctgaagtgtggatggatgaatacaagcaatactattacgctgcccggccattcgccctggagaggcccttcgggaagtatgggccttcacatacacccagcagatcctccaggaggagctgtgcctgtcagtcatcaccttgttccctggcgccccagtggttcttgtcctttgcaagaatggagatgaccgacagcaatggaccaaaactggttcccacatcgagcacatagcatcccacctctgcctcgatacagatatgttcggtgatggcaccgagaacggcaaggaaatcgtcgtcaacccatgtgagtcctcactcatgagccagcactgggacatggtgagctcttgaggacccctgccagaagcagcaagggccatggggtggtgcttccctggaccagaacagactggaaactgggcagcaagcagcctgcaaccacctcagacatcctggactgggaggtggaggcagagccccccaggacaggagcaactgtctcagggaggacagaggaaaacatcacaagccaatggggctcaaagacaaatcc

SEQ ID NO: 8132 - DNA, 1619 bp, Homo sapiens
  source 1..1619: mol_type = unassigned DNA; mol_type = unassigned DNA
cctcgtgctcctcccggggtgcttggcacagcctcggattcctccctctcgctgctcgagtcagtttccctatcggcggcagcgggcaaggcggcggcggcggcggcggcagccgcggtggcggcgtggggaacatctcggcagccaccgcgcttctcccgctggagcgggcgtccagcttggctgccctcggtccttccctgccacgtttcgggtcgccctgcaccccccacccaggctcgcttctcttcgaagcgggaagggcgccttgcaggatcctgccgcccctccaaccggatcctgggtctagagctccccagagcgaggcgctcgccaggactcctgccccgccaaccctgaccgccggggggtgcccccgggacgtagcgccgcggagaggaagcggcaaaggggaccatgcggcgcctgactcgtcggctggttctgccagtcttcggggtgctctggatcacggtgctgctgttcttctgggtaaccaagaggaagttggaggtgccgacgggacctgaagtgcagacccctaagccttcggacgctgactgggacgacctgtgggaccagtttgatgagcggcggtatctgaatgccaaaaagtggcgcgttggtgacgacccctataagctgtatgctttcaaccagcgggagagtgagcggatctccagcaatcgggccatcccggacactcgccatctgagtgtattaaaccgcacccctacgcatctgatccgggaaatcatattagtggatgacttcagcaatgaccctgatgactgtaaacagctcatcaagttgcccaaggtgaaatgcttgcgcaataatgaacggcaaggtctggtccggtcccggattcggggcgctgacatcgcccagggcaccactctgactttcctcgacagccactgtgaggtgaacagggactggctccagcctctgttgcacagggtcaaagaggactacacgcgggtggtgtgccctgtgatcgatatcattaacctggacaccttcacctacatcgagtctgcctcggagctcagaggggggtttgactggagcctccacttccagtgggagcagctctccccagagcagaaggctcggcgcctggaccccacggagcccatcaggactcctatcatagctggagggctcttcgtgatcgacaaagcttggtttgattacctggggaaatatgatatggacatggacatctggggtggggagaactttgaaatctccttccgagtgtggatgtgcgggggcagcctagagatcgtcccctgcagccgagtggggcacgtcttccggaagaagcacccctacgttttccctgatggaaatgccaacacgtatataaagaacaccaagcggacagctgaagtgtggatggatgaatacaagcaatactattacgctgcccggccattcgccctggagaggcccttcgggaatgttgagagcagattggacctgaggaagaatctgcgctgccagagcttcaagtggtacctggagaatatctaccctgaactcagcatccccaaggagtcctccatccagaagggcaatatccgacagagacagaagtgcctggaatctca

SEQ ID NO: 8133 - DNA, 982 bp, Homo sapiens
  source 1..982: mol_type = unassigned DNA; mol_type = unassigned DNA
cagtcttcggggtgctctggatcacggtgctgctgttcttctgggtaaccaagaggaagttggaggtgccgacgggacctgaagtgcagacccctaaggtttggtccttgtttttcaaggtggctgggatgagcccttgggcgcctcaggtgcctgtatcacccactcctccctaccaaagagggcatcttcctacagccttcggacgctgactgggacgacctgtgggaccagtttgatgagcggcggtatctgaatgccaaaaagtggcgcgttggtgacgacccctataagctgtatgctttcaaccagcgggagagtgagcggatctccagcaatcgggccatcccggacactcgccatctgagatgcacactgctggtgtattgcacggaccttccacccactagcatcatcatcaccttccacaacgaggcccgctccacgctgctcaggaccatccgcagtgtattaaaccgcacccctacgcatctgatccgggaaatcatattagtggatgacttcagcaatgaccctgatgactgtaaacagctcatcaagttgcccaaggtgaaatgcttgcgcaataatgaacggcaaggtctggtccggtcccggattcggggcgctgacatcgcccagggcaccactctgactttcctcgacagccactgtgaggtgaacagggactggctccagcctctgttgcacagggtcaaagagaaatctccttccgagtgtggatgtgcgggggcagcctagagatcgtcccctgcagccgagtggggcacgtcttccggaagaagcacccctacgttttccctgatggaaatgccaacacgtatataaagaacaccaagcggacagctgaagtgtggatggatgaatacaagcaatactattacgctgcccggccattcgccctggagaggcccttcgggaatgttgagagcagattggacctgaggaagaatctgcgctg

SEQ ID NO: 8134 - DNA, 991 bp, Homo sapiens
  source 1..991: mol_type = unassigned DNA; mol_type = unassigned DNA
aattttgaagacacagtgtttcagagagcgagatggtgactgctgtgattagaaatttgagaagcaattggtggttgaacatgcaatggggcaaaccattttaacatgaattggggatgtgcctgagaagacccaactttcccaaaggaaccaagaacacagccttggaagaaatgagctggaaatatcgcgctcatctaaccactgatgtagagctatagaacacgtgaccagtgacagtctgtgagtggactctccatgtgactaattatgacatgggattatctatgctcctggttccagtttaagaagaaaataagagaaaatcttttaaatttcctccttgatgtctcatcagaattggagccgcttttcctctgcaatactgccttcggacgctgactgggacgacctgtgggaccagtttgatgagcggcggtatctgaatgccaaaaagtggcgcgttggtgacgacccctataagctgtatgctttcaaccagcgggagagtgagcggatctccagcaatcgggccatcccggacactcgccatctgagatgcacactgctggtgtattgcacggaccttccacccactagcatcatcatcaccttccacaacgaggcccgctccacgctgctcaggaccatccgcagtgtattaaaccgcacccctacgcatctgatccgggaaatcatattagtggatgacttcagcaatgaccctgatgactgtaaacagctcatcaagttgcccaaggtgaaatgcttgcgcaataatgaacggcaaggtctggtccggtcccggattcggggcgctgacatcgcccagggcaccactctgactttcctcgacagccactgtgaggtgaacagggactggctccagcctctgttgcacagggtcaaagagaaatctccttccgagtgtggatgtgcgggggcagcctagagatcgtcccctgcagccgagtggggcacgtcttccgga

SEQ ID NO: 8135 - DNA, 738 bp, Homo sapiens
  source 1..738: mol_type = unassigned DNA; mol_type = unassigned DNA
ctggatgacagccccccgagagacacctgtgactgctcccacctgcagaaagaaggcaacaagtaattcactgagcagatgcacactgctggtgtattgcacggaccttccacccactagcatcatcatcaccttccacaacgaggcccgctccacgctgctcaggaccatccgcagtgtattaaaccgcacccctacgcatctgatccgggaaatcatattagtggatgacttcagcaatgaccctgatgactgtaaacagctcatcaagttgcccaaggtgaaatgcttgcgcaataatgaacggcaaggtctggtccggtcccggattcggggcgctgacatcgcccagggcaccactctgactttcctcgacagccactgtgaggtgaacagggactggctccagcctctgttgcacagggtcaaagaggactacacgcgggtggtgtgccctgtgatcgatatcattaacctggacaccttcacctacatcgagtctgcctcggagctcagaggggggtttgactggagcctccacttccagtgggagcagctctccccagagcagaaggctcggcgcctggaccccacggagcccatcaggactcctatcatagctggagggctcttcgtgatcgacaaagcttggtttgattacctggggaaatatgatatggacatggacatctggggtggggagaactttgaaatctccttccgagtgtggatgtgcgg

SEQ ID NO: 8136 - DNA, 735 bp, Homo sapiens
  source 1..735: mol_type = unassigned DNA; mol_type = unassigned DNA
cagtcttcggggtgctctggatcacggtgctgctgttcttctgggtaaccaagaggaagttggaggtgccgacgggacctgaagtgcagacccctaagggttcttcccaaagttagtgcagcctacacccaggattgaacaaagacagcttggaagttagaagcaagatggagtctgttagccttcggacgctgactgggacgacctgtgggaccagtttgatgagcggcggtatctgaatgccaaaaagtggcgcgttggtgacgacccctataagctgtatgctttcaaccagcgggagagtgagcggatctccagcaatcgggccatcccggacactcgccatctgagatgcacactgctggtgtattgcacggaccttccacccactagcatcatcatcaccttccacaacgaggcccgctccacgctgctcaggaccatccgcagtgtattaaaccgcacccctacgcatctgatccgggaaatcatattagtggatgacttcagcaatgaccctgatgactgtaaacagctcatcaagttgcccaaggtgaaatgcttgcgcaataatgaacggcaaggtctggtccggtcccggattcggggcgctgacatcgcccagggcaccactctgactttcctcgacagccactgtgaggtgaacagggactggctccagcctctgttgcacagggtcaaagaggactacacgcgggtggtgtgccctgtgat

SEQ ID NO: 8137 - DNA, 727 bp, Homo sapiens
  source 1..727: mol_type = unassigned DNA
agaggtagcttttttccccaccacttggtgtgatgttttacagtttacaaagcatttatatccacagttgcctcatttgatccttactgcgactttgtgaggtttggtccttgtttttcaaggtggctgggatgagcccttgggcgcctcaggtgcctgtatcacccactcctccctaccaaagagggcatcttcctacagacgaggaccctggagcactgatcctacatatctcgctcaagatcacgcagctggttagcgttggagctgggggtgtttgagtccagattggaagcccttacgtactatcccagccttcggacgctgactgggacgacctgtgggaccagtttgatgagcggcggtatctgaatgccaaaaagtggcgcgttggtgacgacccctataagctgtatgctttcaaccagcgggagagtgagcggatctccagcaatcgggccatcccggacactcgccatctgagatgcacactgctggtgtattgcacggaccttccacccactagcatcatcatcaccttccacaacgaggcccgctccacgctgctcaggaccatccgcagtgtattaaaccgcacccctacgcatctgatccgggaaatcatattagtggatgacttcagcaatgaccctgatgactgtaaacagctcatcaagttgcccaaggtgaaatgcttgcgcaataatgaacggcaaggtctggtccg

SEQ ID NO: 8138 - DNA, 550 bp, Homo sapiens
  source 1..550: mol_type = unassigned DNA
gttcttctgggtaaccaagaggaagttggaggtgccgacgggacctgaagtgcagacccctaaggtttggtccttgtttttcaaggtggctgggatgagcccttgggcgcctcaggtgcctgtatcacccactcctccctaccaaagagggcatcttcctacagccttcggacgctgactgggacgacctgtgggaccagtttgatgagcggcggtatctgaatgccaaaaagtggcgcgttggtgacgacccctataagctgtatgctttcaaccagcgggagagtgagcggatctccagcaatcgggccatcccggacactcgccatctgagatgcacactgctggtgtattgcacggaccttccacccactagcatcatcatcaccttccacaacgaggcccgctccacgctgctcaggaccatccgcagtgtattaaaccgcacccctacgcatctgatccgggaaatcatattagtggatgacttcagcaatgaccctgatgactgtaaacagctcatcaagttgcccaaggtgaaatgcttgcg

SEQ ID NO: 8139 - DNA, 565 bp, Homo sapiens
  source 1..565: mol_type = unassigned DNA
agattccttgatggccactgaaaaattagctggtgcctgtatttcaggcttattgtttcctaggatctcagggagatcaggccacgtggtctgtggattaattaaggcacccagataattggctattaatagatggccaattgatggctgccagctgggtgctgaattgactaatgtccttatggtgggcaggtggtctttatcagaagaggagctagctgaaagactttactaattaaagggtgaatcaggaaaagaagataagaggtagcttttttccccaccacttggtgtgatgttttacagtttacaaagcatttatatccacagttgcctcatttgatccttactgcgactttgtgagccttcggacgctgactgggacgacctgtgggaccagtttgatgagcggcggtatctgaatgccaaaaagtggcgcgttggtgacgacccctataagctgtatgctttcaaccagcgggagagtgagcggatctccagcaatcgggccatcccggacactcgccatctgagatgcacactgctggtgtattgcacggacctt

SEQ ID NO: 8140 - DNA, 554 bp, Homo sapiens
  source 1..554: mol_type = unassigned DNA
tttagcaactgctatggcacaagcaccagctaaccaaagtatgtgctggatcataggaagatgatgggtcgtagagtggaggggcatgcaggacaatgggaactgcgagtaggactttggctggtatagtagccccatggtacatctgggatgaagtctacctagagttataggtttggtccttgtttttcaaggtggctgggatgagcccttgggcgcctcaggtgcctgtatcacccactcctccctaccaaagagggcatcttcctacaggaggacaccttgctgtatgtcatttcccatgtctcttgcaagaagctcagttccatttgcagactcaggtctttcttcaagtcagccttcggacgctgactgggacgacctgtgggaccagtttgatgagcggcggtatctgaatgccaaaaagtggcgcgttggtgacgacccctataagctgtatgctttcaaccagcgggagagtgagcggatctccagcaatcgggccatcccggacactcgccatctgagatgcacactgctggtgtattgcacgg

SEQ ID NO: 8141 - DNA, 573 bp, Homo sapiens
  source 1..573: mol_type = unassigned DNA
taaatttcctccttgatgtctcatcagaattggagccgcttttcctctgcaatactggtttggtccttgtttttcaaggtggctgggatgagcccttgggcgcctcaggtgcctgtatcacccactcctccctaccaaagagggcatcttcctacagaattgaaaacagtttgcagctgacacctgagcctacccatttcgttctgaatgcaatttcagcagcccactgtagctcccctgctctccctcccaggcatggaacagccatggcccaagatgagtcgtgtccaaaaatggatctctgagagcgctactgacttgtccaagttcacatcactgttccatcagtggagggactgggacagacccacaggagtgctttttccaccatcatctcagccctcagtagagcaggagtgaggaagcgggaggcttgaggcaagagtgtgaaacatcagacatcacctttgccctcagggctctggagacctcaagcatccacataatatttaaaataataaaaccaatgagtagacaataaaggaccaagatggatatctgggctgtatattc

SEQ ID NO: 8142 - DNA, 4669 bp, Homo sapiens
  source 1..4669: mol_type = unassigned DNA
gaaaggaaaccaggcactgcctgccggctttacatctgttgatctgacctgactggaagcgtccaaagagggacggctgtcagccctgcttgactgagaacccaccagctcatcccagacacctcatagcaacctatttatacaaagggggaaagaaacacctgagcagaatggaatcattatttttttcccaaggagaaaaccggggtaaagggagggaagcaattcaatttgaagtccctgtgaatgggctttcagaaggcaattaaagaaatccactcagagaggacttggggtgaaacttgggtcctgtggttttctgattgtaagtggaagcaggtcttgcacacgctgttggcaaatgtcaggaccaggttaagtgactggcagaaaaacttccaggtggaacaagcaacccaggttctgctgcaagcttgaaggagcctggagcgggagaaagctaacttgaacatgacctgttgcatttggcaagttctagcaacatgctcctaaggaagcgatacaggcacagaccatgcagactccagttcctcctgctgctcctgatgctgggatgcgtcctgatgatggtggcgatgttgcaccctccccaccacaccctgcaccagactgtcacagcccaagccagcaagcacagccctgaagccaggtaccgcctggactttggggaatcccaggattgggtactggaagctgaggatgagggtgaagagtacagccctctggagggcctgccaccctttatctcactgcgggaggatcagctgctggtggccgtggccttaccccaggccagaaggaaccagagccagggcaggagaggtgggagctaccgcctcatcaagcagccaaggaggcaggataaggaagccccaaagagggactggggggctgatgaggacggggaggtgtctgaagaagaggagttgaccccgttcagcctggacccacgtggcctccaggaggcactcagtgcccgcatccccctccagagggctctgcccgaggtgcggcacccactgtgtctgcagcagcaccctcaggacagcctgcccacagccagcgtcatcctctgtttccatgatgaggcctggtccactctcctgcggactgtacacagcatcctcgacacagtgcccagggccttcctgaaggagatcatcctcgtggacgacctcagccagcaaggacaactcaagtctgctctcagcgaatatgtggccaggctggagggggtgaagttactcaggagcaacaagaggctgggtgccatcagggcccggatgctgggggccaccagagccaccggggatgtgctcgtcttcatggatgcccactgcgagtgccacccaggctggctggagcccctcctcagcagaatagctggtgacaggagccgagtggtatctccggtgatagatgtgattgactggaagactttccagtattacccctcaaaggacctgcagcgtggggtgttggactggaagctggatttccactgggaacctttgccagagcatgtgaggaaggccctccagtcccccataagccccatcaggagccctgtggtgcccggagaggtggtggccatggacagacattacttccaaaacactggagcgtatgactctcttatgtcgctgcgaggtggtgaaaacctcgaactgtctttcaaggcctggctctgtggtggctctgttgaaatccttccctgctctcgggtaggacacatctaccaaaatcaggattcccattcccccctcgaccaggaggccaccctgaggaacagggttcgcattgctgagacctggctggggtcattcaaagaaaccttctacaagcatagcccagaggccttctccttgagcaaggctgagaagccagactgcatggaacgcttgcagctgcaaaggagactgggttgtcggacattccactggtttctggctaatgtctaccctgagctgtacccatctgaacccaggcccagtttctctggaaagctccacaacactggacttgggctctgtgcagactgccaggcagaaggggacatcctgggctgtcccatggtgttggctccttgcagtgacagccggcagcaacagtacctgcagcacaccagcaggaaggagattcactttggcagcccacagcacctgtgctttgctgtcaggcaggagcaggtgattcttcagaactgcacggaggaaggcctggccatccaccagcagcactgggacttccaggagaatgggatgattgtccacattctttctgggaaatgcatggaagctgtggtgcaagaaaacaataaagatttgtacctgcgtccgtgtgatggaaaagcccgccagcagtggcgttttgaccagatcaatgctgtggatgaacgatgaatgtcaatgtcagaaggaaaagagaattttggccatcaaaatccagctccaagtgaacttaaagagcttatatatttcatgaagctgatccttttgtgtgtgtgctcctggtgttaggagagaaaaaagctctatgaaagaatataggaagtttctccttttcacaccttatttcattgactgctggctgctttaaaaaaaaaaaaaaaggatccattgtaccgttgtcttcatcactgggaaatgattattacatagtacagaagattctttgtttttctccactgagcacttaacaattgctttctctctggcctggacattctctggcagcacctccaggatacataaattcaatggatcaatttatttgtcttcaaatggccttaacttggattgtctgtttggccaaccatgaaaattaaagagtgaagcagatgtaatggcctgacattccaaaaactctgaattgggtttattagcacaaatgttgtgttcatttgttgagccatatctcagaagaaggaaagggagctacagaaaggaggtttaggattgcagagaagatgcaagagcactttggcccaattctccagctcaacccagcagctgaaaagcttcaagagatctaggaaaagacattttcatgttaatgagaatttccaccattgtagagaatttccttcctactgagaatctacctctattccccctgccctagctcttctctaacttggttaaccataaccataaccagattcccttgcaatcgatttctctttagtcgttggtgttagaagtaccagcacaatttgagcattcccattaacaaaggtgttcacagttgagaaactctcctgccgggcgcggtggctcatgcctgtaattccagcactttgggaggcagagttgggaggatcacctgatgtcaggggtttgagaccagcctggtcaacattgcaaaaccttgtctctactaaaaatacaaaaattagctgggcatggtggcgcatacctgtaatcccagctacttgggaggctgaggcaagagaatcgcttgaacccaggaggcagaggttgcagtgagctgagatcatgccattgcactccaacctgggtgacagagtgagactccatctcaaaaaaaaaaaaaaagagagaaactctcctgatgccctgttacagggtttgcactgactggagcagaaacagcaacctttctaaaaaagcaaacctttttcctgggaggaaaatgccagagcctgagccaaaattcttatgacaggtaacatttgggtgttaatgtccatgagagctgacagggccatctctgagcccatataactgtctggaacccccaaatgtgtccacaggttgaatgtccatgagtgtgggaagaacacggctcatctggagcacagctgaggctagtaagagctaaatgactttccttgctatgacttggcttacctgaattagctgtaagagttgccgaatgggatgggttctgctatttaataaacagcattcatattcatttttccccagatggagttacctacctttccacatggtcagcttagaaatcttcccctaaagatgctaatctcctttgggctgtctcagaacacagtatccttcaaataagaaaaactgagtgggaagtgcagtgtttccaaacaatacctatcataactacgtattcattgtctacctgctaagtcaagggttcactgcatttctccttcctcagaatacactctggacctgtgctgtctaatatggtagccactaacaaaatgtggccattttgatggaaatccattaaaatcaaagaaaatttaaaactcaattcctcaattgggctggccacatttcaaatgctcactacccacctgtggctagggtctacttctactgtattggcgagcatggatatagaacatttcatcacagttctgttggaccaatctagatagattcattatcccatctagagaagagactttagtcactgtcttcttgcttcagacccatctatatttaaaacaaatttccctaaatcctgagactgagacggagctacaaattctcagatggcgaccgtgtaaatggtattagcggctgaagaaaaaaaatttttcaagacctctgttttttaactgaactttatcattggcattgtgggtctttgaagttgctgggataaattaatataattaaataaaagactgaatttaattgca

SEQ ID NO: 8143 - DNA, 2416 bp, Homo sapiens
  source 1..2416: mol_type = unassigned DNA
gtccaaagagggacggctgtcagccctgcttgactgagaacccaccagctcatcccagacacctcatagcaacctatttatacaaagggggaaagaaacacctgagcagaatggaatcattatttttttcccaaggagaaaaccggggtaaagggagggaagcaattcaatttgaagtccctgtgaatgggctttcagaaggcaattaaagaaatccactcagagaggacttggggtgaaacttgggtcctgtggttttctgattgtaagtggaagcaggtcttgcacacgctgttggcaaatgtcaggaccaggttaagtgactggcagaaaaacttccaggtggaacaagcaacccaggttctgctgcaagcttgaaggagcctggagcgggagaaagctaacttgaacatgacctgttgcatttggcaagttctagcaacatgctcctaaggaagcgatacaggcacagaccatgcagactccagttcctcctgctgctcctgatgctgggatgcgtcctgatgatggtggcgatgttgcaccctccccaccacaccctgcaccagactgtcacagcccaagccagcaagcacagccctgaagccaggtaccgcctggactttggggaatcccaggattgggtactggaagctgaggatgagggtgaagagtacagccctctggagggcctgccaccctttatctcactgcgggaggatcagctgctggtggccgtggccttaccccaggccagaaggaaccagagccagggcaggagaggtgggagctaccgcctcatcaagcagccaaggaggcaggataaggaagccccaaagagggactggggggctgatgaggacggggaggtgtctgaagaagaggagttgaccccgttcagcctggacccacgtggcctccaggaggcactcagtgcccgcatccccctccagagggctctgcccgaggtgcggcacccactgtgtctgcagcagcaccctcaggacagcctgcccacagccagcgtcatcctctgtttccatgatgaggcctggtccactctcctgcggactgtacacagcatcctcgacacagtgcccagggccttcctgaaggagatcatcctcgtggacgacctcagccagcaaggacaactcaagtctgctctcagcgaatatgtggccaggctggagggggtgaagttactcaggagcaacaagaggctgggtgccatcagggcccggatgctgggggccaccagagccaccggggatgtgctcgtcttcatggatgcccactgcgagtgccacccaggctggctggagcccctcctcagcagaatagctggtgacaggagccgagtggtatctccggtgatagatgtgattgactggaagactttccagtattacccctcaaaggacctgcagcgtggggtgttggactggaagctggatttccactgggaacctttgccagagcatgtgaggaaggccctccagtcccccataagccccatcaggagccctgtggtgcccggagaggtggtggccatggacagacattacttccaaaacactggagcgtatgactctcttatgtcgctgcgaggtggtgaaaacctcgaactgtctttcaaggcctggctctgtggtggctctgttgaaatccttccctgctctcgggtaggacacatctaccaaaatcaggattcccattcccccctcgaccaggaggccaccctgaggaacagggttcgcattgctgagacctggctggggtcattcaaagaaaccttctacaagcatagcccagaggccttctccttgagcaaggctgagaagccagactgcatggaacgcttgcagctgcaaaggagactgggttgtcggacattccactggtttctggctaatgtctaccctgagctgtacccatctgaacccaggcccagtttctctggaaagctccacaacactggacttgggctctgtgcagactgccaggcagaaggggacatcctgggctgtcccatggtgttggctccttgcagtgacagccggcagcaacagtacctgcagcacaccagcaggaaggagattcactttggcagcccacagcacctgtgctttgctgtcaggcaggagcaggtgattcttcagaactgcacggaggaaggcctggccatccaccagcagcactgggacttccaggaggatgagaacagggccaactctgctgctgctgaagcttatcaaaggcctttaacttttcagcagattgtgaacaatgggtaggacatcatttgcttcattcagagatcctcaagaaggcactgccgatcactctcctctaggcacagatcaagggtggcattgtttaatgtcttatttaaataaaatccagaaaaactgga

SEQ ID NO: 8144 - DNA, 815 bp, Homo sapiens
  source 1..815: mol_type = unassigned DNA
cactgcgggaggatcagctgctggtggccgtggccttaccccaggccagaaggaaccagagccagggcaggagaggtgggagctaccgcctcatcaagcagccaaggaggcaggataaggaagccccaaagagggactggggggctgatgaggacggggaggtgtctgaagaagaggagttgaccccgttcagcctggacccacgtggcctccaggaggcactcagtgcccgcatccccctccagagggctctgcccgaggtgcggcacccactgaaccaacagcatcagcattacctgggagctcaccagaaatgcagaatctcaggccccaccccagacctacttgacctaagtctacatttaatgaggtcccggatggttcaagggcatatggacaccggagaggcactgagctacgtcttggcttctaccaccccgtctttgggttactgtctgctctatgacctgctatcaactgctcactttttgcatgtctaaagctcacacttcttgagatggaggatctggcaggtttctctggccgctagcctggggaggctgtccctgttaggtggaactatggctccaagatgcttcataggcctccggtcagtgttcagaccagtgactcccagtgtgtgcctgtctctggttcagaggtagatgccaggatcagagcaagccaaggatcccctgaacccctccagaagtgagctgtgagagtttggagaacctgcacaaagagaaggggatggcatgtaccttgtgacgtctgtccactgatggagaatgacaggctggcagaatcagcct

SEQ ID NO: 8145 - DNA, 572 bp, Homo sapiens
  source 1..572: mol_type = unassigned DNA
gctctgcccgaggtgcggcacccactgtgtctgcagcagcaccctcaggacagcctgcccacagccagcgtcatcctctgtttccatgatgaggcctggtccactctcctgcggactgtacacagcatcctcgacacagtgcccagggccttcctgaaggagatcatcctcgtggacgacctcagccagcaaggtagccacggctttcctccaggctcgtctgggacaactcaagtctgctctcagcgaatatgtggccaggctggagggggtgaagttactcaggagcaacaagaggctgggtgccatcagggcccggatgctgggggccaccagagccaccggggatgtgctcgtcttcatggatgcccactgcgagtgccacccaggctggctggagcccctcctcagcagaatagctggtgacaggagccgagtggtatctccggtgatagatgtgattgactggaagactttccagtattacccctcaaaggacctgcagcgtggggtgttggactggaagctggatttccactgggaacctttgccagagcatgtgaggaaggccc

SEQ ID NO: 8146 - DNA, 538 bp, Homo sapiens
  source 1..538: mol_type = unassigned DNA
acctggctggggtcattcaaagaaaccttctacaagcatagcccagaggccttctccttgagcaaggctgagaagccagactgcatggaacgcttgcagctgcaaaggagactgggttgtcggacattccactggtttctggctaatgtctaccctgagctgtacccatctgaacccaggcccagtttctctggaaagctccacaacactggacttgggctctgtgcagactgccaggcagaaggggacatcctgggctgtcccatggtgttggctccttgcagtgacagccggcagcaacaggtgggtagtcagacttctcaggatggatgatagcccaagaagacttgaaagtgggcgatatttttctgggatgccccatacttccctttgaggtatcttctttctgtggtcccatgtcccttgactgccatggtcccccactgtaatgactcatcacagctctcctcacctcacctccatctgtaagcacagacatgtgccattgtcagaaaataaaagcatcttagttaaaggg

SEQ ID NO: 8147 - DNA, 2775 bp, Homo sapiens
  source 1..2775: mol_type = unassigned DNA
caggctgagaagccagactgcatggaacgcttgcagctgcaaaggagactgggttgtcggacattccactggtttctggctaatgtctaccctgagctgtacccatctgaacccaggcccagtttctctggaaagctccacaacactggacttgggctctgtgcagactgccaggcagaaggggacatcctgggctgtcccatggtgttggctccttgcagtgacagccggcagcaacagtacctgcagcacaccagcaggaaggagattcactttggcagcccacagcacctgtgctttgctgtcaggcaggagcaggtgattcttcagaactgcacggaggaaggcctggccatccaccagcagcactgggacttccaggagaatgggatgattgtccacattctttctgggaaatgcatggaagctgtggtgcaagaaaacaataaagatttgtacctgcgtccgtgtgatgaaaagcccgccagcagtggcgttttgaccagatcaatgctgtggatgaacgatgaatgtcaatgtcagaaggaaaagagaattttggccatcaaaatccagctccaagtgaacttaaagagcttatatatttcatgaagctgatccttttgtgtgtgtgctcctggtgttaggagagaaaaaagctctatgaaagaatataggaagtttctccttttcacaccttatttcattgactgctggctgctttaaaaaaaaaaaaaaaggatccattgtaccgttgtcttcatcactgggaaatgattattacatagtacagaagattctttgtttttctccactgagcacttaacaattgctttctctctggcctggacattctctggcagcacctccaggatacataaattcaatggatcaatttatttgtcttcaaatggccttaacttggattgtctgtttggccaaccatgaaaattaaagagtgaagcagatgtaatggcctgacattccaaaaactctgaattgggtttattagcacaaatgttgtgttcatttgttgagccatatctcagaagaaggaaagggagctacagaaaggaggtttaggattgcagagaagatgcaagagcactttggcccaattctccagctcaacccagcagctgaaaagcttcaagagatctaggaaaagacattttcatgttaatgagaatttccaccattgtagagaatttccttcctactgagaatctacctctattccccctgccctagctcttctctaacttggttaaccataaccataaccagattcccttgcaatcgatttctctttagtcgttggtgttagaagtaccagcacaatttgagcattcccattaacaaaggtgttcacagttgagaaactctcctgccgggcgcggtggctcatgcctgtaattccagcactttgggaggcagagttgggaggatcacctgatgtcaggggtttgagaccagcctggtcaacattgcaaaaccttgtctctactaaaaatacaaaaattagctgggcatggtggcgcatacctgtaatcccagctacttgggaggctgaggcaagagaatcgcttgaacccaggaggcagaggttgcagtgagctgagatcatgccattgcactccaacctgggtgacagagtgagactccatctcaaaaaaaaaaaaaaagagagaaactctcctgatgccctgttacagggtttgcactgactggagcagaaacagcaacctttctaaaaaagcaaacctttttcctgggaggaaaatgccagagcctgagccaaaattcttatgacaggtaacatttgggtgttaatgtccatgagagctgacagggccatctctgagcccatataactgtctggaacccccaaatgtgtccacaggttgaatgtccatgagtgtgggaagaacacggctcatctggagcacagctgaggctagtaagagctaaatgactttccttgctatgacttggcttacctgaattagctgtaagagttgccgaatgggatgggttctgctatttaataaacagcattcatattcatttttccccagatggagttacctacctttccacatggtcagcttagaaatcttcccctaaagatgctaatctcctttgggctgtctcagaacacagtatccttcaaataagaaaaactgagtgggaagtgcagtgtttccaaacaatacctatcataactacgtattcattgtctacctgctaagtcaagggttcactgcatttctccttcctcagaatacactctggacctgtgctgtctaatatggtagccactaacaaaatgtggccattttgatggaaatccattaaaatcaaagaaaatttaaaactcaattcctcaattgggctggccacatttcaaatgctcactacccacctgtggctagggtctacttctactgtattggcgagcatggatatagaacatttcatcacagttctgttggaccaatctagatagattcattatcccatctagagaagagactttagtcactgtcttcttgcttcagacccatctatatttaaaacaaatttccctaaatcctgagactgagacggagctacaaattctcagatggcgaccgtgtaaatggtattagcggctgaagaaaaaaaatttttcaagacctctgttttttaactgaactttatcattggcattgtgggtctttgaagttgctgggataaattaatataattaaataaaagactgaatttaattgc

SEQ ID NO: 8148 - DNA, 630 bp, Homo sapiens
  source 1..630: mol_type = unassigned DNA
gtcgaaaggtgtcagatggtgagatggcttctagactgggctctgcccactaattagctgtgtggccttgggagaatcatccggcctctcttgctgcccttctttccgatgaaataatgctgacgatgatatttcagggttgtccaggggtcaatgaggcgggatagagggaagcatcgtgaaatctgggagccccaggccagcgaaaaatgtggaagggccgtacccgcactctcctagcactgggtgtgaggcagcgtcgtttccccttcgcgctcttcgaatgtcaagtgcaccagcttccaatccctcctctgggcgggcccggtctggctaatctcagctgcagattccagtacaaactcaggactctcccccgcccagccgcccctacacaaggactcgccgaacacaccttgaatcccgcgccagagcgcagcccggaactgcagctcgcggcgcgggcccaggactgagcagctaggcgcgagcgaaaacaaacagctggggctgcgagcgcccccgccccggccccgagagcacgccggcccagtcccccacctggggcgcccgtctgcccaccatgaggaagatccgcgccaatgccatcgccatcctgaccgtagcctg

SEQ ID NO: 8149 - DNA, 579 bp, Homo sapiens
  source 1..579: mol_type = unassigned DNA
aggactctcccccgcccagccgcccctacacaaggactcgccgaacacaccttgaatcccgcgccagagcgcagcccggaactgcagctcgcggcgcgggcccaggtcgggggtcgcgcgtctccagtcggtgactcaaggccgctcggtccgggggactgagcagctaggcgcgagcgaaaacaaacagctggggctgcgagcgcccccgccccggccccgagagcacgccggcccagtcccccacctggggcgcccgtctgcccaccatgaggaagatccgcgccaatgccatcgccatcctgaccgtagcctggatcctgggcactttctactacttatggcaggacaaccgagcccacgcagcatcctccggcggccggggcgcgcagagggcaggcaggaggtcggagcagctccgcgaggaccgcaccatcccgctcattgtgacaggaactccctcgaaaggctttgatgagaaggcctacctgtcggccaagcagctgaaggctggagaggacccctacagacagcacgccttcaaccagctggagagtgacaagctgagcccagaccggc

SEQ ID NO: 8150 - DNA, 604 bp, Homo sapiens
  source 1..604: mol_type = unassigned DNA
aggactctcccccgcccagccgcccctacacaaggactcgccgaacacaccttgaatcccgcgccagagcgcagcccggaactgcagctcgcggcgcgggcccaggactgagcagctaggcgcgagcgaaaacaaacagctggggctgcgagcgcccccgccccggccccgagagcacgccggcccagtcccccacctggggcgcccgtctgcccaccatgaggaagatccgcgccaatgccatcgccatcctgaccgtagcctggatcctgggcactttctactacttatggcaggacaaccgagcccacgcagcatcctccggcggccggggcgcgcagagggcaggcaggaggtcggagcagctccgcgaggaccgcaccatcccgctcattgtgacaggaactccctcgaaaggctttgatgagaaggcctacctgtcggccaagcagctgaaggctggagaggacccctacagacagcacgccttcaaccagctggagagtgacaagctgagcccagaccggcccatccgggacacccgccattacagctgcccatctgtgtcctactcctcggacctgccagccaccagcgtcatcat

SEQ ID NO: 8151 - DNA, 5708 bp, Homo sapiens
  source 1..5708: mol_type = unassigned DNA
actcggcgcgcttctctcccagtgcgcagtggcctggtgggtcagccggcggcggctggagcgcggggccggccctgcgcacgaatgaatgggcgcccgggggacgcgcgcgctcggggctgaagggcattaggaccgtgaggatcgctccgcgatcctgtctctccctatcacccccccgcccccccacctctctcctttttctgctctgcaggactgagcagctaggcgcgagcgaaaacaaacagctggggctgcgagcgcccccgccccggccccgagagcacgccggcccagtcccccacctggggcgcccgtctgcccaccatgaggaagatccgcgccaatgccatcgccatcctgaccgtagcctggatcctgggcactttctactacttatggcaggacaaccgagcccacgcagcatcctccggcggccggggcgcgcagagggcaggcaggaggtcggagcagctccgcgaggaccgcaccatcccgctcattgtgacaggaactccctcgaaaggctttgatgagaaggcctacctgtcggccaagcagctgaaggctggagaggacccctacagacagcacgccttcaaccagctggagagtgacaagctgagcccagaccggcccatccgggacacccgccattacagctgcccatctgtgtcctactcctcggacctgccagccaccagcgtcatcatcaccttccacaatgaggcccgttccaccctgctgcgcacagtgaagagtgtcctgaaccgaactcctgccaacttgatccaggagatcattttagtggatgacttcagctcagatccggaagactgtctactcctgaccaggatccccaaggtcaagtgcctgcgcaatgatcggcgggaagggctgatccggtcccgagtgcgtggggcggacgtggctgcagctaccgttctcacctttctggatagccactgcgaagtgaacaccgagtggctgccgcccatgctgcagcgggtgaaggaggaccacacccgcgtggtgagtcccatcattgatgtcatcagtctggataattttgcctaccttgcagcatctgctgaccttcgtggagggttcgactggagcctgcatttcaagtgggagcagatccctcttgagcagaagatgacccggacagaccccaccaggcccataaggacgcctgtcatagctggaggaatcttcgtgatcgacaagtcctggtttaaccacttgggaaagtatgatgcccagatggacatctgggggggagagaattttgagctctccttcagggtgtggatgtgtggtggcagtctggagatcgtcccctgcagccgggtgggccatgtcttcaggaaacggcacccctacaacttccctgagggtaatgccctcacctacatcaggaatactaagcgcactgcagaagtgtggatggatgaatacaagcaatactactatgaggcccggccctcggccatcgggaaggccttcggcagtgtggctacgcggatagagcagaggaagaagatgaactgcaagtccttccgctggtacctggagaacgtctacccagagctcacggtccccgtgaaggaagcactccccggcatcattaagcagggggtgaactgcttagaatctcagggccagaacacagctggtgacttcctgcttggaatggggatctgcagagggtctgccaagaacccgcagcccgcccaggcatggctgttcagtgaccacctcatccagcagcaggggaagtgcctggctgccacctccaccttaatgtcctcccctggatccccagtcatactgcagatgtgcaaccctagagaaggcaagcagaaatggaggagaaaaggatctttcatccagcattcagtcagtggcctctgcctggagacaaagcctgcccagctggtgaccagcaagtgtcaggctgacgcccaggcccagcagtggcagctgttgccacacacatgacggagggattttcttgaagggtcagctattgcactgtgctgggaggctggctgtggctcctgtttgtgaagagaactcccagttccttttcacagccgctgagaacacatccacacatctaccccacggccttgtcttggaactgctcctgctatccccacaccctgcttcctcaccccactggctcttgggcaaatgactgttggtaccaggaccctgggggtctcccctacaaagcagaccagcctggggcagatatacctaccacaggagccccctgtctttcataggccaaggatccacatacccatagagttcatggattctagagggtctaggaatctcttgaaattgtccctaaaatactgcatgtgtgtgcatacatgcattttcctggggaaaaagtccatggcttctaaaagaggtccctgatccccaaagggcctgaacctctgctctggattgaagccactgtctgcccaagctgccaccccctaatcttcctccctggcgtgctcaaactgccatcgcctgctccctccacacggcccttggggtcagcagccaagtgtctgtggtccgcagcacctgctctggagggctctccagcagtttcgcctcctgactctcaccagcgtcctctcggcagcactcccgtgcccaagtgcacccctctggacttgccagcgcaggccccttcgctcccagggccatgctttgcctgtcctctgtcgtgatgtttcttccgcagccaggtgcagcctcagatcccctgttcatctgggaagcctcctgccacagcttaggacagaactgggcccagggcaaaggcctctccccagaggatggactagaaggcctgggccacactcgggcatggacctttggggctggggagccggggctgcgcctgttgaatgtaagaggactgctgaccagagggccttcaagagggtctctctgtcctttgctgtggtcagatcaggctctgcacttatcagccggtcctttgtggcaacgcagccctgttctgtttttgcttttcctcttcttgaccaaagcatgtgccactagctgtccttgaggacctcgtctttatgaaacacacacctggaataaaaccacttcttacatgtccacatgcaccagcgccttcctttctgcctccaggcctagcccttcagcacaccctcccccgcctcgtggggaaagtccgggcctcctttctgtaaaagtgaaactgaacatgctcaagtctagccctgtcctgcacctggtagcttgctcgtcggcctccatgccctgtggtgccccaggaactcctgactgctctggtgggggccaacaggtggccctactgcaagggcaggccttggaccaaaaccaggaatcagcacaggtcaggtggagcccaggctcctgtggcctcattatgggattctacttggggcttagaaatggaaagcaaattgcttctccaaataggtattgccctgccgccgtgcttgcctttagccagccctctctccttccctgtgagccaggcctgtcccctcggagctgccctcccctgctctaccacacaagaaggcagtggtacaaattcaggcaggacatacttcctgggtaaaaacagcaaaataattctgaaaagagtcttaccagaccagctttgcttgattgggtagcagatgctctgcctaatgttcccatggaaaccaatggaaaacccccaccatgtctgtgatcagaagctgaacctacccaggtaaaaataaacgctgcttcaacatacatatgaactgcagctggcaggccagcacaccactagcctctcctggacgcaaccatttctgccctcagccccactttgccgtggggctgctgatctggagttacccagaacttctgacccctgggcctgaggagcctggagcaaagccctagctggctgcagagaatacaccttggctacaatgtccagcttggtctgggcttaggagcaagtcactgtaaaagaccttggctgcagcctccattcccccatccacccctccgtcctctcagggagcacagcccaccacccaccgcctactcagggctccctcctggcgcgctgagccccatttccactctccatctattttcaccctcagccttggagggctctggtgcttgcttctcctgagtcaggctctctcctcttgcttgctctcctccaaacctacctctcccaaagcccattttctgtgccacccagttttttccctaggagataaggctgtcagcctttagccaggccctggaggaatcagcaaaagccccaggctgggtattaacagttacgtcactggcaggagagtcccccgaaagcctatgggcagggcagcagaagggacttctgcaccagggccagactcccatttgtacagcagggagctgttcctgaggatccctgggcctctgtgacttggcttcagtttttacaagggctgttccccctggcccctcaggaaggctgtctccatctgcagttgggagaaataacctggacaatatgactgtcgtcccagggttccagcaccccaaggcctgcgggggatgtctcccagcactgcatggggtgtggtccttctcccaccagggaacaggaaaggaaacctggaagggaaaggctggcatttataacgtctgtaatttcattgccaacaatgttctcagtgtgtttggtatttgtgtgtccctgtgatggtctgagtcagtgctcctccagaaggagggggcaacccagccagcttctctaatgggaagaggtcttcactgccaggcacttaggaaagacctggagatggatcaggggagggcctactctcctgggcttgcagctgggctgtctgagtagccgacctggactgaggctccagagccatctgaggacaatttctcctgcttaattcagccctgtgaagcgtggagaagagtgtactaggggtgcggactcttgggtctttaagacccattcaagccaggcgcagtggctcacacctgtaatcccaaatattcaggaggctgaattgggagggtcctttgaacccaggggagttcgagaccagcctgggcaacatagcgagaccctatctctataaataaaaattcaaatcaacttcaaaaaatacccattcagctggatccctcactactctgccatttgccagctgtgagctctttttttttttttttttttgagacagagtgttgctctgtcacccaggctggagagcagtggcatgatctccacttactgcaagctctgcctcctgggttcacgccattctcctgcctcagcctcccgagtagctgggactacaggcgcccaccaccatgcccagctaattttttttgtatttttagtagagacagggtttcaccgtgttacccaggatggtctccatctcctgacctcgtgatccacccgcctcggcctcccaaagtgctgggattacaggcgtgagccactgcgcctgactgagctcttgaataagttatttcatctctcagccttgatttctttacctgttaaatggggtactcatagccgtaaaggatttttttgtgaagcctgatcgcaaagcatctggccctttccaaatgcttaatcaatatgtcattactattattaataaacattttctgagtgcctgcta

SEQ ID NO: 8152 - DNA, 5548 bp, Homo sapiens
  source 1..5548: mol_type = unassigned DNA
gcaggactgagcagctaggcgcgagcgaaaacaaacagctggggctgcgagcgcccccgccccggccccgagagcacgccggcccagtcccccacctggggcgcccgtctgcccaccatgaggaagatccgcgccaatgccatcgccatcctgaccgtagcctggatcctgggcactttctactacttatggcaggacaaccgagcccacgcagcatcctccggcggccggggcgcgcagagggcaggcaggaggtcggagcagctccgcgaggaccgcaccatcccgctcattgtgacaggaactccctcgaaaggctttgatgagaaggcctacctgtcggccaagcagctgaaggctggagaggacccctacagacagcacgccttcaaccagctggagagtgacaagctgagcccagaccggcccatccgggacacccgccattacagctgcccatctgtgtcctactcctcggacctgccagccaccagcgtcatcatcaccttccacaatgaggcccgttccaccctgctgcgcacagtgaagagtgtcctgaaccgaactcctgccaacttgatccaggagatcattttagtggatgacttcagctcagatccggaagactgtctactcctgaccaggatccccaaggtcaagtgcctgcgcaatgatcggcgggaagggctgatccggtcccgagtgcgtggggcggacgtggctgcagctaccgttctcacctttctggatagccactgcgaagtgaacaccgagtggctgccgcccatgctgcagcgggtgaaggaggaccacacccgcgtggtgagtcccatcattgatgtcatcagtctggataattttgcctaccttgcagcatctgctgaccttcgtggagggttcgactggagcctgcatttcaagtgggagcagatccctcttgagcagaagatgacccggacagaccccaccaggcccataaggacgcctgtcatagctggaggaatcttcgtgatcgacaagtcctggtttaaccacttgggaaagtatgatgcccagatggacatctgggggggagagaattttgagctctccttcagggtgtggatgtgtggtggcagtctggagatcgtcccctgcagccgggtgggccatgtcttcaggaaacggcacccctacaacttccctgagggtaatgccctcacctacatcaggaatactaagcgcactgcagaagtgtggatggatgaatacaagcaatactactatgaggcccggccctcggccatcgggaaggccttcggcagtgtggctacgcggatagagcagaggaagaagatgaactgcaagtccttccgctggtacctggagaacgtctacccagagctcacggtccccgtgaaggaagcactccccggcatcattaagcagggggtgaactgcttagaatctcagggccagaacacagctggtgacttcctgcttggaatggggatctgcagagggtctgccaagaacccgcagcccgcccaggcatggctgttcagtgaccacctcatccagcagcaggggaagtgcctggctgccacctccaccttaatgtcctcccctggatccccagtcatactgcagatgtgcaaccctagagaaggcaagcaggtgagtctccttgcctctggcccagaggcccagcagcccgaggggccatgcctcagggtggcagaccttggcaggagagcccctgattgactcaaataagcccttcagagcgaggatctgtggggagggggagcaaagtctacatctaggtcaagccaattattctgcccatgaggaaatacttctttgggtaattatttgtttaatgccatcctgccaggctgtgagctccatgaaggcagggaccacttgtcttgttaacactgtatccctagctcctgacaaccaccacagttcaaataagtgttagcttttactgacagtctgtgctagaagtttgaaatagatcatctcatctaatcctcccagccacccagtgacgtgggttctagtactacctccattttataagtgagtaagctgaggctcgctgaatctaaagaatatatgtcagatcacacagctgagaaggggtggagctgggattcaaacccaggtcagtgacttctaggcccacagtcttaacccagcacatagtagatgttcaataagtatttcttgactgttggcagactagggaaactgagctccagacacagtgatgtccaagctggcatgaccagcctcacgtgagcactgctttttccattgatccgacactctcacccacactgtcaccactaatcctgggagacaggtcagggtcaaggaagaaagtgatgcacagagaggtggagtcacttgctcagggtacacagcaaccagtgacagtggatttccagaatccagccagctctcttctgtgctactcccttcctgtcttggagggctccctcaccacccagggaatgggacccaaggcccagaggctgctccagcacttcccctgctcaccctcctcagaagccctccctgtgcctgccactggctagcctgcctcagtcggtgcaagcagtgaggagggtgcctgggtctctgatttggcctgcatggttttcctcctacccctttttctttgcttgggtcagcacgttttttaaaggatgaacagcagtttgctgtgccattctggaaagcagccacagcctctccctccggcctgtgtgtgtctgagggatctgtgtgcccagcccacttgctggacctgtgggacactttaagcgcttttggatggtggggggatgcagcccaccctcggccctgccctgcagtggggctggtgcagtgtctcctgcacctagagcacccacctctctgagggcaaatccttgagcccacgcccaccccctcccactgaggaattatctccgagcaaagcctccactcaattgcccctctggggctgaatcacacatttccccctttgtgctgacccagcctacggggtgtgtaggtatctccttggccccattcattctgcccctgcaagtcctgccaggctcccgatggcattctgggtgcctgtgcccctcttctcccaggaggacaggatgagccagctatcccactgccaatgccttctggaatccgggccgtccttcttggtcccctgctggtcctatttccaaggctagctgggtttcctgtatccgagaggctcctgtgcctcagacctggtgtgatggagtcagcaggccccagctcagtcttccctccccctcccttcactcagtctcctcacttataaaataaggggctccctcccctgcttacctcacaaggaatccgcaagaaccaagatgtggagatgggacagtgggtgatgtgacattgtttctcagacaagcccagaattgagtggcctggagagtcaagaagccctgagattgtgcctaatagcactgataagaagtgagaatcccgctgtttggggagcacttcctaatgattgggtgattcagtcattcgttcatcttaaaacaaaatgacggctgggtgcagtggctcatgcctgtaatcccagcactttgggaggctgagatgggtggatcatgaggtcaggagttcgagaccagcctgaccaaaatggtgaaaccccgtctctactaaaaacacaaaaattagccgggcgtggtggcgcgcgtctgtaatcccagctactcaggaggctgagacaggagaatcgcttgaacccgggaggcagaggtagcagtgagccgagatcgtgtcactgcactcctgcctgggtgacagagcgagactcagtctcaaacaaacaaaatgtcactgggtgcctaccttgtgccagagaatgtacagatcatgttggccacaaggatgaacggacatggtccttgacccccagggaatttgcactttagtggaagagaaagaagggagtaagacactatattacagaaggctagatgctgaggtagctccaagcaccacgactccctggggtgaggatggccatactctctccagctgggcattgctggaggtttggcctacatgaggtaaatgtcaaggactagaagagcatgaagaaacaggaggggggatccaaaggcccttgacctttaggctctctgcgggggccatgtgggcccagagaggctgggtctcagccctacccatcacgtccttgcattcccactgggagcccaggctccgcccctgccttccaccctgtgtgcacatccccccgcagccctagccctatccctgcagctgggtgggctcatctctctcccctcagctgctccctgtccaccaactgccctcagagccctctgggcttcctccacatggtcacaagcactcctgcctctaatcgaagacacggtgaatgagagaagatggaagaggggaggtggttgcaatgggaggcaaataggagagaaacccaaactagacctatcttactattattcttccctgagccttgaaacctgggtctctgcctctcatcccttctcataaatgttccaagcaacactccatcctccacccaggcacttccgtaatgttctacaggagcaactcttctcccccttgtcaaacccggggtcggggaggcaccaggaggtgaaggcactgaccaggagcccctgcatgactctgtgatgcgagacctccagtctcccaccaccctgctggccccacacttcatccctacaaagaaggcagcttcccactagggggtgtagattactggcctcacaggtcagaagcttaggaagaataaatcttgtttacagaaataaaagatttacctaggccaggactgacaagctcaagtgcctacagggagctggtgggaaaaccccaataggagaaaagtcgggaccaggcaggaactatggtgacctgcagaacaagagccccatctaaggcagagggcaaatcctcagccccagcaactgatgccatgtaagaaactgggtccaataactacatagaagctggaaatgcagatttgcacgtggcaaccaagctaaattgtaaataaacacaggggacttctgctttgcctcctcctctgatctggacaggaacttctgcaaactacagaaaagcaagagccctgctgggaagggcagggcttaaagctggtgttagaggcaggatgggggcagcctcttacataggaacacacagcctgatttaaatgaggggcatgactgggcatggtagctcatgcctgtaatcccagtgctttggaaggccaagacaggtggatcacttgaggtgagacgttctagctagaccagcctgggcaacatagcaagacccaggctctgcacttatcagccggtcctttgtggcaacgcagccctgttctgtttttgcttttcctcttcttgaccaaagcatgtgccactagctgtccttgaggacctcgtctttatgaaacacacacctggaataaaaccacttcttacatgtc

SEQ ID NO: 8153 - DNA, 2270 bp, Homo sapiens
  source 1..2270: mol_type = unassigned DNA
aaaacaaacagctggggctgcgagcgcccccgccccggccccgagagcacgccggcccagtcccccacctggggcgcccgtctgcccaccatgaggaagatccgcgccaatgccatcgccatcctgaccgtagcctggatcctgggcactttctactacttatggcaggacaaccgagcccacgcagcatcctccggcggccggggcgcgcagagggcaggcaggaggtcggagcagctccgcgaggaccgcaccatcccgctcattgtgacaggaactccctcgaaaggctttgatgagaaggcctacctgtcggccaagcagctgaaggctggagaggacccctacagacagcacgccttcaaccagctggagagtgacaagctgagcccagaccggcccatccgggacacccgccattacagctgcccatctgtgtcctactcctcggacctgccagccaccagcgtcatcatcaccttccacaatgaggcccgttccaccctgctgcgcacagtgaagagtgtcctgaaccgaactcctgccaacttgatccaggagatcattttagtggatgacttcagctcagatccggaagactgtctactcctgaccaggatccccaaggtcaagtgcctgcgcaatgatcggcgggaagggctgatccggtcccgagtgcgtggggcggacgtggctgcagctaccgttctcacctttctggatagccactgcgaagtgaacaccgagtggctgccgcccatgctgcagcgggtgaaggaggaccacacccgcgtggtgagtcccatcattgatgtcatcagtctggataattttgcctaccttgcagcatctgctgaccttcgtggagggttcgactggagcctgcatttcaagtgggagcagatccctcttgagcagaagatgacccggacagaccccaccaggcccataaggacgcctgtcatagctggaggaatcttcgtgatcgacaagtcctggtttaaccacttgggaaagtatgatgcccagatggacatctgggggggagagaattttgagctctccttcagggtgtggatgtgtggtggcagtctggagatcgtcccctgcagccgggtgggccatgtcttcaggaaacggcacccctacaacttccctgagggtaatgccctcacctacatcaggaatactaagcgcactgcagaagtgtggatggatgaatacaagcaatactactatgaggcccggccctcggccatcgggaaggccttcggcagtgtggctacgcggatagagcagaggaagaagatgaactgcaagtccttccgctggtacctggagaacgtctacccagagctcacggtccccgtgaaggaagcactccccggcatcattaagcagggggtgaactgcttagaatctcagggccagaacacagctggtgacttcctgcttggaatggggatctgcagagggtctgccaagaacccgcagcccgcccaggcatggctgttcagtgaccacctcatccagcagcaggggaagtgcctggctgccacctccaccttaatgtcctcccctggatccccagtcatactgcagatgtgcaaccctagagaaggcaagcagaaatggaggagaaaaggatctttcatccagcattcagtcagtggcctctgcctggagacaaagcctgcccagctggtgaccagcaagtgtcaggctgacgcccaggcccagcagtggcagctgttgccacacacatgacggtagccctggggcctcctgtaccttttgcatgagacttcgggaccggaagggggttagggtgggggagtgcaaagtgggctgttcccatctcctcacatttctgccaggaccatcagcaaatacccaccatgacacacgttctccaaagcttgttctaggagggcgcaggcgggcacgccccgatgccctcagtgctgtcctggccttgccccgggagaggagatggtcagggtgctggactgttgctgggtagagactgagtaggtgcccctggccctttgtcctctcccttggcgcttcttggggctgggacaatagtgtgtggtctctcccttgttgcccggagaaagcaaggacagaagcccacacaggggtcttttgggtcatgaggcccagctgtgcaggcaggcagggccaggggaaattgggcagcatggatggagaggctgaaggctgggaagagggaaggggagaggggcagcctgcaggggtagctgaag

SEQ ID NO: 8154 - DNA, 1629 bp, Homo sapiens
  source 1..1629: mol_type = unassigned DNA
atgaggaagatccgcgccaatgccatcgccatcctgaccgtagcctggatcctgggcactttctactacttatggcaggacaaccgagcccacgcagcatcctccggcggccggggcgcgcagagggcaggcaggaggtcggagcagctccgcgaggaccgcaccatcccgctcattgtgacaggaactccctcgaaaggctttgatgagaaggcctacctgtcggccaagcagctgaaggctggagaggacccctacagacagcacgccttcaaccagctggagagtgacaagctgagcccagaccggcccatccgggacacccgccattacagctgcccatctgtgtcctactcctcggacctgccagccaccagcgtcatcatcaccttccacaatgaggcccgttccaccctgctgcgcacagtgaagagtgtcctgaaccgaactcctgccaacttgatccaggagatcattttagtggatgacttcagctcagatccggaagactgtctactcctgaccaggatccccaaggtcaagtgcctgcgcaatgatcggcgggaagggctgatccggtcccgagtgcgtggggcggacgtggctgcagctaccgttctcacctttctggatagccactgcgaagtgaacaccgagtggctgccgcccatgctgcagcgggtgaaggaggaccacacccgcgtggtgagtcccatcattgatgtcatcagtctggataattttgcctaccttgcagcatctgctgaccttcgtggagggttcgactggagcctgcatttcaagtgggagcagatccctcttgagcagaagatgacccggacagaccccaccaggcccataaggacgcctgtcatagctggaggaatcttcgtgatcgacaagtcctggtttaaccacttgggaaagtatgatgcccagatggacatctgggggggagagaattttgagctctccttcagggtgtggatgtgtggtggcagtctggagatcgtcccctgcagccgggtgggccatgtcttcaggaaacggcacccctacaacttccctgagggtaatgccctcacctacatcaggaatactaagcgcactgcagaagtgtggatggatgaatacaagcaatactactatgaggcccggccctcggccatcgggaaggccttcggcagtgtggctacgcggatagagcagaggaagaagatgaactgcaagtccttccgctggtacctggagaacgtctacccagagctcacggtccccgtgaaggaagcactccccggcatcattaagcagggggtgaactgcttagaatctcagggccagaacacagctggtgacttcctgcttggaatggggatctgcagagggtctgccaagaacccgcagcccgcccaggcatggctgttcagtgaccacctcatccagcagcaggggaagtgcctggctgccacctccaccttaatgtcctcccctggatccccagtcatactgcagatgtgcaaccctagagaaggcaagcaggtgagtctccttgcctctggcccagaggcccagcagcccgaggggccatgcctcagggtggcagaccttggcaggagagcccctgattga

SEQ ID NO: 8155 - DNA, 520 bp, Homo sapiens
  source 1..520: mol_type = unassigned DNA
atgttccatcctcacagacactttgggggcaacttcccctgcagttgcccaagccaagtagtcagcaggagcttcatggctgttagctggagcggaaggctggctgcctggttgccacagcaacagctgttgtgacaggaactccctcgaaaggctttgatgagaaggcctacctgtcggccaagcagctgaaggctggagaggacccctacagacagcacgccttcaaccagctggagagtgacaagctgagcccagaccggcccatccgggacacccgccattacagctgcccatctgtgtcctactcctcggacctgccagccaccagcgtcatcatcaccttccacaatgaggcccgttccaccctgctgcgcacagtgaagagtgtcctgaaccgaactcctgccaacttgatccaggagatcattttagtggatgacttcagctcagatccggaagactgtctactcctgaccaggatccccaaggtcaagtgcctgcgcaatgatcggcggga

SEQ ID NO: 8156 - DNA, 568 bp, Homo sapiens
  source 1..568: mol_type = unassigned DNA
gttgctgggagctggcgggcacagtggatttcctgtttgggatctggactcccagtatatggacccagccattagttagattggttcgactggagcctgcatttcaagtgggagcagatccctcttgagcagaagatgacccggacagaccccaccaggcccataagctcacgtgttgcgtcttccctctccttgctcccaggacgcctgtcatagctggaggaatcttcgtgatcgacaagtcctggtttaaccacttgggaaaagcactttctatgcgtgaggacctgctctaaggactttacacacatgaggtcatttaattctctcaaggaccctctgagagctctccttcagggtgtggatgtgtggtggcagtctggagatcgtcccctgcagccgggtgggccatgtcttcaggaaacggcacccctacaacttccctgagggtaatgccctcacctacatcaggaatactaagcgcactgcagaagtgtggatggatgaatacaagcaatactactatgaggcccggccctcggccatcgggaaggccttcggcaggtgg

SEQ ID NO: 8157 - DNA, 340 bp, Homo sapiens
  source 1..340: mol_type = unassigned DNA
agaaatggaggagaaaaggatctttcatccagcattcagtcagtggcctctgcctggagacaaagcctgcccagctggtgaccagcaagtgtcaggctgacgcccaggcccagcagtggcagctgttgccacacacatgacgggcctgaacctctgctctggattgaagccactgtctgcccaagctgccaccccctaatcttcctccctggcgtgctcaaactgccatcgcctgctccctccacacggcccttggggtcagcagccaagtgtctgtggtccgcagcacctgctctggagggctctccagcagtttcgcctcctgactctcaccagcgtc

SEQ ID NO: 8158 - DNA, 2504 bp, Homo sapiens
  source 1..2504: mol_type = unassigned DNA
gctgttctcctagcagcgcgggccggtcggaccgccaaggcagccggcgctggcgatgggaagcggcgtggccgccgacacaggcagtggcaaagtttcccagacgtacacatctggacgcgcggctgccggctacccgtgacccctctaggaagggttcagggatttttaatttggaaaaaaatccacctggtttcctttgtcaaggtctctccgggtggccagcggcaggagctgcaaacttgggcacggcggctacaccggcagcggaccgggctttggagaacctcgggactcaggtgctgaggtgcccagcggctccggacgtgctacggggtgcgagcgcgggggagttcggggcgcacgacaaggaagggcccccgggagctctatatggaggaaggagcccagaatggtgtgcaccaggaagaccaaaactttggtgtccacttgcgtgatcctgagcggcatgactaacatcatctgcctgctctacgtgggctgggtcaccaactacatcgccagcgtgtatgtgcgggggcaggagccggcgcccgacaagaagctggaggaagacaaaggggacactctgaagattattgagcggctggaccacctggagaatgtcatcaagcagcacattcaagaggctcctgccaagcctgaggaggcagaggccgagcccttcacagactcctctctgtttgcacactggggccaggagctcagccccgaaggccggcgcgtggccctgaagcaattccagtactacggctacaacgcctacctcagcgaccgcctgcccctggaccggcccctgcctgacctcagacccagtgggtgccgtaacctctcatttcctgacagcctgccagaggtgagcatcgtgttcatcttcgtcaatgaagcgctttcagtgctgctgcgctccatccactcggccatggaacgcacgcccccacatctgctcaaggagatcattctggtggatgacaacagcagtaacgaggaactgaaggagaagctgaccgaatatgtggacaaggtgaacagccagaagccaggcttcatcaaagtcgtgcgtcacagcaagcaggaaggcctcatccgctccagggtcagtggctggagggcggccactgcccctgtggtggcactctttgatgcccacgtggagttcaatgtgggctgggctgaacctgtactcacccgcatcaaggagaaccggaagcggatcatctcgccatcctttgataacatcaaatatgacaactttgagatagaagagtacccgctggctgcccagggctttgactgggagctgtggtgccgctacctaaatccccccaaggcctggtggaagctggagaactccacagcgccaatcaggagccctgccctcattggctgcttcattgtggaccggcagtacttccaggagatcggcctgctggacgaaggcatggaagtctacgggggcgagaatgtggagcttgggatcagggtgtggcagtgtggcgggagtgtggaggtcctgccctgctcacggattgcccacattgagcgagcccacaagccctacacagaggacctcaccgcccatgtccgcaggaacgctctcagggtggctgaagtctggatggatgaatttaaaagccacgtctacatggcatggaacataccgcaggaggactcaggaattgacattggggacatcactgcaaggaaggctctcaggaaacagctgcagtgcaagaccttccggtggtacctggtcagcgtgtacccagagatgaggatgtactccgacatcattgcctatggagtgctgcagaattctctgaagactgatttgtgtcttgaccaggggccagatacagagaatgtccccatcatgtacatctgccatgggatgacgcctcagaacgtgtactacacgagcagtcagcagatccatgtgggcattctgagccccaccgtggatgatgatgacaaccgatgcctggtggacgtcaacagccggccccggctcatcgaatgcagctacgccaaagccaagaggatgaagcttcactggcagttctctcagggaggacccatccagaaccgcaagtctaagcgctgtctggagctgcaggagaatagcgacctggagttcggcttccagctggtgttgcagaagtgctcgggccagcactggagcatcaccaacgtcctgaggagcctcgcgtcctgacccaccggggccacttccggctgcctctttgctactgtgtagcacctgctgcaacgttgcctgctgtccacgtggggttgtttggagtctggggaaccaggttagtgggcccccaagaagagctttttatttcctattcaattttcatggagtttatagaaagatgctgattggtaggtgatggtatgatatcaaactattttgcagttgtaaataggggacagatggaaaatatttataactgacaataaaatattattaagaaaag

SEQ ID NO: 8159 - DNA, 1523 bp, Homo sapiens
  source 1..1523: mol_type = unassigned DNA
cacggcggctacaccggcagcggaccgggctttggagaacctcgggactcaggtgctgaggtgcccagcggctccggacgtgctacggggtgcgagcgcgggggagttcggggcgcacgacaaggaagggcccccgggagctctatatggaggaaggagcccagaatggtgtgcaccaggaagaccaaaactttggtgtccacttgcgtgatcctgagcggcatgactaacatcatctgcctgctctacgtgggctgggtcaccaactacatcgccagcgtgtatgtgcgggggcaggagccggcgcccgacaagaagctggaggaagacaaaggggacactctgaagattattgagcggctggaccacctggagaatgtcatcaagcagcacattcaaggctataggagaaatttctgccttctgaatgtgtccaactagctctgttcacctgagaaatcacattccccagctctgggtatccctgaataaccacaggagaacagttccaggccctgataagtcagctattgcaagggggacctggctggaagatatgaaggaaaaatatcattcttgaactaataagttgagagatcacagccttcaggggaccagaagggaaggctgaacagggaagggcaatttcacgttcgccatgtccatatttctatcgtcatgagccatctcaccttacaggcagggaagttttgagcttagagaatgggatgcgtcaagaaaaccgtggctcccccagctctgttcctggattcagtgcctgttgtttcatcctgtgtagactggagtcagggtctacacagttggaattctatggaaccaagatgctgtgtggcagatggatgtggactccaactgtgacaatccagaaggccttggggacttgtttcatgaacagctccctgtaggatctctgttggggtgggggattctaggggcatctccgcagttttcttctgaaaacaaaacgaataccagttgggcaggtgcaacaactgtgcatgcagtcccctcccagggctggctagcagtattgttgggtaccgtaagcacttagcattgttaagtgagcataagtaacaagatgcaacagcctctggccaagttttgaagattttgttttaaagtatgcttttagatgttgacattcatgattattaaaaggaacaaaactcaatttggggtctcaagagccacaattctagacttctaggatgtcaggagccatgctcttaagcttctcaccctgctgttttaatgagattaatgattattttccactgagcacctacctgtgatgttcataaaaaagtgaaataaatgactcacatggagatttggaaggatatcactgtggaaagtagatgttaacagcctctagaaatatgataattatcagctatttgagatgcagtcactgtaatgtgataacaagatgtgttgtgcaggtagaaagcatggagagaaatggcacgaagtagttataagaaaaaagaaagaagaga

SEQ ID NO: 8160 - DNA, 3868 bp, Homo sapiens
  source 1..3868: mol_type = unassigned DNA; mol_type = unassigned DNA
gctgaaccctgcccgaagaaaccacatgagccagcagttgctgccctcccgaagtggtcctcggaggcagcgcaccccttcattttggcgaaccgaggaggaagggaggaaccgtgtgggggaaatctagaacttctggttccccaaggacccagcagactgtgttctggctacaaggtgatcactgccaccaggtcagtgcaggattcctccaatgtagatgggccgggagccacaacttgcgcggagcagcagcctcgccgaccactcagagagaagccgcgcgacagccaggcttggcccggacggcgcccccaccctgcgcgcgcgatccaaggttctcacctggagcgctcaggtagggctggggcggggcgggaggctggcgcgcaggcgcggaagtggggcctcgcccctgccgacgtcgcaggctggagctcacctgggagactccaagtggaagccgagcctcggttctgcctctccaggcaacgcgggaggcccagcgggaaggcaggaggcggcggcggaggaggagctctactgagccgcaactgtggcgacagcaaccggagtcgcagccgccgccacctgcacctggcgcctagcccacgtccagcgcctgcccggccgccgcttcccgccaccctgccctgcccacccgccaggtactaccattaaagataccttcttctcagcaaatctatgataaaaaatataagtaacagaagaagaaataactgttatttgtcaagtgacaagcttttaatgtcagaatggctcacctaaagcgactagtaaaattacacattaaaagacattaccataaaaagttctggaagcttggtgcagtaatttttttctttataatagttttggttttaatgcaaagagaagtaagtgttcaatattccaaagaggaatcaaggatggaaaggaacatgaaaaacaaaaacaagatgttggatttaatgctagaagctgtaaacaatattaaggatgccatgccaaaaatgcaaataggagcacctgtcaggcaaaacattgatgctggtgagagaccttgtttgcaaggatattatacagcagcagaattgaagcctgtccttgaccgtccacctcaggattcaaatgcacctggtgcttctggtaaagcattcaagacaaccaatttaagtgttgaagagcaaaaggaaaaggaacgtggggaagctaaacactgctttaatgctttcgcaagtgacaggatttctttgcaccgagatcttggaccagacactcgacctcctgaatgtattgaacaaaaatttaagcgctgccctcccctgcccaccaccagtgtcataatagtttttcataatgaagcgtggtccacgttgcttagaactgtccacagtgtgctctattcttcacctgcaatactgctgaaggaaatcattttggtggatgatgctagtgtagatgagtacttacatgataaactagatgaatatgtaaaacaattttctatagtaaaaatagtcagacaaagagaaagaaaaggtctgatcactgctcggttgctaggagcaacagtcgcaacagctgaaacgctcacatttttagatgctcactgtgagtgtttctatggttggctagaacctctgttggccagaatagctgagaactacacggctgtcgtaagtccagatattgcatccatagatctgaacacgtttgaattcaacaaaccttctccttatggaagtaaccataaccgtggaaattttgactggagtctttcatttggctgggagtcgcttcctgatcatgagaagcaaagaaggaaagatgaaacctacccaattaaaacacccacttttgcaggaggacttttttccatatcaaaagaatattttgagtatattggaagctatgatgaagaaatggaaatctggggaggtgaaaatatagaaatgtctttcagagtatggcaatgtggtgggcagttggagattatgccttgctctgttgttggacatgtttttcgcagcaaaagccctcatagctttccaaaaggcactcaggtgattgctagaaaccaagttcgccttgcagaagtctggatggatgaatacaaggaaatattttataggagaaatacagatgcagcaaaaattgttaaacaaaaagcatttggtgatctttcaaaaagatttgaaataaaacaccgccttcagtgtaaaaattttacatggtatctgaacaacatttatccagaggtgtatgtgccagaccttaatcctgttatatctggatacattaaaagcgttggtcagcctctatgtctggatgttggagaaaacaatcaaggaggcaaaccattaattatgtatacatgtcatggacttgggggaaaccagtactttgaatactctgctcaacatgaaattcggcacaacatccagaaggaattatgtcttcatgctgctcaaggtctcgttcagctgaaggcatgtacctacaaaggtcacaagacagttgtcactggagagcagatatgggagatccagaaggatcaacttctatacaatccattcttaaaaatgtgcctttcagcaaatggagagcatccaagtttagtgtcatgcaacccatcagatccactccaaaaatggatacttagccaaaatgattaagtgttccttaaaattaagttgaaaaaggaaatattctttctcataaaactgtgactaggcatacactgtagtttttgaaaattatgcaaaagcagctaaatgtaacttattccaagtgcatttttcttatttatatctttatgtagcactactacagaaattctgcaagtttctgtttcaaagcacaataactagtaataccaaagactatttcaaaatgtccagatgtaggggaagagatgtttacagtatgatgaaaataattttccaagtaaagtgatgtttgtgtgttttgtacacttagggatatatatatatagctacattcacacactcacaatttaaaatatttcccctagttttttggggggataggaagaaagatttgttactgtatttttttaactacataaaaatagatcaataaatgtcagcattggcctctgtgtacaaaccaagagcttttacagatccagaatttattagtttaaaatgcaggtgaacttttttttgcgtttggtttacttgtctgtcaaatgtttccttaaacatgaaactgaataaggagaagagtatttttaacacttaaatttcttggcaaattttaaaacattttttagtctgtaatacactccacttgaagcacttaagtcttccttaaatgacttttcttaagtaatgatactgtgtgttttcccaaagcacttttaaaaaaatttttataaattactatctgttgaaaaggtgtccttttcctttcttctagtatttttttcttaccaaaattcactaatcttgaatgtttgtgatattaaatttcaaatgcagaatacttgactcatttaaagctaaattttgttactgattcaattataattgtaatggatttttgactttgtaatggattcttttcatcaaaaagccttatttttttatctatgtggaaaacacaataaaaaatcctcaacactattgtaatcatttggttaagtttttttcctcttttgggtaaaatctgtaattgataataggtgggggaaaatgaattttgtatgctgaatttctaagcgcctattgtttgtaaaaccatcagatatttcttatggcacaaaaaatgaggaatagcaaaattcctgtgttcaatatttagaaaattttgtattaatttctgataaagttccttaagcatc

SEQ ID NO: 8161 - DNA, 2107 bp, Homo sapiens
  source 1..2107: mol_type = unassigned DNA; mol_type = unassigned DNA
actgtaagtatatatgtatggatatggttgtaacattttccctccctctccctctaatttaaaaggtgagtgtttctatggttggctagaacctctgttggccagaatagctgagaactacacggctgtcgtaagtccagatattgcatccatagatctgaacacgtttgaattcaacaaaccttctccttatggaagtaaccataaccgtggaaattttgactggagtctttcatttggctgggagtcgcttcctgatcatgagaagcaaagaaggaaagatgaaacctacccaattaaaacacccacttttgcaggaggacttttttccatatcaaaagaatattttgagtatattggaagctatgatgaagaaatggaaatctggggaggtgaaaatatagaaatgtctttcagagtatggcaatgtggtgggcagttggagattatgccttgctctgttgttggacatgtttttcgcagcaaaagccctcatagctttccaaaaggcactcaggtgattgctagaaaccaagttcgccttgcagaagtctggatggatgaatacaaggaaatattttataggagaaatacagatgcagcaaaaattgttaaacaaaaagcatttggtgatctttcaaaaagatttgaaataaaacaccgccttcagtgtaaaaattttacatggtatctgaacaacatttatccagaggtgtatgtgccagaccttaatcctgttatatctggatacattaaaagcgttggtcagcctctatgtctggatgttggagaaaacaatcaaggaggcaaaccattaattatgtatacatgtcatggacttgggggaaaccagtactttgaatactctgctcaacatgaaattcggcacaacatccagaaggaattatgtcttcatgctgctcaaggtctcgttcagctgaaggcatgtacctacaaaggtcacaagacagttgtcactggagagcagatatgggagatccagaaggatcaacttctatacaatccattcttaaaaatgtgcctttcagcaaatggagagcatccaagtttagtgtcatgcaacccatcagatccactccaaaaatggatacttagccaaaatgattaagtgttccttaaaattaagttgaaaaaggaaatattctttctcataaaactgtgactaggcatacactgtagtttttgaaaattatgcaaaagcagctaaatgtaacttattccaagtgcatttttcttatttatatctttatgtagcactactacagaaattctgcaagtttctgtttcaaagcacaataactagtaataccaaagactatttcaaaatgtccagatgtaggggaagagatgtttacagtatgatgaaaataattttccaagtaaagtgatgtttgtgtgttttgtacacttagggatatatatatatagctacattcacacactcacaatttaaaatatttcccctagttttttggggggataggaagaaagatttgttactgtatttttttaactacataaaaatagatcaataaatgtcagcattggcctctgtgtacaaaccaagagcttttacagatccagaatttattagtttaaaatgcaggtgaacttttttttgcgtttggtttacttgtctgtcaaatgtttccttaaacatgaaactgaataaggagaagagtatttttaacacttaaatttcttggcaaattttaaaacattttttagtctgtaatacactccacttgaagcacttaagtcttccttaaatgacttttcttaagtaatgatactgtgtgttttcccaaagcacttttaaaaaaatttttataaattactatctgttgaaaaggtgtccttttcctttcttctagtatttttttcttaccaaaattcactaatcttgaatgtttgtgatattaaatttcaaatgcagaatacttgactcatttaaagctaaattttgttactgattcaattataattgtaatggatttttgactttgtaatggattcttttcatcaaaaagccttatttttttatctatgtggaaaacacaataaaaaatcctcaacactattgtaa

SEQ ID NO: 8162 - DNA, 1954 bp, Homo sapiens
  source 1..1954: mol_type = unassigned DNA; mol_type = unassigned DNA
acatgagccagcagttgctgccctcccgaagtggtcctcggaggcagcgcaccccttcattttggcgaaccgaggaggaagggaggaaccgtgtgggggaaatctagaacttctggttccccaaggacccagcagactgtgttctggctacaaggtgatcactgccaccaggtcagtgcaggattcctccaatgtagatgggccgggagccacaacttgcgcggagcagcagcctcgccgaccactcagagagaagccgcgcgacagccaggcttggcccggacggcgcccccaccctgcgcgcgcgatccaaggttctcacctggagcgctcaggggttccttcaggagtcacaagtactattgggttggaaaatctgggagaataatagtttacttactgatgaaactgctgtattatcattcattaagctggagcagatcacagtttgagggtactaccattaaagataccttcttctcagcaaatctatgataaaaaatataagtaacagaagaagaaataactgttatttgtcaagtgacaagcttttaatgtcagaatggctcacctaaagcgactagtaaaattacacattaaaagacattaccataaaaagttctggaagcttggtgcagtaatttttttctttataatagttttggttttaatgcaaagagaagtaagtgttcaatattccaaagaggaatcaaggatggaaaggaacatgaaaaacaaaaacaagatgttggatttaatgctagaagctgtaaacaatattaaggatgccatgccaaaaatgcaaataggagcacctgtcaggcaaaacattgatgctggtgagagaccttgtttgcaaggatattatacagcagcagaattgaagcctgtccttgaccgtccacctcaggattcaaatgcacctggtgcttctggtaaagcattcaagacaaccaatttaagtgttgaagagcaaaaggaaaaggaacgtggggaagctaaacactgctttaatgctttcgcaagtgacaggatttctttgcaccgagatcttggaccagacactcgacctcctgaatgtattgaacaaaaatttaagcgctgccctcccctgcccaccaccagtgtcataatagtttttcataatgaagcgtggtccacgttgcttagaactgtccacagtgtgctctattcttcacctgcaatactgctgaaggaaatcattttggtggatgatgctagtgtagatgagtacttacatgataaactagatgaatatgtaaaacaattttctatagtaaaaatagtcagacaaagagaaagaaaaggtctgatcactgctcggttgctaggagcaacagtcgcaacagctgaaacgctcacatttttagatgctcactgtgagtgtttctatggttggctagaacctctgttggccagaatagctgagaactacacggctgtcgtaagtccagatattgcatccatagatctgaacacgtttgaattcaacaaaccttctccttatggaagtaaccataaccgtggaaattttgactggagtctttcatttggctgggagtcgcttcctgatcatgagaagcaaagaaggaaagatgaaacctacccaattaaaacacccacttttgcaggaggacttttttccatatcaaaagaatattttgagtatattggaagctatgatgaagaaatggaaatctggggaggtgaaaatatagaaatgtctttcagagtatggcaatgtggtgggcagttggagattatgccttgctctgttgttggacatgtttttcgcagcaaaagccctcatagctttccaaaaggcactcaggtgattgctagaaaccaagttcgccttgcagaagtctggatggatgaatacaaggaaatattttataggagaaatacagatgcagcaaaaattgttaaacaa

SEQ ID NO: 8163 - DNA, 799 bp, Homo sapiens
  source 1..799: mol_type = unassigned DNA; mol_type = unassigned DNA
gtccacagtgtgctctattcttcacctgcaatactgctgaaggaaatcattttggtggatgatgctagtgtagatgagtacttacatgataaactagatgaatatgtaaaacaattttctatagtaaaaatagtcagacaaagagaaagaaaaggtctgatcactgctcggttgctaggagcaacagtcgcaacagctgaaacgctcacatttttagatgctcactcgttttcaactggcgattatagcaatgacagcccaagcaggtgagtgtttctatggttggctagaacctctgttggccagaatagctgagaactacacggctgtcgtaagtccagatattgcatccatagatctgaacacgtttgaattcaacaaaccttctccttatggaagtaaccataaccgtggaaattttgactggagtctttcatttggctgggagtcgcttcctgatcatgagaagcaaagaaggaaagatgaaacctacccaattaaaacacccacttttgcaggaggacttttttccatatcaaaagaatattttgagtatattggaagctatgatgaagaaatggaaatctggggaggtgaaaatatagaaatgtctttcagagtatggcaatgtggtgggcagttggagattatgccttgctctgttgttggacatgtttttcgcagcaaaagccctcatagctttccaaaaggcactcaggtgattgctagaaaccaagttcgccttgcagaagtctggatggatgaatacaaggaaatattttataggagaaatacagat

SEQ ID NO: 8164 - DNA, 603 bp, Homo sapiens
  source 1..603: mol_type = unassigned DNA; mol_type = unassigned DNA
gtaaaacaattttctatagtaaaaatagtcagacaaagagaaagaaaaggtctgatcactgctcggttgctaggagcaacagtcgcaacagctgaaacgctcacatttttagatgctcactgtgagtgtttctatggttggctagaacctctgttggccagaatagctgagaactacacggctgtcgtaagtccagatattgcatccatagatctgaacacgtttgaattcaacaaaccttctccttatggaagtaaccataaccgtggaaattttgactggagtctttcatttggctgggagtcgcttcctgatcatgagaagcaaagaaggaaagatgaaacctacccaattaaaacacccacttttgcaggaggacttttttccatatcaaaagaatattttgagtatattggaagctatgatgaagaaatggaaatctggggaggtgaaaatatagaaatgtctttcagagtaagtttatggaaattaaatatagcagatatattaaacaatgaaatatattgtgttctaatcggctggtacatatgattacagatgtgtgcactctactttttgtgctttctgaaacttaattgctgg

SEQ ID NO: 8165 - DNA, 540 bp, Homo sapiens
  source 1..540: mol_type = unassigned DNA; mol_type = unassigned DNA
agcagttgctgccctcccgaagtggtcctcggaggcagcgcaccccttcattttggcgaaccgaggaggaagggaggaaccgtgtgggggaaatctagaacttctggttccccaaggacccagcagactgtgttctggctacaaggtgatcactgccaccaggtactaccattaaagataccttcttctcagcaaatctatgataaaaaatataagtaacagaagaagaaataactgttatttgtcaagtgacaagcttttaatgtcagaatggctcacctaaagcgactagtaaaattacacattaaaagacattaccataaaaagttctggaagcttggtgcagtaatttttttctttataatagttttggttttaatgcaaagagaagtaagtgttcaatattccaaagaggaatcaaggatggaaaggaacatgaaaaacaaaaacaagatgttggatttaatgctagaagctgtaaacaatattaaggatgccatgccaaaaatgcaaataggagcacctgtcaggcaaaacatt

SEQ ID NO: 8166 - DNA, 559 bp, Homo sapiens
  source 1..559: mol_type = unassigned DNA; mol_type = unassigned DNA
agtgtgtcggttgcccctggagagatcccgaaaggggcgccctgggccaaggggcaggtggcgcctcgggggggagcccggtcacaccctctcgcccacggtgcccccgccagtccctatggggcggcccctgaggagctggacggagaccaaagacctggggttccttcaggagtcacaagtactattgggttggaaaatctgggagaataatagtttacttactgatgaaactgctgtattatcattcattaagctggagcagatcacagtttgagggtactaccattaaagataccttcttctcagcaaatctatgataaaaaatataagtaacagaagaagaaataactgttatttgtcaagtgacaagcttttaatgtcagaatggctcacctaaagcgactagtaaaattacacattaaaagacattaccataaaaagttctggaagcttggtgcagtaatttttttctttataatagttttggttttaatgcaaagagaagtaagtgttcaatattccaaagaggaatcaaggatggaaaggaacatgaaaa

SEQ ID NO: 8167 - DNA, 536 bp, Homo sapiens
  source 1..536: mol_type = unassigned DNA; mol_type = unassigned DNA
agctcacctgggagactccaagtggaagccgagcctcggttctgcctctccaggcaacgcgggaggcccagcgggaaggcaggaggcggcggcggaggaggagctctactgagccgcaactgtggcgacagcaaccggagtcgcagccgccgccacctgcacctggcgcctagcccacgtccagcgcctgcccggccgccgcttcccgccaccctgccctgcccacccgccaggggttccttcaggagtcacaagtactattgggttggaaaatctgggagaataatagtttacttactgatgaaactgctgtattatcattcattaagctggagcagatcacagtttgagggtactaccattaaagataccttcttctcagcaaatctatgataaaaaatataagtaacagaagaagaaataactgttatttgtcaagtgacaagcttttaatgtcagaatggctcacctaaagcgactagtaaaattacacattaaaagacattaccataaaaagttctggaagcttggtgcag

SEQ ID NO: 8168 - DNA, 570 bp, Homo sapiens
  source 1..570: mol_type = unassigned DNA; mol_type = unassigned DNA
actggctatcgcggctcatagtatgtaatcgtttcctaaaaagtcctatttttcttttcctttgctcctgttgtcccatattagggtttaataaacttgctgtcctgttcttagggtcaattgcaagcaatattttatcaaaccaaattctgcttttttaactttatgacttctataggctccctacagacacttcaagtaaagctaatgaattctctttttactattagatcttgtatttctgtgagctattaaaactagctgttatataacaacaaattaaatgctgttgattttcttgtttttaggggttccttcaggagtcacaagtactattgggttggaaaatctgggagaataatagtttacttactgatgaaactgctgtattatcattcattaagctggagcagatcacagtttgagggtactaccattaaagataccttcttctcagcaaatctatgataaaaaatataagtaacagaagaagaaataactgttatttgtcaagtgacaagcttttaatgtcagaatggctcacctaaagcgactagtaaaattacacat

SEQ ID NO: 8169 - DNA, 6171 bp, Homo sapiens
  source 1..6171: mol_type = unassigned DNA; mol_type = unassigned DNA
gctgaatgaagttttctgggtaatggcatgaaatgttttccttatgagaagtggtgttgagttacagcgtgcagacggagaacggggaggagagaaacggcagtctcaatctggcccccaccttttcttgggcttgtaggaaggtggacatgggctcccggagacaagacaagtgatatgttgaactgttcggtggctggaatcaactgctcctggagtgacctaaggccagtgtttatcagaacttagccagggccagccaagcaggcacagatgctctgctatgaaatgccacgcaggcagagactgacaagcggtaggaactgagctttccccttggactgctgcttcctgctgtgttcaggggagggggtcactttctggcaactctgctgctgctgctgctgctgctgctacttcagcttcctctccactcaaggtaagcaggctaagggagggcaggctgctagggaaagctttgtaccatgaacaggatccgaaagtttttccgaggaagtgggcgagtcttggcatttatctttgtagcttctgtcatctggctcctctttgacatggcagctctccgcctctcattcagtgagatcaacactcgggtcatcaaggaagacattgtgaggagggagcggataggattcagagttcagccagaccaaggaaaaattttttacagcagcataaaagagatgaaacctcccctaaggggacatgggaaaggggcatggggcaaagagaatgttagaaaaactgaggagagtgtgctcaaggttgaggtggacttggaccaaacccagagggaaagaaaaatgcagaatgccctgggaaggggcaaggttgtgccgttgtggcatcctgcacatctgcagaccctccctgtgactcctaacaagcagaagacagacgggagaggcaccaaacctgaagcctcctctcaccaggggacaccaaagcaaacgacagctcagggggctccaaagacctcattcatagcagcaaaaggaactcaggtagtcaaaatatcagtacacatgggacgtgtcagtttaaaacaggagccccggaagagtcatagtcccagcagtgacacatcaaaactagcagctgaaagggacttgaatgtgaccatcagtcttagtactgatagaccaaagcagcgatcacaggcagtagcaaacgagagggcacaccctgccagcacagcagtgccgaagtctggggaagccatggccttaaacaaaactaagactcagagcaaagaagtcaatgcaaataaacacaaagccaatacgagtcttccttttcctaagttcactgtcaattcaaatcgcttaaggaagcaatctattaatgagacacctttgggaagtttgtcaaaggatgatggagctagaggggctcatgggaagaaactcaatttctctgaaagccatcttgtgattataaccaaagaggaagagcaaaaggcagaccccaaagaggtctctaattctaaaaccaaaacaatatttcctaaagtattgggtaaaagccaaagtaaacacatttccaggaatagaagtgagatgtcttcctcttcacttgctccacatagagtgccactgtcccaaactaaccatgctttaactggagggctagagccagcaaaaatcaacataactgccaaagccccctctacagaatacaaccagagtcatataaaagcccttttacctgaagacagtggaacgcaccaggtgttaagaattgatgtgacactttctccaagggaccccaaagctccagggcagtttgggcgtcctgtagttgtcccccatggaaaggagaaggaggcagaaagaagatggaaagaaggaaacttcaatgtctaccttagcgatttgatcccagtggatagagccattgaagacaccagacctgctggatgtgcagagcagctagttcacaataacctcccaaccaccagtgtcatcatgtgctttgtggatgaagtgtggtccactctcctgagatctgttcacagtgtcatcaatcgctctcctccacacctcatcaaggagattctgctggtagatgacttcagcaccaaagactatctaaaagataatttggataaatacatgtcccagtttccaaaagttcggattcttcgcctcaaagagagacatggcttaataagggccaggctggcaggagcacagaatgcaacaggtgatgtgttgacatttttagattctcatgtggaatgtaacgttggttggttggaacctcttctggaaagagtttatttaagtagaaagaaagtggcctgtccagtaatcgaagtcatcaatgataaggatatgagttacatgacagtggataactttcaaagaggcatctttgtgtggcccatgaactttggttggagaacaattcctccagatgtcattgcaaaaaacagaattaaagaaactgatacaataaggtgccctgtcatggctggtggattgttttctattgacaaaagttacttttttgaacttggaacatacgaccctggccttgatgtttggggtggggaaaatatggagctctcattcaaggtgtggatgtgtggtggtgaaattgagatcattccctgctcccgagtgggccatatattcagaaatgacaatccatattccttccccaaagaccggatgaagacagtggagcggaacttggtgcgggttgccgaggtctggctggatgagtataaggagctgttctatggccacggagaccacctcatcgaccaagggctagatgttggcaacctcacccagcaaagggagctgcgaaagaaactgaagtgcaaaagtttcaaatggtacttggagaatgtctttcctgacttaagggctcccattgtgagagctagtggtgtgcttattaatgtggctttgggtaaatgcatttccattgaaaacactacagtcattctggaagactgcgatgggagcaaagagcttcaacaatttaattacacctggttaagacttattaaatgtggagaatggtgtatagcccccatccctgataaaggagccgtaaggctgcacccttgtgataacagaaacaaagggctaaaatggctgcataaatcaacatcagtctttcatccagaactggtgaatcacattgtttttgaaaacaatcagcaattattatgcttggaaggaaatttttctcaaaagatcctgaaagtagctgcctgtgacccagtgaagccatatcaaaagtggaaatttgaaaaatattatgaagcctgaagtgtaactgatgtttttatatagtaaacccattaaatactgtgaaaataacactgaacttggaaactatatttctcagcggtagtttaaattttcaattttaataacatttgaatggaagattttttataaatcacaatatttggaataccaaaagatgactcaggaaaacagtccaacattggactgaagtccttcttcggaactgggtggcctttgaattgcctgctttccaccctatgctagacctcatcatgcaaatttccctgtgaaagctaacaggtaactggaaatgaagacagaaggacttgagaaagcatgaggatattcccaatgactatgtttggtaataatcagctcttctggcccacaagtaggaatgatcaatgagaacttaacttagtcctttatttggggattttttcatcaaacaaaaatttcttgagttcttatggctagaagacctcagatgcccacagctgtcacgtttgtgaaatccctccagactacatgcatgcttacctaacagtttgaaatagtattgatctactgctggtaaccctgcttgatggcagcattttgatctaaattacataatggtttttcccaatctgaatcagtggaaaaaaatttaagtgaggaagaagaggccttcaaatgcttatttaattctaggtatgaacactatttcagttcattttgtgcttttaaaactacagttttaaagatttatgataccaataacttcctagattcatgtggattttttttaaggcaatgaaaaaaggctggattataacacactgtagtaatcaaaaatgcatttaagcattgaatgcactctagtgcagggccaagtaagaggagttgaaatgagtaaagcagaaatagagctgctgaaagtttcttttatataaaaataataaaatactactttagatatagtagcattcacagggatgaaatatgcgaaaaatgggttctaaaatatttcaaagggaaaatgaagtgaaggaaacatcatgaaaggggaaaggaatgaggtaaacaagtcttaggaagagagttaagaaaaaattccgctggacttggccaaagaaagaaggggatctagtatctctatgaaggaaaaaagagtaaagccctcagtgtgaacccagtgagaacactgacaaatttgggaaaagttaaatactgatttcatccaaataaagcctctaatcttaagcataccaatactttggcataccagaagacaccttagaaatcaggatagcctttgcattcattttggtaagaaaactgatgctgagaggataaattacctaaaaatcttaaaacccaggcaagttagtcaaagaatcaagattagaattcaggtttccagagacagggctcattctaatgcctcaggtcactggcccgaacaaatctgcttcacagaattccttagaaagagatacacaattctttgctgggattgggtccctggaggacaaccatactatattcttgttaatatgttttttctttttttaaatttaaacttttgttcagttgagatgattgtgaaactaggtatctttcattctgactcctagtttaacatttaattttgactcccaatgagttacgtaaaagcaaaactataactaagaatgggaaaaagaactatttctgcacatttgtaacatatttaagatgttttcttcatataattgaaaactgcagatgagtaagagaatgactaggaaatgagatacagttatatgacacataatgatgttttagtcaacaatgaaccacatatttgacattggtcccaaaagattatattaataatatggtatctttagtgtgcttttctatgtttagacacacaaatactcaccatgatgttacaatagcctacagtgttcaatacagtaacatgcacaagtttgtaacctaggagcaacagggattccatatagcctaggtgtgtagtaggctacctacaccatctaggtttgtgtaagtacactctgatattcacacaatgatgaaattgcctaatgacacatttctcagaatgtatttgtgttattaaatgatgcatgactctaattcttttcaaaacagagccatatggggcaagggggatggggggacgcaagtcagttgtcaaaagactaattgagttactgacaaactgaacatgctaggtgcctcatgtaattcttcatgtaactaaaaaatgttgagaggtttttttcccccgggtatataggctctctttttatccgaaaatagtttccacaaagaagtcaactctgttctgaaaaaaaatgaattgcattttgaatacacttatctttgggtatatcaactaaaggaagttggatttttttccttaacagaaacttctgcagtcctctcagttcacatcctttctgactttaccctgacaaacttattatataaagctatatttaaatctatattgtcaatataacaaaggattgtttttgaacatcacaaatttgttcttggatagaattttatacattgcttttcatcatatatttgctcagttactctaagaagcaaggaactgatcactagttgggaatctatatgggcctaaacttgagtgtattgatttattattacatctactaccaacattttcttaagcatagccttctaaattttttcaggagattagaataaaggtatacatgctactcggtcttctggtaattctagtgataaacctttggatgagacaggtcctaatcagcactgaattcttcaataggaggctgtgttacaggagctacagatttttccctggattagcttaggtcattgcctttacttt

SEQ ID NO: 8170 - DNA, 667 bp, Homo sapiens
  source 1..667: mol_type = unassigned DNA; mol_type = unassigned DNA
ttgccgaggtctggctggatgagtataaggagctgttctatggccacggagaccacctcatcgaccaagggctagatgttggcaacctcacccagcaaagggagctgcgaaagaaactgaagtgcaaaagtttcaaatggtacttggagaatgtctttcctgacttaagggctcccattgtgagagctagtggtgtgcttcctttttcttcatccaagaaattctttaaaaatgtgaccattagttatcccgcccttttaggccaaattttttcagttcttcttgagagtggattataccatgctttctgtctggaaaatctcctgatagcaaaaacttactataatattcccccttgaaagtattcgggaaatccaggaaagctatgaaagacaagaaactagtcttaaaaaaatggttctgttttttacaaaattcaactgataaataagtttatgtgacctgtttttagataacgcactgtattataaaattgccatttttatgggtccaaatagaatggcagctactttaagtggctcaacctggtaacttatcagacattttggatttatatacactgttcaaataacaacatgtcaaatataactgtaaaataaatttacaatttttaatttcaaccgctgagcagaaaaaaaaaaaagaa

SEQ ID NO: 8171 - DNA, 647 bp, Homo sapiens
  source 1..647: mol_type = unassigned DNA; mol_type = unassigned DNA
aagaagagtgctaggcagagggtaaaggtcacgtaaagccctaagacaggtgagtgttctccatccaagcactggaaagaagacgaatgttgtcagggtgtgaaggagggaagaatggcaccagatgaaggtgaagaggaaggaaggagccagatcacacaggtccttgtaagcaaacttcctttttcttcatccaagaaattctttaaaaatgtgaccattagttatcccgcccttttaggccaaattttttcagttcttcttgagagtggattataccatgctttctgtctggaaaatctcctgatagcaaaaacttactataatattcccccttgaaagtattcgggaaatccaggaaagctatgaaagacaagaaactagtcttaaaaaaatggttctgttttttacaaaattcaactgataaataagtttatgtgacctgtttttagataacgcactgtattataaaattgccatttttatgggtccaaatagaatggcagctactttaagtggctcaacctggtaacttatcagacattttggatttatatacactgttcaaataacaacatgtcaaatataactgtaaaataaatttacaatttttaatttcaaccgctgagcagaaaaaaaaaaaagaa

SEQ ID NO: 8172 - DNA, 5207 bp, Homo sapiens
  source 1..5207: mol_type = unassigned DNA; mol_type = unassigned DNA
aacaggccctgctgtgagggaccacgaggcagtgccaggatgaaagagttggagtaacctaggtgattctgagtgaatcagtcaggaggccttcctggagggggctgaggccccagcttgtggccaccacaacgtatcaagctatctccagggttgggctcaggactcagagctgacgcagctggggtgccccttggttctggaggatgaggctcctccgcagacgccacatgcccctgcgcctggccatggtgggctgcgcctttgtgctcttcctcttcctcctgcatagggatgtgagcagcagagaggaggccacagagaagccgtggctgaagtccctggtgagccggaaggatcacgtcctggacctcatgctggaggccatgaacaaccttagagattcaatgcccaagctccaaatcagggctccagaagcccagcagactctgttctccataaaccagtcctgcctccctgggttctataccccagctgaactgaagcccttctgggaacggccaccacaggaccccaatgcccctggggcagatggaaaagcatttcagaagagcaagtggacccccctggagacccaggaaaaggaagaaggctataagaagcactgtttcaatgcctttgccagcgaccggatctccctgcagaggtccctggggccagacacccgaccacctgagtgtgtggaccagaagttccggcgctgccccccactggccaccaccagcgtgatcattgtgttccacaacgaagcctggtccacactgctgcgaacagtgtacagcgtcctacacaccacccctgccatcttgctcaaggagatcatactggtggatgatgccagcacagaggagcacctaaaggagaagctggagcagtacgtgaagcagctgcaggtggtgagggtggtgcggcaggaggagcggaaggggctgatcaccgcccggctgctgggggccagcgtggcacaggcggaggtgctcacgttcctggatgcccactgtgagtgcttccacggctggctggagcccctcctggctcgaatcgctgaggacaagacagtggtggtgagcccagacatcgtcaccatcgaccttaatacttttgagttcgccaagcccgtccagaggggcagagtccatagccgaggcaactttgactggagcctgaccttcggctgggaaacacttcctccacatgagaagcagaggcgcaaggatgaaacctaccccatcaaatccccgacgtttgctggtggcctcttctccatctccaagtcctactttgagcacatcggtacctatgataatcagatggagatctggggaggggagaacgtggaaatgtccttccgggtgtggcagtgtgggggccagctggagatcatcccctgctctgtcgtaggccatgtgttccggaccaagagcccccacaccttccccaagggcactagtgtcattgctcgcaatcaagtgcgcctggcagaggtctggatggacagctacaagaagattttctataggagaaatctgcaggcagcaaagatggcccaagagaaatccttcggtgacatttcggaacgactgcagctgagggaacaactgcactgtcacaacttttcctggtacctgcacaatgtctacccagagatgtttgttcctgacctgacgcccaccttctatggtgccatcaagaacctcggcaccaaccaatgcctggatgtgggtgagaacaaccgcggggggaagcccctcatcatgtactcctgccacggccttggcggcaaccagtactttgagtacacaactcagagggaccttcgccacaacatcgcaaagcagctgtgtctacatgtcagcaagggtgctctgggccttgggagctgtcacttcactggcaagaatagccaggtccccaaggacgaggaatgggaattggcccaggatcagctcatcaggaactcaggatctggtacctgcctgacatcccaggacaaaaagccagccatggccccctgcaatcccagtgacccccatcagttgtggctctttgtctaggacccagatcatccccagagagagcccccacaagctcctcaggaaacaggattgctgatgtctgggaacctgatcaccagcttctctggaggccgtaaagatggatttctaaacccactgggtggcaaggcaggaccttcctaatccttgcaacaacattgggcccattttctttccttcacaccgatggaagagaccattaggacatatatttagcctagcgttttcctgttctagaaatagaggctcccaaagtagggaaggcagctgggggagggttcagggcagcaatgctgagttcaagaaaagtacttcaggctgggcacagtggctcatgcctgaaatcctagcactttgggaagacaatgtgggagaatggcttgagcccaggagttcaagaccggcctgagcaacatagtgaggatcccatctctacgcccaccctccccccggcaaaaaaaaaaagctgggtatggtggcttatgcctgtagtcgcagctactcagaaggctgaggtgggaggattgcttgttccccggaggttgaagctacagtgagccttgattgtgtcactgcactccagcctgggcaacaggtaagactctgtctcaaaaaaaaacaaaaaagaagaagaaaagtacttctacagccatgtcctattccttgatcatccaaagcacctgcagagtccagtgaaatgatatattctggctgggcacagtggctcacacctgtaatcctagcactttgggaggccaaggcaggtggatcacctgaggtcagaagtttgaaaccagcctggactacatggtgaaactccatctctactaaaagtacaaaaattagctgggcatgatggcacgcacctgcagtcccagctacttgggaggctgaggcaggagaatcactcgaacccaggaggcagaggttgcagtgagccaagacagcaccattgcaccccagcctgagcaacaagagcgaaactccatctcaggaaaaaaaaaaaaaaaaaaagtatattctaacagacagatcagaggtctaagagatcctcccttgctattattacctgaagtctgtagaactgtttacagatatctccttgacaggtgtcctttatcttactttatctgtacagtaatcctgtgagaaagacaggacagaaaccactgtgcctattttacagatacgaaaactgagacacaggtaaaggggcttgtctgtagtcccatagctagcagatggctggagccaagactgaggctcgttcttcaatgctgagccagggctccttccgctgcaccacaagaacgctagaccactcgccaccagccttctcattccctcttcctccattctaatcatttctagctggctggcctccacagagcataggaaaacagccagggccgggcacggtggctcatgcctgtaatctcaacactctgggaggccgagccgggtggataacctgaggtcaggaattcgagaccagcctggccaacatggtaaaaccccatctctactaaaaatataaaaattagccaggcatggtggcgcacacctgtaatcccagctactcaagaggctgaggcaggagaattgcttaaatctgggaggcggaagttgcagtgagccaagatcgcgccactgaactccagcctaggcaacaagagcaaaactccatctccaaaaaaaagaaaggaaaaacagggccaggtagccattgtggagagagcacacttaggaatcctgggatgttagtgttaaaagaaagctcctggagccagtgattctcaggtttgtcccagaacccttttttctaagccccatataaaaggtagattaaaaaaacaaagtagcatgagtgaaattgagagagggacaggtaatgccttccagcccctaacttctaacaatctggaagcacaacgtgaaaatcacgtagcccaaccctatcattttcatattatgaaactgagtccaggtaagtgaatctgtccaaggtcacccagcaaggtatcagtagccctgagggtaaggactctgataaggctcgggagggtcctggaaagcctgaggcggcaggaagagtgtgcagagttgagcgtgtctggaaggctgatccactgctgggcccacatcaaagcccccatggggagcagacccgactgcacatggctcttttgctggaagaagagcatggctgcgcagaggactaaaatttcatctgggaaggcttcttttgactgtcagtagcaggatgtcaccagatgagggtgctatgggaccacagctgtctttgttcccattgcaactcaaccctgcgggaggccgcctacatccctgagagccttctggagcctacagaggagacattggccagccaaaaggaaaggagtggccagggtacgacctggagtagggaagggaaaaagttcccggaaagaagagaattggatgagaggtctcagtggaaataaaggttttctggcattggtcaaggaaactcgcgttgtgttctcttacctgtgttgtcccttagctgaatcagttgatttgggctatgaagaaccacacacatctgaaaagttctgttacagccactgtctcatgtccccaaacattctctggccctaaatctagcttatgtattgtgtcaagcacgtggagacgtgagacgtcaaacgaggtcctgtccccgtggaactcacacgctaaatgtaagcaaatcatagcaagcctggagatgctccaagaggtgctggatgagttagaaggagcaattccttccacttagggaatcagataaggcctcacaaagatggcaatgtttgacctaagacctcggaagatgagtcctcagatgggaagggctcaataagcagagttgttacacaggcagcagcctggcaggagcaaagccacagaggacatgtggccccagtgggtctgagaaacccagaggacattggggtgagggagtgactggtgtagaagctggaagatcagagttacatcatgaatttcaggggccctaggcactttagccttcacggagctcttgctccattcaaaaaaaaattaatgttatgactatgttggtataaagatgaatgtaatccaggctga

SEQ ID NO: 8173 - DNA, 2809 bp, Homo sapiens
  source 1..2809: mol_type = unassigned DNA; mol_type = unassigned DNA
ggtccctcctgccttcgctctctgctggtcgcggtggcctgtagctcctccctcggtaggacccccctccaccttggcgcttacgagatgaatgaggagcccagacctctggaacttggagggttgttcagattcccaggctgacaaaaaggagaaacagcttttacttgcatccagggccaatcatcgcagacccagacgtctgcagagggctgaggccccagcttgtggccaccacaacgtatcaagctatctccagggttgggctcaggactcagagctgacgcagctggggtgccccttggttctggaggatgaggctcctccgcagacgccacatgcccctgcgcctggccatggtgggctgcgcctttgtgctcttcctcttcctcctgcatagggatgtgagcagcagagaggaggccacagagaagccgtggctgaagtccctggtgagccggaaggatcacgtcctggacctcatgctggaggccatgaacaaccttagagattcaatgcccaagctccaaatcagggctccagaagcccagcagactctgttctccataaaccagtcctgcctccctgggttctataccccagctgaactgaagcccttctgggaacggccaccacaggaccccaatgcccctggggcagatggaaaagcatttcagaagagcaagtggacccccctggagacccaggaaaaggaagaaggctataagaagcactgtttcaatgcctttgccagcgaccggatctccctgcagaggtccctggggccagacacccgaccacctgagtgtgtggaccagaagttccggcgctgccccccactggccaccaccagcgtgatcattgtgttccacaacgaagcctggtccacactgctgcgaacagtgtacagcgtcctacacaccacccctgccatcttgctcaaggagatcatactggtggatgatgccagcacagaggagcacctaaaggagaagctggagcagtacgtgaagcagctgcaggtggtgagggtggtgcggcaggaggagcggaaggggctgatcaccgcccggctgctgggggccagcgtggcacaggcggaggtgctcacgttcctggatgcccactgtgagtgcttccacggctggctggagcccctcctggctcgaatcgctgaggacaagacagtggtggtgagcccagacatcgtcaccatcgaccttaatacttttgagttcgccaagcccgtccagaggggcagagtccatagccgaggcaactttgactggagcctgaccttcggctgggaaacacttcctccacatgagaagcagaggcgcaaggatgaaacctaccccatcaaatccccgacgtttgctggtggcctcttctccatctccaagtcctactttgagcacatcggtacctatgataatcagatggagatctggggaggggagaacgtggaaatgtccttccgggtgtggcagtgtgggggccagctggagatcatcccctgctctgtcgtaggccatgtgttccggaccaagagcccccacaccttccccaagggcactagtgtcattgctcgcaatcaagtgcgcctggcagaggtctggatggacagctacaagaagattttctataggagaaatctgcaggcagcaaagatggcccaagagaaatccttcggtgacatttcggaacgactgcagctgagggaacaactgcactgtcacaacttttcctggtacctgcacaatgtctacccagagatgtttgttcctgacctgacgcccaccttctatggtgccatcaagaacctcggcaccaaccaatgcctggatgtgggtgagaacaaccgcggggggaagcccctcatcatgtactcctgccacggccttggcggcaaccagtactttgagtacacaactcagagggaccttcgccacaacatcgcaaagcagctgtgtctacatgtcagcaagggtgctctgggccttgggagctgtcacttcactggcaagaatagccaggtccccaaggacgaggaatgggaattggcccaggatcagctcatcaggaactcaggatctggtacctgcctgacatcccaggacaaaaagccagccatggccccctgcaatcccagtgacccccatcagttgtggctctttgtctaggacccagatcatccccagagagagcccccacaagctcctcaggaaacaggattgctgatgtctgggaacctgatcaccagcttctctggaggccgtaaagatggatttctaaacccactgggtggcaaggcaggaccttcctaatccttgcaacaacattgggcccattttctttccttcacaccgatggaagagaccattaggacatatatttagcctagcgttttcctgttctagaaatagaggctcccaaagtagggaaggcagctgggggagggttcagggcagcaatgctgagttcaagaaaagtacttcaggctgggcacagtggctcatgcctgaaatcctagcactttgggaagacaatgtgggagaatggcttgagcccaggagttcaagaccggcctgagcaacatagtgaggatcccatctctacgcccaccctccccccggcaaaaaaaaaaagctgggtatggtggcttatgcctgtagtcgcagctactcagaaggctgaggtgggaggattgcttgttccccggaggttgaagctacagtgagccttgattgtgtcactgcactccagcctgggcaacaggtaagactctgtctcaaaaaaaaacaaaaaa

SEQ ID NO: 8174 - DNA, 2206 bp, Homo sapiens
  source 1..2206: mol_type = unassigned DNA; mol_type = unassigned DNA
aagatggtggccccaactctggtggaccccagaactctgagagattccaggaattaggcaaatcaggattaggtcaggaagcaaggattgcctctccatgaaacctacacaaatctccatgccatggaaaagtaattagtaagtagatgagctcatttatgaagtcacctctcacggtgcctgatgcatattaagcacgtaattgatgcctgctgttactataacgattatgtatttctgttgctgccacactaaaatgaataacaacatactttcccacctaaaacccaaaagaagaaaccagtgggagggatgtcttcagccagcccaccagcatagaaaagggtcacctgccagtcaccccaactcccagcggcccaatcctaggctcctccatgagcctctgacctctgttcaccttcctaggcagccagtgtgctaagggcccaagtgactaccactagccacctagcagccaactatccttgctattaattaacagactgatgctctggtttttatcacctgagggagctgataaactcacatttccaggtcaaaaagccaagtgatcagagctcagagtaggtatacaggcacaggtaacaaaaattaaccagcaggcttttccctaaagtgggccctggtaaacacaggaccctgcagtctccctgtgcttaagtcagagtgaaccaacatcagaaagcctgggatcgtgtagtcatggcctaggaagaagcctggtcggtatcctttttcccagggagagagagcagcatttgcccaagtccttggacctggggtctggtgctctgggaatagaatagagctgcttatggggagactgtctcacctagcccactgaaggcctcatcctgtctcctcttacatcaggtgtggcagtgtgggggccagctggagatcatcccctgctctgtcgtaggccatgtgttccggaccaagagcccccacaccttccccaagggcactagtgtcattgctcgcaatcaagtgcgcctggcagaggtctggatggacagctacaagaagattttctataggagaaatctgcaggcagcaaagatggcccaagagaaatccttcggtgacatttcggaacgactgcagctgagggaacaactgcactgtcacaacttttcctggtacctgcacaatgtctacccagagatgtttgttcctgacctgacgcccaccttctatggtgccatcaagaacctcggcaccaaccaatgcctggatgtgggtgagaacaaccgcggggggaagcccctcatcatgtactcctgccacggccttggcggcaaccagtactttgagtacacaactcagagggaccttcgccacaacatcgcaaagcagctgtgtctacatgtcagcaagggtgctctgggccttgggagctgtcacttcactggcaagaatagccaggtccccaaggacgaggaatgggaattggcccaggatcagctcatcaggaactcaggatctggtacctgcctgacatcccaggacaaaaagccagccatggccccctgcaatcccagtgacccccatcagttgtggctctttgtctaggacccagatcatccccagagagagcccccacaagctcctcaggaaacaggattgctgatgtctgggaacctgatcaccagcttctctggaggccgtaaagatggatttctaaacccactgggtggcaaggcaggaccttcctaatccttgcaacaacattgggcccattttctttccttcacaccgatggaagagaccattaggacatatatttagcctagcgttttcctgttctagaaatagaggctcccaaagtagggaaggcagctgggggagggttcagggcagcaatgctgagttcaagaaaagtacttcaggctgggcacagtggctcatgcctgaaatcctagcactttgggaagacaatgtgggagaatggcttgagcccaggagttcaagaccggcctgagcaacatagtgaggatcccatctctacgcccaccctccccccggcaaaaaaaaaaagctgggtatggtggcttatgcctgtagtcgcagctactcagaaggctgaggtgggaggattgcttgttccccggaggttgaagctacagtgagccttgattgtgtcactgcactccagcctgggcaacaggtaagactctgtctc

SEQ ID NO: 8175 - DNA, 1859 bp, Homo sapiens
  source 1..1859: mol_type = unassigned DNA; mol_type = unassigned DNA
atgaggctcctccgcagacgccacatgcccctgcgcctggccatggtgggctgcgcctttgtgctcttcctcttcctcctgcatagggatgtgagcagcagagaggaggccacagagaagccgtggctgaagtccctggtgagccggaaggatcacgtcctggacctcatgctggaggccatgaacaaccttagagattcaatgcccaagctccaaatcagggctccagaagcccagcagactctgttctccataaaccagtcctgcctccctgggttctataccccagctgaactgaagcccttctgggaacggccaccacaggaccccaatgcccctggggcagatggaaaagcatttcagaagagcaagtggacccccctggagacccaggaaaaggaagaaggctataagaagcactgtttcaatgcctttgccagcgaccggatctccctgcagaggtccctggggccagacacccgaccacctgagtgtgtggaccagaagttccggcgctgccccccactggccaccaccagcgtgatcattgtgttccacaacgaagcctggtccacactgctgcgaacagtgtacagcgtcctacacaccacccctgccatcttgctcaaggagatcatactggtggatgatgccagcacagaggagcacctaaaggagaagctggagcagtacgtgaagcagctgcaggtggtgagggtggtgcggcaggaggagcggaaggggctgatcaccgcccggctgctgggggccagcgtggcacaggcggaggtgctcacgttcctggatgcccactgtgagtgcttccacggctggctggagcccctcctggctcgaatcgctgaggacaagacagtggtggtgagcccagacatcgtcaccatcgaccttaatacttttgagttcgccaagcccgtccagaggggcagagtccatagccgaggcaactttgactggagcctgaccttcggctgggaaacacttcctccacatgagaagcagaggcgcaaggatgaaacctaccccatcaagtgtggcagtgtgggggccagctggagatcatcccctgctctgtcgtaggccatgtgttccggaccaagagcccccacaccttccccaagggcactagtgtcattgctcgcaatcaagtgcgcctggcagaggtctggatggacagctacaagaagattttctataggagaaatctgcaggcagcaaagatggcccaagagaaatccttcggtgacatttcggaacgactgcagctgagggaacaactgcactgtcacaacttttcctggtacctgcacaatgtctacccagagatgtttgttcctgacctgacgcccaccttctatggtgccatcaagaacctcggcaccaaccaatgcctggatgtgggtgagaacaaccgcggggggaagcccctcatcatgtactcctgccacggccttggcggcaaccagtactttgagtacacaactcagagggaccttcgccacaacatcgcaaagcagctgtgtctacatgtcagcaagggtgctctgggccttgggagctgtcacttcactggcaagaatagccaggtccccaaggacgaggaatgggaattggcccaggatcagctcatcaggaactcaggatctggtacctgcctgacatcccaggacaaaaagccagccatggccccctgcaatcccagtgacccccatcagttgtggctctttgtctaggacccagatcatccccagagagagcccccacaagctcctcaggaaacaggattgctgatgtctgggaacctgatcaccagcttctctggaggccgtaaagatggattt

SEQ ID NO: 8176 - DNA, 567 bp, Homo sapiens
  source 1..567: mol_type = unassigned DNA; mol_type = unassigned DNA
aaacccgggagccaccccgcggcgcggctgcggctttgcctcggcgcgacaggctgaggccccagcttgtggccaccacaacgtatcaagctatctccagggttgggctcaggactcagagctgacgcagctggggtgccccttggttctggaggatgaggctcctccgcagacgccacatgcccctgcgcctggccatggtgggctgcgcctttgtgctcttcctcttcctcctgcatagggatgtgagcagcagagaggaggccacagagaagccgtggctgaagtccctggtgagccggaaggatcacgtcctggacctcatgctggaggccatgaacaaccttagagattcaatgcccaagctccaaatcagggctccagaagcccagcagactctgttctccataaaccagtcctgcctccctgggttctataccccagctgaactgaagcccttctgggaacggccaccacaggaccccaatgcccctggggcagatggaaaagcatttcagaagagcaagtggacccccctggagacccaggaaaaggaagaaggctata

SEQ ID NO: 8177 - DNA, 554 bp, Homo sapiens
  source 1..554: mol_type = unassigned DNA; mol_type = unassigned DNA
agtaaaatgaaggggctgggccaggctggtccctcctgccttcgctctctgctggtcgcggtggcctgtagctcctccctcggctgaggccccagcttgtggccaccacaacgtatcaagctatctccagggttgggctcaggactcagagctgacgcagctggggtgccccttggttctggaggatgaggctcctccgcagacgccacatgcccctgcgcctggccatggtgggctgcgcctttgtgctcttcctcttcctcctgcatagggatgtgagcagcagagaggaggccacagagaagccgtggctgaagtccctggtgagccggaaggatcacgtcctggacctcatgctggaggccatgaacaaccttagagattcaatgcccaagctccaaatcagggctccagaagcccagcagactctgttctccataaaccagtcctgcctccctgggttctataccccagctgaactgaagcccttctgggaacggccaccacaggaccccaatgcccctggggcagatggaaaagcatttcagaagagc

SEQ ID NO: 8178 - DNA, 476 bp, Homo sapiens
  source 1..476: mol_type = unassigned DNA; mol_type = unassigned DNA
agaaggagcccgcgaccctctccccgggagggcccccctgagctccccgactgctcggacttcccttcggcggatctcgcttctgccgagtcctcgctctcacctcctcctccgccagccttcgcctcttcctcttcctcctcactacccccgacagtaaaatgaaggggctgggccaggctggtccctcctgccttcgctctctgctggtcgcggtggcctgtagctcctccctcggtaggacccccctccaccttggcgcttacgagatgaatgaggagcccagacctctggaacttggagggggaaaataaaagaagcaaaaacaggccctgctgtgagggaccacgaggcagtgccaggatgaaagagttggagtaacctaggtgattctgagtgaatcagtcaggaggccttcctggaggggaccattgcaggtactgtgccttctgcctgaaatgtgctcacctcgcctc

SEQ ID NO: 8179 - DNA, 494 bp, Homo sapiens
  source 1..494: mol_type = unassigned DNA; mol_type = unassigned DNA
ctcctgccttcgctctctgctggtcgcggtggcctgtagctcctccctcggtaggacccccctccaccttggcgcttacgagatgaatgaggagcccagacctctggaacttggaggggtgagagggggacaagccagagccagggctccacaccctcttcccctcacccacccatgccctgcattccttctgtgccccgtctccccagatcgggccaccccatgtgctctggtacggcaactcttgcagagaggtttcctcctgccctgccacgttgcgcctgagcagaaggggacagcaaggagaagcctcgctggtggagggaaaataaaagaagcaaaaacaggccctgctgtgagggaccacgaggcagtgccaggatgaaagagttggagtaacctaggtgattctgagtgaatcagtcaggaggccttcctggaggggaccattgcaggtactgtgccttctgcctgaaatgtgctcacctcgcctc

SEQ ID NO: 8180 - DNA, 372 bp, Homo sapiens
  source 1..372: mol_type = unassigned DNA; mol_type = unassigned DNA
accctcccggccgtccggtggggaaacccgggagccaccccgcggcgcggctgcggctttgcctcggcgcgacagggaaaataaaagaagcaaaaacaggccctgctgtgagggaccacgaggcagtgccaggatgaaagagttggagtaacctaggtgattctgagtgaatcagtcaggaggccttcctggaggggaccattgcaggtactgtgccttctgcctgaaatgtgctcacctcgcctcgctgactcctactcgccagttagtgttcggcccatttctgcccccgtgagatttcttcacagatgttgccctcccccatttgctgagtttcctgcatgccggctccttcagcactcaagggtacct

SEQ ID NO: 8181 - DNA, 555 bp, Homo sapiens
  source 1..555: mol_type = unassigned DNA; mol_type = unassigned DNA
ctctgctggtcgcggtggcctgtagctcctccctcggtaggacccccctccaccttggcgcttacgagatgaatgaggagcccagacctctggaacttggagggttgttcagattcccaggctgacaaaaaggagaaacagcttttacttgcatccagggccaatcatcgcagacccagacgtctgcagaggggaaaataaaagaagcaaaaacaggccctgctgtgagggaccacgaggcagtgccaggatgaaagagttggagtaacctaggtgattctgagtgaatcagtcaggaggccttcctggaggggaccattgcaggtactgtgccttctgcctgaaatgtgctcacctcgcctcgctgactcctactcgccagttagtgttcggcccatttctgcccccgtgagatttcttcacagatgttgccctcccccatttgctgagtttcctgcatgccggctccttcagcactcaagggtacctctttgattctgcttctcacagggctgaggccccagcttgtggccaccacaacgtatcaagctatct

SEQ ID NO: 8182 - DNA, 549 bp, Homo sapiens
  source 1..549: mol_type = unassigned DNA; mol_type = unassigned DNA
attccggttccatgcacccgccgcccgcggctctgctaatgcctgtcctctttggggtgactaggaccctccaatctttttccgcgctgaaagcctggccgcaaagaccgcacccccggggcgggctgagacgcagagaagccggggcgcccctctgccggtccgccgggagttcccgggcccgcagcaggctgaggacacggcgggacccgctgcacctggccagggaggggcggggcgggcgcgttagtgcagctgggggaggtcccgccccggtcccaccctcccggccgtccggtggggaaacccgggagccaccccgcggcgcggctgcggctttgcctcggcgcgacagggaaaataaaagaagcaaaaacaggccctgctgtgagggaccacgaggcagtgccaggatgaaagagttggagtaacctaggtgattctgagtgaatcagtcaggaggccttcctggagggggctgaggccccagcttgtggccaccacaacgtatcaagctatctccagggttgggctcaggactcagagctg

SEQ ID NO: 8183 - DNA, 557 bp, Homo sapiens
  source 1..557: mol_type = unassigned DNA; mol_type = unassigned DNA
aacccgggagccaccccgcggcgcggctgcggctttgcctcggcgcgacagttgttcagattcccaggctgacaaaaaggagaaacagcttttacttgcatccagggccaatcatcgcagacccagacgtctgcagaggggaaaataaaagaagcaaaaacaggccctgctgtgagggaccacgaggcagtgccaggatgaaagagttggagtaacctaggtgattctgagtgaatcagtcaggaggccttcctggaggggaccattgcaggtactgtgccttctgcctgaaatgtgctcacctcgcctcgctgactcctactcgccagttagtgttcggcccatttctgcccccgtgagatttcttcacagatgttgccctcccccatttgctgagtttcctgcatgccggctccttcagcactcaagggtacctctttgattctgcttctcacagggctgaggccccagcttgtggccaccacaacgtatcaagctatctccagggttgggctcaggactcagagctgacgcagctggggtgccccttggttctg

SEQ ID NO: 8184 - DNA, 548 bp, Homo sapiens
  source 1..548: mol_type = unassigned DNA; mol_type = unassigned DNA
aaacccgggagccaccccgcggcgcggctgcggctttgcctcggcgcgacagatcgggccaccccatgtgctctggtacggcaactcttgcagagaggtttcctcctgccctgccacgttgcgcctgagcagaaggggacagcaaggagaagcctcgctggtggagttgttcagattcccaggctgacaaaaaggagaaacagcttttacttgcatccagggccaatcatcgcagacccagacgtctgcagaggggaaaataaaagaagcaaaaacaggccctgctgtgagggaccacgaggcagtgccaggatgaaagagttggagtaacctaggtgattctgagtgaatcagtcaggaggccttcctggagggggctgaggccccagcttgtggccaccacaacgtatcaagctatctccagggttgggctcaggactcagagctgacgcagctggggtgccccttggttctggaggatgaggctcctccgcagacgccacatgcccctgcgcctggccatggtgggctgcgcctttgtgctcttc

SEQ ID NO: 8185 - DNA, 574 bp, Homo sapiens
  source 1..574: mol_type = unassigned DNA; mol_type = unassigned DNA
agtaaaatgaaggggctgggccaggctggtccctcctgccttcgctctctgctggtcgcggtggcctgtagctcctccctcgggaaaataaaagaagcaaaaacaggccctgctgtgagggaccacgaggcagtgccaggatgaaagagttggagtaacctaggtgattctgagtgaatcagtcaggaggccttcctggaggggaccattgcaggtactgtgccttctgcctgaaatgtgctcacctcgcctcgctgactcctactcgccagttagtgttcggcccatttctgcccccgtgagatttcttcacagatgttgccctcccccatttgctgagtttcctgcatgccggctccttcagcactcaagggtacctctttgattctgcttctcacagggctgaggccccagcttgtggccaccacaacgtatcaagctatctccagggttgggctcaggactcagagctgacgcagctggggtgccccttggttctggaggatgaggctcctccgcagacgccacatgcccctgcgcctggccatggtgggctgcgcctttgtgctcttcc

SEQ ID NO: 8186 - DNA, 626 bp, Homo sapiens
  source 1..626: mol_type = unassigned DNA; mol_type = unassigned DNA
gcggctgcggctttgcctcggcgcgacagttgttcagattcccaggctgacaaaaaggagaaacagcttttacttgcatccagggccaatcatcgcagacccagacgtctgcagaggggaaaataaaagaagcaaaaacaggccctgctgtgagggaccacgaggcagtgccaggatgaaagagttggagtaacctaggtgattctgaaccattgcaggtactgtgccttctgcctgaaatgtgctcacctcgcctcgctgactcctactcgccagttagtgttcggcccatttctgcccccgtgagatttcttcacagatgttgccctcccccatttgctgagtttcctgcatgccggctccttcagcactcaagggtacctctttgattctgcttctcacagggctgaggccccagcttgtggccaccacaacgtatcaagctatctccagggttgggctcaggactcagagctgacgcagctggggtgccccttggttctggaggatgaggctcctccgcagacgccacatgcccctgcgcctggccatggtgggctgcgcctttgtgctcttcctcttcctcctgcatagggatgtgagcagcagagaggaggccacagaga

SEQ ID NO: 8187 - DNA, 697 bp, Homo sapiens
  source 1..697: mol_type = unassigned DNA; mol_type = unassigned DNA
ggaacttggaggggtgagagggggacaagccagagccagggctccacaccctcttcccctcacccacccatgccctgcattccttctgtgccccgtctccccagatcgggccaccccatgtgctctggtacggcaactcttgcagagaggtttcctcctgccctgccacgttgcgcctgagcagaaggggacagcaaggagaagcctcgctggtggagttgttcagattcccaggctgacaaaaaggagaaacagcttttacttgcatccagggccaatcatcgcagacccagacgtctgcagaggggaaaataaaagaagcaaaaacaggccctgctgtgagggaccacgaggcagtgccaggatgaaagagttggagtaacctaggtgattctgagtgaatcagtcaggaggccttcctggagggggctgaggccccagcttgtggccaccacaacgtatcaagctatctccagggttgggctcaggactcagagctgacgcagctggggtgccccttggttctggaggatgaggctcctccgcagacgccacatgcccctgcgcctggccatggtgggctgcgcctttgtgctcttcctcttcctcctgcatagggatgtgagcagcagagaggaggccacagagaagccgtggctgaagtccctggtgagccggaaggatcacgtcctggacc

SEQ ID NO: 8188 - DNA, 581 bp, Homo sapiens
  source 1..581: mol_type = unassigned DNA; mol_type = unassigned DNA
taaaatgaaggggctgggccaggctggtccctcctgccttcgctctctgctggtcgcggtggcctgtagctcctccctcgttgttcagattcccaggctgacaaaaaggagaaacagcttttacttgcatccagggccaatcatcgcagacccagacgtctgcagaggggaaaataaaagaagcaaaaacaggccctgctgtgagggaccacgaggcagtgccaggatgaaagagttggagtaacctaggtgattctgagtgaatcagtcaggaggccttcctggagggggctgaggccccagcttgtggccaccacaacgtatcaagctatctccagggttgggctcaggactcagagctgacgcagctggggtgccccttggttctggaggatgaggctcctccgcagacgccacatgcccctgcgcctggccatggtgggctgcgcctttgtgctcttcctcttcctcctgcatagggatgtgagcagcagagaggaggccacagagaagccgtggctgaagtccctggtgagccggaaggatcacgtcctggacctcatgctggaggccatgaacaa

SEQ ID NO: 8189 - DNA, 582 bp, Homo sapiens
  source 1..582: mol_type = unassigned DNA; mol_type = unassigned DNA
gtccggtggggaaacccgggagccaccccgcggcgcggctgcggctttgcctcggcgcgacagttgttcagattcccaggctgacaaaaaggagaaacagcttttacttgcatccagggccaatcatcgcagacccagacgtctgcagaggggaaaataaaagaagcaaaaacaggccctgctgtgagggaccacgaggcagtgccaggatgaaagagttggagtaacctaggtgattctgagtgaatcagtcaggaggccttcctggagggggctgaggccccagcttgtggccaccacaacgtatcaagctatctccagggttgggctcaggactcagagctgacgcagctggggtgccccttggttctggaggatgaggctcctccgcagacgccacatgcccctgcgcctggccatggtgggctgcgcctttgtgctcttcctcttcctcctgcatagggatgtgagcagcagagaggaggccacagagaagccgtggctgaagtccctggtgagccggaaggatcacgtcctggacctcatgctggaggccatgaacaaccttagagattcaatgcc

SEQ ID NO: 8190 - DNA, 538 bp, Homo sapiens
  source 1..538: mol_type = unassigned DNA; mol_type = unassigned DNA
gttgctaaggccccaaaagattgcagcacacgaggcagcgccggagaggaccactgagcagcacgggccctggcgggggaaaataaaagaagcaaaaacaggccctgctgtgagggaccacgaggcagtgccaggatgaaagagttggagtaacctaggtgattctgagtgaatcagtcaggaggccttcctggagggggctgaggccccagcttgtggccaccacaacgtatcaagctatctccagggttgggctcaggactcagagctgacgcagctggggtgccccttggttctggaggatgaggctcctccgcagacgccacatgcccctgcgcctggccatggtgggctgcgcctttgtgctcttcctcttcctcctgcatagggatgtgagcagcagagaggaggccacagagaagccgtggctgaagtccctggtgagccggaaggatcacgtcctggacctcatgctggaggccatgaacaaccttagagattcaatgcccaagctccaaatcagggctccagaagccca

SEQ ID NO: 8191 - DNA, 2905 bp, Homo sapiens
  source 1..2905: mol_type = unassigned DNA; mol_type = unassigned DNA
tttctcaagtgagacactagagagagtagaaagggaggaagagatagggcgagaagaaaaggagggagggacagagatgaggacgagaaagaagaaaaaagggaaagagaaaataccgtctgaagtccacaggcttatctatcccaagcatgtctaccccacgcatgtgggcatcatatccaggttgtaacaaagaggtgaccatggcgtttatttttggctccagacaggcggattcagcctgcattgcatgcatgcatgtctgtcacctcatctaagtccccattccttccggagttgtgagctccagatccaagagtgcccagtgcacggtgctgggcacgctgtcccttggcgaggctgccacaggttcctgagtgtgcggtcaggggcgttggtgcattgatacgttaggcggagggaggagtaccatctgccagagtcttatctcgagtcccacgttttctggccatcgcggaggagtgtgcgaggacaggtagccctcgcagtgacaaggcgcgcggagtgcggtcgtgcaaggcgggggaggagcggggtggccctgccgaatcttaaccggggccccgggtgtttgcagacccaaataaagccgccttgggtctccacggtgtcctccagaagctgctgcctgagaactctgagcctcagctctgtcttgcttcgggatcctcttcctcctccttccccaccccctacctggcctgaacggcggaacgcgcggctcgggggatcccctctccctgggaccggccctgtcccgggtcgcctccacctcccgcagccgccgcgccccggctcgccgcgctcccgccggcaccatggaggaattcctgggacaaccgcctgcagccggcgacttttccccaggaatctctggcctggcgccctttgggtgagatgacggggtgctggcatccctgtcggtcccagattacccggaaaagccctggcaggtaaagagaggacccgcgcaggctgggagctcccactcctcctccagcgtcacgctcgccctccgccgctgcctcgcgtccgggtctgtttatatagcgtctggaggccgggaggcattgcccacccccgccaggcggcccgccctcccctcctgggctccgggctgccgcacgtggcagacaccagcgacgtctccgcggaaggcaggcgccggggagtggggcgcgggcgaccgtgtgcagccgcggcgcatctccgccttccgctcctcctcgcagcgccctcgtccgcttccaagcccagcacagacttcggtttctccgcctccatcccctttacgagaagaggagatcaaaaaatattgccctttaggtgctcgtgatggtcctgtgggttcgttcagttgccagaaaagaatggtaacatgaacagcggagcgtgagagcgtcaccgggggaagggacgagattgatgggcagagcgctcacttctcagaggatcgcattccgaggaccgcgcgaggaagggacgtcgcggcgccaccacttcctggctggactccgctgacatctgtagcctcctttccaccaggttcccggggctcccagccgctgcctgcagaggagcgtgtagacagcgcgcgagggtccggcacttcgtggacctccatccgaaccggagttctgcccggatcccgagtccctggatcccggtggagcccgccggcaagctggctccggagggagttgaacttgagttcagatggccaactccctctgaatcctgcagattggtgctgagcacgcaacaaaagtttgtagcttctcagtttctggtgcttcgcaggggagaggaaaggaatttgacattaaacacaagaagcagtcagggagccatctcctttaacttttcttctctgttaccatttgcaatgaagaggaaacagaagagatttctgcagatgactttgttgttcacggtggctttaattttcctgcctaacgttggtctctggtctctgtacaaggataagcacctggtgaagtcagcggagcccggggagcagcaggtaagtgccacccagagaaagatcacacaaggattggtaaggcagtgatcctcgcgcggggactcgagaaagccggtgtgggatcgccttgggttttcccccaagtcttgacagagctgattattacaagactctagagactttggggtttaagcaagtagatgttttaagattgcagccagtaacatcgtgacatgtacaactagtaaagaaggataagacaggtcaagaagaagagaagataatctttcaccattggtcttaggttgattttgacttgaggtggatgaaaggtaactgttcagctatggaggtgggagtgggtttggtgcaagtttaatgacaaggataggtttttgctttccatttggcatgcatgtctatgttcaggtgaattgggccaactaaatcattaagattgtgaagtggttctttaaaaatcaagctatggttttcagtattttggttgtaaattttgcttagcaacagctttttaccctgtcgaaacttaaagtctctctttcgtctcccctgttgctaaggtgctgccatggggcacacaggcagagttattaaggacgttcattccgtttcacagtcgcttgataacagtatgttgctaacagcttgctgtcatattggaaacacccatactaaagatatgtagtataatatgttttctttctacttaatatgtaactcattagtatgtatatacctcatgacttaacatggaccaaaataactgtgttccctggtgaacaataatgcaaaatagacttcccaaaatgttgatgaaaatcaatgttgtcgaattccttgtttgttaataaataaaatagcttccgtaattaaacgttt

SEQ ID NO: 8192 - DNA, 3922 bp, Homo sapiens
  source 1..3922: mol_type = unassigned DNA; mol_type = unassigned DNA
gcagcgccctcgtccgcttccaagcccagcacagacttcggtttctccgcctccatcccctttacgagaagaggagatcaaaaaatattgccctttaggtgctcgtgatggtcctgtgggttcgttcagttgccagaaaagaatggtaacatgaacagcggagcgtgagagcgtcaccgggggaagggacgagattgatgggcagagcgctcacttctcagaggatcgcattccgaggaccgcgcgaggaagggacgtcgcggcgccaccacttcctggctggactccgctgacatctgtagcctcctttccaccaggttcccggggctcccagccgctgcctgcagaggagcgtgtagacagcgcgcgagggtccggcacttcgtggacctccatccgaaccggagttctgcccggatcccgagtccctggatcccggtggagcccgccggcaagctggctccggagggagttgaacttgagttcagatggccaactccctctgaatcctgcagattggtgctgagcacgcaacaaaagtttgtagcttctcagtttctggtgcttcgcaggggagaggaaaggaatttgacattaaacacaagaagcagtcagggagccatctcctttaacttttcttctctgttaccatttgcaatgaagaggaaacagaagagatttctgcagatgactttgttgttcacggtggctttaattttcctgcctaacgttggtctctggtctctgtacaaggataagcacctggtgaagtcagcggagcccggggagcagcagacatttccactgggcctgggagatgggcaattctattcatggacagatggtttgagaagaaaggactggcatgactatgaaagcattcagaaagaggctatgcgctcagggaaaggtgaacatgggaaaccttacccccttactgaagaggaccatgatgactcagcttacagggaaaatggttttaatattttcgtcagcaacaatattgctctagagaggtctctgccagatattcgtcatgctaactgtaagcataagatgtatctggaaaggctgccaaacaccagcatcattatcccatttcataatgaaggttggacttcactcctgcggaccatacacagtataattaaccgaaccccagggagtctgatagcagaaatcattctagtagatgacttcagtgagagagaacacctgaaggataaattggaagaatacatggcccgattttccaaagtgaggattgttcgcaccaagaaaagagaaggactcatccggacccgtctcctgggggcatctatggccagaggagaagtcctgacattcctggactcccactgcgaggtcaatgtgaactggctgcccccactcctcaaccaaattgcactaaaccacaaaaccatcgtgtgtcccatgatcgatgtcattgaccacaatcacttcgggtatgaggcacaagctggggatgccatgcgaggagccttcgactgggaaatgtactacaaaagaatccccatccctccagagctccagagggcagatcccagcgacccttttgagtctcctgttatggctggaggtctctttgctgtggatcggaaatggttttgggaattgggtggctatgatccaggtttagaaatctggggaggagaacagtatgaaatctcttttaaggtttggatgtgtggaggagaaatgtttgatgttccatgttctagagttggtcatatctacaggaagtacgttccatacaaagttccatctgggacaagcctggcaagaaacctgaagcgggtagctgagacctggatggatgaatttgccgagtacatttaccagcggcggccggagtacaggcatctctccacgggggacatctctgcccagaaggagctgcgcaagcagctcaagtgcaaggacttcaaatggttcatggctgctgtggcctgggacgtgcctaaatactaccctccagtggagcccccgcctgctgcctggggggagatccgaaatgtggcagcaaatctctgtgtggacagcaagcatggagccaccggaacagagctgaggctggacatctgtgtcaaggatggttctgaaagaacatggtctcatgaacagctttttacctttggatggagagaagatattcgacccggtgagccactgcatacccggaaattctgctttgatgcgatctcacacaacagccccgttacactctatgactgtcatggcatgaaggggaaccagctctggggataccggaaggacagaacattattccatcctgtgagcaacagctgcatggattgcaaccccgcagagaagaagattttcatggccagatgtgaccctctctctgagactcagcagtggatttttgaacacattaatatgactgttttagaaaaatttaaccaccatgccaactcctagaaagaagaaaggaagaaagagtgattacctacaggttataaattaaattttagccagcatctgggtcgaaggagtcaggaataacatttcctcgatccaggaaggctggtttaaaaatttgcaaatgccatgtcaaagtaggttgttttgaagaacttcctgcatctgaagaacttggctgagaatctcaccagctgcttctgagaactcgagactagcagttcccttgctggccaagggcaaagataatttagggacttttcaaaacaactgctgagctaataaatcctagcatttctcaggtcaaatcctgcagtagtgagtagctatgaatggatcctattaactgggtgggaggggggtgaaaatggagtgcatgactgctctgacaacctgaggatatcacaggtttagaactagccaagcttaaggggtgagctgtactctttggtgccattctctgactaagaatgggttcagcaggtttaacccttaaaagtgctgcagatgatttcagagtgctcacactattctgttttttttatttttatttttaaatgagggtgcaatatctaatgtaagacttaaattacataatgaaatggacatccagtgttcccattctttcgtttatatttgccatttttttttcagagcaaagtttcttttttatgaaagttcatgctccatgaatccactgaatttctaattcagtgcccttctatgaatccagttaaaaacaaaagcaaaagcaaaaatctatgctatcaagttactccaaagaaagatttcacagaagcagcaaaaccatataagatttaggagagggacttccctgggaaatctatttttacttttctattatttttaaaatcttaaaagtctgatatttgtccagtcataatttttattaagcaaggaaatggagtgagtttgatgtaatttgtttaggagattcttaaacccaaataaatctacactccaagtgatatgtgaaaatggcttagttcacttcaattctgtttagtcagtggtgggagcttagaagtggttttatttgttcgtttgtttgggttttgcttttgttttttatttttttcttgttttttttttgtagtgttgaattaatgatgttcttttatttggaagctcataaaaggaattaccattaataaagtgtttctgacaccattttctgttaatgggacaatatttcggggatgaagaaaggaatgctccgaaaactaaatggaacacttaatccttaaagcaattttttactgttcaataatatcacattgggggaagaaaacacaggtatcaaggtggttcttgggaaaaaagaatcatgtttattatatatctctcaagtttttttggtataaaaatgttttaactttgctttctttttggtttttgtttgaagttggttttcctgttaataaaaatttatataaca

SEQ ID NO: 8193 - DNA, 929 bp, Homo sapiens
  source 1..929: mol_type = unassigned DNA; mol_type = unassigned DNA
caagcccagcacagacttcggtttctccgcctccatcccctttacgagaagaggagatcaaaaaatattgccctttaggtgctcgtgatggtcctgtgggttcgttcagttgccagaaaagaatggtaacatgaacagcggagcgtgagagcgtcaccgggggaagggacgagattgatgggcagagcgctcacttctcagaggatcgcattccgaggaccgcgcgaggaagggacgtcgcggcgccaccacttcctggctggactccgctgacatctgtagcctcctttccaccaggttcccggggctcccagccgctgcctgcagaggagcgtgtagacagcgcgcgagggtccggcacttcgtggacctccatccgaaccggagttctgcccggatcccgagtccctggatcccggtggagcccgccggcaagctggctccggagggagttgaacttgagttcagatggccaactccctctgaatcctgcagattggtgctgagcacgcaacaaaagtttgtagcttctcagtttctggtgcttcgcaggggagaggaaaggaatttgacattaaacacaagaagcagtcagggagccatctcctttaacttttcttctctgttaccatttgcaatgaagaggaaacagaagagatttctgcagatgactttgttgttcacggtggctttaattttcctgcctaacgttggtctctggtctctgtacaaggataagcacctggtgaagtcagcggagcccggggagcagcagtgaaaaaaagaagatggacactttggatgtgaaactttttttgttcttatttacatcattcaacccttgatgtaaaacaggattttaataactttagtagtcaatatgctattatgtaaaatctccactccatgctggtaaaacaggaaaggca

SEQ ID NO: 8194 - DNA, 1135 bp, Homo sapiens
  source 1..1135: mol_type = unassigned DNA; mol_type = unassigned DNA
caagcccagcacagacttcggtttctccgcctccatcccctttacgagaagaggagatcaaaaaatattgccctttaggtgctcgtgatggtcctgtgggttcgttcagttgccagaaaagaatggtaacatgaacagcggagcgtgagagcgtcaccgggggaagggacgagattgatgggcagagcgctcacttctcagaggatcgcattccgaggaccgcgcgaggaagggacgtcgcggcgccaccacttcctggctggactccgctgacatctgtagcctcctttccaccaggttcccggggctcccagccgctgcctgcagaggagcgtgtagacagcgcgcgagggtccggcacttcgtggacctccatccgaaccggagttctgcccggatcccgagtccctggatcccggtggagcccgccggcaagctggctccggagggagttgaacttgagttcagatggccaactccctctgaatcctgcagattggtgctgagcacgcaacaaaagtttgtagcttctcagtttctggtgcttcgcaggggagaggaaaggaatttgacattaaacacaagaagcagtcagggagccatctcctttaacttttcttctctgttaccatttgcaatgaagaggaaacagaagagatttctgcagatgactttgttgttcacggtggctttaattttcctgcctaacgttggtctctggtctctgtacaaggataagcacctggtgaagtcagcggagcccggggagcagcaggaattcaactttggtttgaagtatattctgttttgtcattccagtgaaaaaaagaagatggacactttggatgtgaaactttttttgttcttatttacatcattcaacccttgatgtaaaacaggattttaataactttagtagtcaatatgctattatgtaaaatctccactccatgctggtaaaacaggaaaggcaaaattattttttcttgaaatttgctaattcaattaacaataaccatctgaagtatttgctggtatagctaacataaagcgctaattaattttattaatgagattcttacaactttcacattgactctataattttgacccttaatgagaaaattgtttgtct

SEQ ID NO: 8195 - DNA, 1755 bp, Homo sapiens
  source 1..1755: mol_type = unassigned DNA; mol_type = unassigned DNA
atgagagccaagttcagagccggagctggccaccagaggaatccaagcattagtgcagaccacggagtgcatgagctggtttaccagacatttccactgggcctgggagatgggcaattctattcatggacagatggtttgagaagaaaggactggcatgactatgaaagcattcagaaagaggctatgcgctcagggaaaggtgaacatgggaaaccttacccccttactgaagaggaccatgatgactcagcttacagggaaaatggttttaatattttcgtcagcaacaatattgctctagagaggtctctgccagatattcgtcatgctaactgtaagcataagatgtatctggaaaggctgccaaacaccagcatcattatcccatttcataatgaaggttggacttcactcctgcggaccatacacagtataattaaccgaaccccagggagtctgatagcagaaatcattctagtagatgacttcagtgagagagaacacctgaaggataaattggaagaatacatggcccgattttccaaagtgaggattgttcgcaccaagaaaagagaaggactcatccggacccgtctcctgggggcatctatggccagaggagaagtcctgacattcctggactcccactgcgaggtcaatgtgaactggctgcccccactcctcaaccaaattgcactaaaccacaaaaccatcgtgtgtcccatgatcgatgtcattgaccacaatcacttcgggtatgaggcacaagctggggatgccatgcgaggagccttcgactgggaaatgtactacaaaagaatccccatccctccagagctccagagggcagatcccagcgacccttttgagtctcctgttatggctggaggtctctttgctgtggatcggaaatggttttgggaattgggtggctatgatccaggtttagaaatctggggaggagaacagtatgaaatctcttttaaggtttggatgtgtggaggagaaatgtttgatgttccatgttctagagttggtcatatctacaggaagtacgttccatacaaagttccatctgggacaagcctggcaagaaacctgaagcgggtagctgagacctggatggatgaatttgccgagtacatttaccagcggcggccggagtacaggcatctctccacgggggacatctctgcccagaaggagctgcgcaagcagctcaagtgcaaggacttcaaatggttcatggctgctgtggcctgggacgtgcctaaatactaccctccagtggagcccccgcctgctgcctggggggagatccgaaatgtggcagcaaatctctgtgtggacagcaagcatggagccaccggaacagagctgaggctggacatctgtgtcaaggatggttctgaaagaacatggtctcatgaacagctttttacctttggatggagagaagatattcgacccggtgagccactgcatacccggaaattctgctttgatgcgatctcacacaacagccccgttacactctatgactgtcatggcatgaaggggaaccagctctggggataccggaaggacagaacattattccatcctgtgagcaacagctgcatggattgcaaccccgcagagaagaagattttcatggccagatgtgaccctctctctgagactcagcagtggatttttgaacacattaatatgactgttttagaaaaatttaaccaccatgccaactcctag

SEQ ID NO: 8196 - DNA, 3068 bp, Homo sapiens
  source 1..3068: mol_type = unassigned DNA; mol_type = unassigned DNA
gagaacttactgtggttgtgagctggacaccacagccctgaagcctgagcaggagcagtgaaaggagggggtttaccatatcatcgcaagctgagaggaaggctgttgggggatacatgcagctggaggaagaatgcttagggcatacgtgtagcttgtttgttctttacaaagcatttgggagatttgccctgagggaaaggtgaacatgggaaaccttacccccttactgaagaggaccatgatgactcagcttacagggaaaatggttttaatattttcgtcagcaacaatattgctctagagaggtctctgccagatattcgtcatgctaactgtaagcataagatgtatctggaaaggctgccaaacaccagcatcattatcccatttcataatgaaggttggacttcactcctgcggaccatacacagtataattaaccgaaccccagggagtctgatagcagaaatcattctagtagatgacttcagtgagagagattggtggaaatcaacaagctgaaaaaactaaagttcaacatatttaaacacttgggaagcaggacctgctcagatccagcatggtgccagcacgttgtaggcctttgctaaaagcatggtgaatggatgaatgaataaatcagatgatgggagtcacagtccacttgcactccaaagtttgagaagcactagtctacgctgtatttgcagctcttgtggactccagcaagaattgtgtaactattgccttctagtgaaagccactgtatgccaggaggcagattctgaggagggtgaatcatcgtggatatagcagagaaaagcaggcaactggtggacaatctagtgccacctcacttcatttccaaagctattcccaccaagtttagcctacgagaatgataagtccacttgctgcgtatgtggagttcaggctgtgtcctcaaatcctctactcactcctttctaggctttccctatcatgtccacatcttccttcctctgccacttcatgtggggtagtggagcgactcctagcggaatctgtgttccattagcattacagctactcactgaaactattgcactctcctcccttctactggctccatcacctgtgttaggagctccctgtaccaagtcttccactttattgagtaaatagttagagccaaagggaacactgtgataaagcctgtgtcagctgccatgttgattttctactgctactgtcataatcacaaagttagcagttaaagcaacacccattttgcaggccagttctctgctctgggtttcacaaagtgatggacggggtgtgttcttttccagagcttctggggatgaattcgcttccaggctcattcatgttgttggcagaattgaattccatgagattataggactcaggtccggtgtccctgccagcaatcagcccagggttggttgttctcaggttttagaggctgcccacattctttttggggtggcatcttcctcctgcttcaaagccagcaaagacccttcacagtagttcctcgattcacgttagattaaatcagcagggagcaggaattttgtgggacatcttttgaattctgccttgtgcagctgcactatgcaaatgattaggaaaaactgcaagttcttattttgaagtaattttccaagtgcctgcagtacatccttactctcactcctgcttatcactgggaggattttatatggaaagcacttccctaactttttaggaactccctgttttgcctgtgatgaaccactcagcattttcccccgcattaaattacaatgacttcatttgaaacagaaatgcctcaaattttgggatctacttatgatagccttccctcttgaccaggactcaaagtctattttgccctaatgtgtctttggtcaataaaatggaatttggagagtttgagaaggtatatttgtaatttcaatccctgtctagaaagcatgaaaaaagatattagaaaaaaatgtgttgctcttgagtattattgccattgatgagttccacagtgctagtagactacattaggaatttgaatgaagcagaattgaatgaattctatttttaaaaaaatgaattgtacattacagctcacaagtatccaagagctaaatttgaaatgtcaaaggttatgtaaatcttatatgtttagctaaccctgtaatgagaaagactcccaacactgaagtctcaaatcgtttttgagaacactgaggagagaagccacataatttgagagtgtcataaccgggagtcctagaaagaggaagatcaaacagccgatgtgaatttaggccatgaagaggtttaatttaaaagctgagagcaaaatcacagtcctttcataattattataaggagatattgggtaccctcactctggcagacctgtggtgcctaatgaaaagagagcatttctctcctgcttggcttattttatccctaatcagcagcggtacttcaaattagcttcacaatctattggcctctctcagccataaaagcctcttttctcttttgatattagcatagctccccattgaaagtaacagaaaaagagctcctacttgaaggttatatccttccttgtggatggcccacttcaaagggttcatcacatggtccaaagagaagtaaaaataagatgaggggagtgcagcagctgtgtttctaagacaagaggttctgagctgaagaacaccacatcgattaaggtcagggcagctgggaaggttgcagttcagccaaaagagggctgaagtactgaacttgaaaactctagaacctgggaaatgtaagcattaaactcagagacattttatggaaaaaaaaaagttttattttatagattcagttctgtaatatagatattggaacattaaaatgatctgaggtattgacttcaaaatccatcatttggggtgttggattatctgttatttacttaactccattagcacccagctatggataaattgtgtgtaatagttgtgttttatgagatcaagattttaaaatagtgaccactg

SEQ ID NO: 8197 - DNA, 1254 bp, Homo sapiens
  source 1..1254: mol_type = unassigned DNA; mol_type = unassigned DNA
gaacacctgaaggataaattggaagaatacatggcccgattttccaaagtgaggattgttcgcaccaagaaaagagaaggactcatccggacccgtctcctgggggcatctatggccagaggagaagtcctgacattcctggactcccactgcgaggtcaatgtgaactggctgcccccactcctcaaccaaattgcactaaaccacaaaaccatcgtgtgtcccatgatcgatgtcattgaccacaatcacttcgggtatgaggcacaagctggggatgccatgcgaggagccttcgactgggaaatgtactacaaaagaatccccatccctccagagctccagagggcagatcccagcgacccttttgagtctcctgttatggctggaggtctctttgctgtggatcggaaatggttttgggaattgggtggctatgatccaggtttagaaatctggggaggagaacagtatgaaatctcttttaaggtttggatgtgtggaggagaaatgtttgatgttccatgttctagagttggtcatatctacaggaagtacgttccatacaaagttccatctgggacaagcctggcaagaaacctgaagcgggtagctgagacctggatggatgaatttgccgagtacatttaccagcggcggccggagtacaggcatctctccacgggggacatctctgcccagaaggagctgcgcaagcagctcaagtgcaaggacttcaaatggttcatggctgctgtggcctgggacgtgcctaaatactaccctccagtggagcccccgcctgctgcctggggggagatccgaaatgtggcagcaaatctctgtgtggacagcaagcatggagccaccggaacagagctgaggctggacatctgtgtcaaggatggttctgaaagaacatggtctcatgaacagctttttacctttggatggagagaagatattcgacccggtgagccactgcatacccggaaattctgctttgatgcgatctcacacaacagccccgttacactctatgactgtcatggcatgaaggggaaccagctctggggataccggaaggacagaacattattccatcctgtgagcaacagctgcatggattgcaaccccgcagagaagaagattttcatggccagatgtgaccctctctctgagactcagcagtggatttttgaacacattaatatgactgttttagaaaaatttaaccaccatgccaactcctag

SEQ ID NO: 8198 - DNA, 10044 bp, Homo sapiens
  source 1..10044: mol_type = unassigned DNA; mol_type = unassigned DNA
atggagctggcggtcgggaacctcagcgagggcaacgcgagctggccggagccccccgccccggagcccgggccgctgttcggcatcggcgtggagaacttcgtcacgctggtggtgttcggcctgatcttcgcgctgggtgtgctgggcaacagcctagtgatcaccgtgctggcgcgcagcaagccgggcaagccgcggagcaccaccaacctgttcatcctcaacctgagcatcgccgacctggcctacctgctcttctgcatccccttccaggccaccgtgtacgcgctgcccacctgggtgctgggcgccttcatctgcaagttcatccactacttcttcaccgtgtccatgctggtgagcatcttcaccctggccgcgatgtccgtggaccgctacgtggccatcgtgcactcgcggcgctcctcctccctcagggtgtcccgcaacgcgctgctgggcgtgggctgcatctgggcgctgtccattgccatggcctcgcccgtggcctaccaccagggcctcttccacccgcgcgccagcaaccagaccttctgctgggagcagtggcccgaccctcgccacaagaaggcctacgtggtgtgcaccttcgtcttcggctacctgctgccgctcctgctcatctgcttctgctatgccaaggtccttaatcacttgcataaaaagttgaagaacatgtcaaagaagtctgaagcatccaagaaaaagactgcacagacagttctggtggtggttgtggtgtttggaatctcctggctgccgcaccacatcatccatctctgggctgagtttggagttttcccgctgacgccggcttccttcctcttcagaatcaccgcccactgcctggcgtacagcaattcctccgtgaatcctatcatttatgcatttctctctgaaaatttcaggaaggcctataaacaagtgttcaagtgtcacattcgcaaagattcacacctgagtgatactaaagaaagtaaaagtcgaatagacaccccaccatcaaccaattgtactcatgtgtgataaaagatagagtatccttatggttgagtttccatataagtggaccagacacagaaacaaacagaatgagctagtaagcgatgctgcaacttgttatcttaacaagaattcaagtcgttttaattaaatcccacgtgtgttaaaaagtactttgatccatttaggaaattcctaggtctagtgagaattatttttcaattttattttagttctaaattatgtttcagaaacaaaagacaatgctgtacagttttattcctcttcagacatgaaagggaacatatatattccatatatatgttcaactcttcatagattgtgaactggcccatcaatatggtcaggaatatttgcagtctacattttaaagccaatttatttagaaaaaaaaatttgagctttaattctttaattttaagagaagtaatattgtgaactatgtattttaaaatatgatcatggacacacaatgatgaattttttggccatttacatagacatatctattaagtggaaagaaggctttctgaagtctgtttgcacaggtggcatttgcttccaattgtagctagcgcacagagctttggaagcctgtcattatgagatacagtcggtttacctcaggagtcaattcagtgttgtactggtgacctgggatgcagtagtaggcactgttgattcaaatttatcctgtgaaactggctttatagagttaacaaaacagagtcagagaccactgtcttaacagtggaagatgcaaataagtttttgagaataaaactggattttgaaattttacattagtacttgacaaaagttttcattttgccttgaatggaacctactaaaaagagagatgaaaaaaaatcagcgaggttgatgtagataataatttctatgggaccaaagactagacagaattcagtaagtcacatgaagtaatggtcatgcctgtacataaagcatatttcatgtttgatttagatgacattcaaaaaaaatcatgggactgaatatacctggggtatcctatcttgtacaaatgcatgctttttcattaaatttgtaatgatgtttaatgaacatttccaccaaacattatttcctctaaaaatgttaatttggggttaaaaccatcaccatttgaatttcaaatgtagttttcatgacaattttatattgatgtgtgtttacaatgagaaaatggcatgaaaatattaaattgtcttgtatcggaaaagtacttttcagactgtaagactttgatatgttttaggaggcaacaaaagcaagaagttttttttttgtttgtttgttaaaaaggatttggccaagcacagtggctcatgcctgtaattccagcactttgggaggtccagctgtgtggaatgtacttgagctcaggagtttgagaccagtgtgggcaacatggcaaaactcggtctctactaaaaatacaaaaattagctgggtgtggtggcgcacgcctgtagtttcagctactctggaggctgatgtgggggatcacctgagcccgggaggtccaggatgcagtcagtcaagactgcaccactgcacttcagcctggatgacagagtaagactctgtctaaaatatatatatatatgtgtgtgtgtgtgtgtgtgtgtgtgtgtgtgtgtaatgtacctctgtgccaaatcagcactccacatgaaacatcaaattttagataaaaatgcaaacttgacataagcctttggcatgctaatttttttagctcattcacttactttcactaatcatatttcagtgactagtgtttacatttgcaatgttattaataactctctggataaaaggaaagaaaaacgttagaaagattttgaagtgatgtattatgtttgttgactagaagaagaaattgtgtttatgtgtaagtgagggtcttaaagaatatgtcctttgcatcgaatgttttttgcactttattcaaatatataggagcagaaaaattttatcctgacgatgatacttcctgtgatttgtggaacttgaagttgctgttgcaaactccagaacaacttctttgggtgtgaactcacaaaactgtgtaaagaagtgccttcttgttgtgtttgagtttgcatgaatggaaatgatttcttgcaccatggctatttctttgttttctccttctgatctgtaagcatataaatggaagtatttaaaaaaatactgtagctaatgttgctattttctagaggcatgccgaaaatgtgctgtgcctttggtccttcccagatgctactggcacgtctgaagcttgaggcatggtacaaaaagtaatagcttgcgcttgaaacccccccccccccgccactttgctaaatgtaaatgctaattgttgcattttacagttagataggatatacttcctgcatattgtcattctaatcaattcctcttactcagagttttggctgagtctacttctaaaacaaattttgatagggataatgacatcttctgcaaagatctaaacctctacaaaattttctgaataaagagtttcagaagaactcgtaaacagaatgaaattaaccagagaagtataggagtgtgttgcgtttgccaagcatctgcttcccagctagatttccccctaatatacaatgaccaattctgaagcaccttcttttccgtcactaaataaagacagcttcccaaggacacactttttctcccagcatcaggttgagggagaaatattgcttatacctttgaagtcaggctgcttgaaactcacattttcagtttacttcaaagaaaactgatgctttctaagcagatttggctgtctcagtgcccaaggcagctgttattttcctaggctttttgctttcacgtaaggagacaggctttgggatatttagtagctgaaatgcttgctgtttcacatgcataagcaaccatttcagtgtcctgctgatgaatacagtgatgtggatggaaacgttttcttgtcctatatcctggggataggaaacagattctctgtgctcttctgaccgggtatgtactcagcaacatgggggactgaggccattttctgaatactttaggtaaattacttttgcttttaactaaattgttttattttacacattgggagtaaaaccatttccgccccatcccaatctcttgtgcttttatcttttttatcctaactcacttctatccagatttcctctcgataatatttaccacagataaattcatctttcagcgcagatataacaaatcagagtggggaggagagatgcttaaggaactgcatgagtcatgcaaggctcagaacttcttgtggctcaactcgaaatcatattgcattcctgcattctcccagatgctttgaggcagtgcagcgatcattctaatatgttaactgagacccaagatctcagcaggagaggacagcttatccaagcatccctttccttttcagtcatggccatggctatctgtaaacaccaaaatgctcatgctgaagcagcattacattgaggaaaataacctattgggcagcttcatcatgttcttgctttaaatgatttatcaaatacatgtatgtaaactacatagtcactaactgcgaaaatacatcaatgtggctacttcctctggaaagttactgtctaaaatttgtaaattttaatcttcactgttgcacatattttccatgtcttaaatttgtaagtgggtttctatgaaaggtaatcgtattcttcttgaccattaaaaatgttgcatgtaaggctatttctcaagtagatgttaatgacttgtttaattattgacttacttattttaaaagctgtatgtagtaagaacaagtaggtggtttaaaattcagatagttacatgttggcctggaaagaacaaaattatgaaatggtaattatatctgattttatttaaccatattttaatattttctcttttagaagtggaaaagttgagcctgaggaagaatttaaaatgcttaagacatctttgatgggggctgtatttgcattaggcagaggtgtctaaggagagtgtatcgtgtattgtgatgcattagcaggatgttttgttcatcgacttgtgaaagtgctgtggataatagatggtggtttcttttcttagtgtggcaggttcactcacattcatgtttttgactttagctgccatcctggggttctgagggtagcatgtctgtttgactgggcaagaccctcacataccttggcaggccctggctttcgtttctctgtggtgcctggtgctactcacagggctgactcacgggcagatgctccccatccttccccataggccctgttcccgcatccgatgattctcaggttttgttctaggtgcagaaatagtgggagaggccataatcgtgaatgatgaataagaagggaaggtggggccgggcatgtgacttatgcctgtaatcccagcactttgggaggccgaggcaggtggatcacctgaggtcgggagttcgagaccagcctgaccaacatggagaaaacccgtctctactaaaaatacaaaaattagctgggggcacacatgtgtgatcccagctactcaggaggttgaggcaggagaattgcttgaacccgggaggtggaggttgcaatgagcctagattgcaccattgcactccagcctgggcaacaagagtgaaactctgtctcaaaaaaataaaaattaaaaaaaaaaaagaaggtggccagtgagggttttatctttgtattcactggaaataacctcagctgaattttctctctgaatcttttcaatgttggctccatttgccatactcagacaattgcttgaagagctgaactgttagctcaagatttcgttggcactgttggatagaaagcctctccttttctgctggagaagagatttctcaggccaagttgtgtagctccaaattctccgcaattagagaaggcacagtaaagaaaagatcccttgctgatggaatggactggaactgagctccactgtttaaatttttgactctcaggtagtggtgatcgttatggtaacccatgaactcggatgaatttcggggcctgctgtgggttttctatgggacaccatataccacagtactgtatttcaaaatattggatattgattatgaacactggaactatttatgtgtcatcattccaaagaccattgtgatctatgaagctcctttatttgctggctagattgtccaaaaacaagctcacttgtttttgggcaatctagccaaggtgtcacataatggagaaaaatgcagatggtcctgtggctggtgtgaatgaagaatgacctgggcccaacatagaacttttccagtatggtgagcatcaaagtaggcagacatccaaaagccaagtgaagggcagatagatccccaggtgccacccaggctctgcaggcaaagctctcagggccccatttgtgtttgtgtggcctgcactgtgtaagtgtcgttcccctaggacttctgcaatgggataccaaagatgacgtgtaaggccttcagtatataatggacttgtgccaagtacctaagggttcactgccttgtttgaggaatcgcagagcatcatttctgattggttcttagagcctgcatcttgtaccactgggacttctggagacctctggggaccgttgactatgctgggagggtgcagaaatgaagctgatggcagaagcaggctcccagctcctcttcttctgctcagccaggtgattcttacctccattggcctttggatgtctgcgtaataatttgttgagaatcattagagaacaactaatccaaaaaatctatcatcctttatttgtgttgactttctgattatgccttcattcactctttttattacttatacacatgtctgtttttattcttccctactcttttcttaaagttggtcatatttctacacttgagatcttccagtttctgtgaatgttgaggggttcacaaagtggcttggcctcagacctctatatccttgttgttctgtttggacttaggacttttttcctggctatcctgccaatacttttccatctaacagaaacgcaagcttcaagagcaagttatttttataacagatcatgtgagcaattcctccatagcattggttgtagaacaggtcagttggcatgtggcctcctgagggccttgcatggggttctggacccagcgggggccacatctctgagaattcgttccctgtgggtgtctggggtgcatcgttacttctgagatgttatgactcagcagatgagatttgtccgtctgctcagtgagaggaattccaatgctgggtcttgactcccgctgcagggagctctctgggcccgggcatgttggatggagttgtgatgggtgtgcctccctcggacttactctggccaggaactgcatctgctcctctaaggagatttgagcaggtgaatggagtttctgtcattcctggtctagagttcatgtgtgaaggtcaaatataggtggggacttggcagcacacaactctgagtgaaagacacgatcagcgtgatagacaggtgtcttgctatgtgacttgccattgcggtcactggttatacaaagtctctgtttagaaatagcaaagatccaagaaagcagaagagtgggggtgggagtggggctaaatgtgttgctcttcagtggaaatctgcccattttgttgaaaagaaaggaaacagggtacacaaatgctgtttgggaacattgtgtcaggatcacctagctttgacgatgagagtgttttttaaaacggaaaccatgtcattttccttctagagagaatttcctggtatgtcaatgtagcttcagaaataggtctcagtgttctggctcagggcgaggttacaaaagaggcttcggtagcgtcctcaggcccgcgtgccctgtgttcttaacagcctcatggggcctagaggaacttttacatggtagacactgagtgaatacacagattcctagatttgagatattttcaaaatagggctagcatgtataaagaatcaaacttagtcattccattgaagtgaaattggattataatttagaaatatttataagccagaaatggttgtgtaaatgttagttttcatattttggttttctaagagtcacattttattgccatatagcacaaaatttgacaatgaggtatagaaatccaaaattttcttgggtacaattgaacaaatcttttaatctcttcagttctatctgcctaagtgaggagagtagttgtggagcattgtagaaaggataaaatgaacattaggatactgagggtttggtctgaattctgttttttcattgctactggaagtgctgtctttggtatcctcatgcatacaagaaggatttggaaaatgtcagtgagtttgaaactggctgtacagttgaatgagctgggcagttgaaagtacccgtgatgctctggccttaccttagatcagagattcttatattttatcaagcatcagaatcacctgcagagcttgttgaatgcagattgttggccacatctccagaatttctcattcagtagatttgggatggagcccaacgatttgcagctggtccagagaccaccttgtgagatctactacctgatttaattggtttgaaggtgaaggtggagtccaggctttttaaaacagtgtctgtattttcagagcagataaccaatcaaattgagcagatggtcttttaaagtctaagcttctatggttctgtgaaaaaaattgtttacatggaatttaaatcattcagaatttttattgcttacattgatcagatccataaaatatctgtttaactattacattaccctagctacagaaatttgtaagttttcaaaagcatgaaggagtttaataacttgtaagactttcagagattgttataatttttgcctcaaaaaaataaaataaaatagcttggtggaaaagagcacctatgcattcaatttgtttccctcaaatgctaagggttaaaatagtactcaaaattgttagatgtgaagttttgaacccagtgtttaaactcagtgtttaaatatttgcatgtctttctatgtgactgctaatttttaactacattattatctctaagagataaataaactttccctgtacttaaagtttttaaattaagtatcttctgataacataagtagtatgagtaaggaaaaaaaatctatgtgtactgtatttttaaattttaataaggtttgatatggtttggctctgtgtctccacccaaatctcaccttgaattgtaataatcctcacgtgtcaaggaccagcaggtggagataattgaattatggggccggtttctctcatactgttcttgcgatagtgagttctcaggagatctgatggttttataagcatctagcatttcccctgctggtacattctctcttcgcctgctgccatccatgtaagatgtgacttgctcctccttgctctctgccatgattgtgaggcttccccaccacttggaaatgtaagtcaattaaaccactttctttagtaaattgcccagtctcgggtatgtctttatcagcaatgtgaaaacggactaatacaacgtgattgtttaaatgctgatatgaaagcagtgctgaatgtggatcttcttatgccagatactgttataattattctctagagagctggccatacaatttatctcattatttatagatctagcatgaatgccagtaagctgacaaagccaaaagccaaaaactaagagtttgtattaatccagttaatgccaaatctagtcatcctccatcatcctacctctgtgttctgcatgaaatataattggcctttgtgatggaaccagttttcttgcattgaaaataaaatttgttcctc

SEQ ID NO: 8199 - DNA, 315 bp, Homo sapiens
  source 1..315: mol_type = unassigned DNA; mol_type = unassigned DNA
ctgaaaaaacacagatggctaaaagggaacctgaggttatgatgctttaaataaacaaaaaaacttaagacaattgcattccagagttgccttttgcctccaaattctcacaagtttgtaagggagcagtcttttgcaccagacagtttctgggaaactcatcgaatacatgggtgggaggatgagtcgaagtggtctgcccagtgccccctgaagagccctcccctctgctgctatggagctgttcttcaccaggtccttaatcacttgcataaaaagttgaagaacatgtcaaagaagtctgaagcatccaag

SEQ ID NO: 8200 - DNA, 1691 bp, Homo sapiens
  source 1..1691: mol_type = unassigned DNA
tccgagaaagagacggagagagagggaagaaaaagacagatagatagatattggggggaaggagaaaaaaggagaagagagggaagagaggacagcggagagagagcaccagagagagagggagagagagagagagcgctagagagagggagcgagcatgtgcgatgagcaatagctgtggaccttacagttgctgctaactgccctggtgtgtgtgagggagagagagggagggagggagagagagcgcgctagcgcgagagagcgagtgagcaagcgagcagaaaagaggtggagagggggggaataagaaagagagagaaggaaaggagagaaggcaggaagaaggcaagggacgagacaaccatgctgtgctgtatgagaagaaccaaacaggttgaaaaaaatgatgacgaccaaaagattgaacaagatggtatcaaaccagaagataaagctcataaggccgcaaccaaaattcaggctagcttccgtggacacataacaaggaaaaagctcaaaggagagaagaaggatgatgtccaagctgctgaggctgaagctaataagaaggatgaagcccctgttgccgatggggtggagaagaagggagaaggcaccactactgccgaagcagccccagccactggctccaagcctgatgagcccggcaaagcaggagaaactccttccgaggagaagaagggggagggtgatgctgccacagagcaggcagccccccaggctcctgcatcctcagaggagaaggccggctcagctgagacagaaagtgccactaaagcttccactgataactcgccgtcctccaaggctgaagatgccccagccaaggaggagcctaaacaagccgatgtgcctgctgctgtcactgctgctgctgccaccacccctgccgcagaggatgctgctgccaaggcaacagcccagcctccaacggagactggggagagcagccaagctgaagagaacatagaagctgtagatgaaaccaaacctaaggaaagtgcccggcaggacgagggtaaagaagaggaacctgaggctgaccaagaacatgcctgaactctaagaaatggctttccacatccccaccctcccctctcctgagcctgtctctccctaccctcttctcagctccactctgaagtcccttcctgtcctgctcacgtctgtgagtctgtcctttcccacccactagccctctttctctctgtgtggcaaacatttaaaaaaaaaaaaaaaaagcaggaaagatcccaagtcaaacagtgtggcttaaacattttttgtttcttggtgttgttatggcaagtttttggtaatgatgattcaatcattttgggaaattcttgcactgtatccaagttatttgatctggtgcgtgtggccctgtgggagtccactttcctctctctctctctctctgttccaagtgtgtgtgcaatgttccgttcatctgaggagtccaaaatatcgagtgaattcaaaatcatttttgttttcctccttttcaatgtgatggaatgaacaaaaaggaaaaaattcaaaaaacccagtttgttttaaaaataaataaataaagcaaatgtgccaattagcgtaaacttgcggctctaaggctcctttttcaacccgaatattaataaatcatgagagtaatcaaggtccaa

SEQ ID NO: 8201 - DNA, 1901 bp, Homo sapiens
  source 1..1901: mol_type = unassigned DNA
acagttgctgctaactgccctggtgtgtgtgagggagagagagggagggagggagagagagcgcgctagcgcgagagagcgagtgagcaagcgagcagaaaagaggtggagagggggggaataagaaagagagagaaggaaaggagagaaggcaggaagaaggcaagggacgagacaaccatgctgtgctgtatgagaagaaccaaacagaattaaaagggaacctggtctctgggttgttttcaacatctcaagtgtgaattttccctgtcaaaatcttcacaaggaaaatgagtcacagcatcacctgggtgacgaggtcataacacctcagcccttgcttaaaaaattttatttctacttttctattgtaaagagatctcaaaacaggaagataaaattggactgacagctctacagcctagtcttttagacagtgaactaggccagcattggcagacactggcgatgacaaagtcctgctctgaattatgccaccccgcactccactttttaccttgcctgggaggcttgaggaaaaatcttcagagagcagttcgacctagtccttattcacttggcttcttgactttctggatttcaagggttgaaaaaaatgatgacgaccaaaagattgaacaagatggtatcaaaccagaagataaagctcataaggccgcaaccaaaattcaggctagcttccgtggacacataacaaggaaaaagctcaaaggagagaagaaggatgatgtccaagctgctgaggctgaagctaataagaaggatgaagcccctgttgccgatggggtggagaagaagggagaaggcaccactactgccgaagcagccccagccactggctccaagcctgatgagcccggcaaagcaggagaaactccttccgaggagaagaagggggagggtgatgctgccacagagcaggcagccccccaggctcctgcatcctcagaggagaaggccggctcagctgagacagaaagtgccactaaagcttccactgataactcgccgtcctccaaggctgaagatgccccagccaaggaggagcctaaacaagccgatgtgcctgctgctgtcactgctgctgctgccaccacccctgccgcagaggatgctgctgccaaggcaacagcccagcctccaacggagactggggagagcagccaagctgaagagaacatagaagctgtagatgaaaccaaacctaaggaaagtgcccggcaggacgagggtaaagaagaggaacctgaggctgaccaagaacatgcctgaactctaagaaatggctttccacatccccaccctcccctctcctgagcctgtctctccctaccctcttctcagctccactctgaagtcccttcctgtcctgctcacgtctgtgagtctgtcctttcccacccactagccctctttctctctgtgtggcaaacatttaaaaaaaaaaaaaaaaagcaggaaagatcccaagtcaaacagtgtggcttaaacattttttgtttcttggtgttgttatggcaagtttttggtaatgatgattcaatcattttgggaaattcttgcactgtatccaagttatttgatctggtgcgtgtggccctgtgggagtccactttcctctctctctctctctctgttccaagtgtgtgtgcaatgttccgttcatctgaggagtccaaaatatcgagtgaattcaaaatcatttttgttttcctccttttcaatgtgatggaatgaacaaaaaggaaaaaattcaaaaaacccagtttgttttaaaaataaataaataaagcaaatgtgccaattagcgtaaacttgcggctctaaggctcctttttcaacccgaatattaataaatcatgagagtaatcaaggtccaa

SEQ ID NO: 8202 - DNA, 1875 bp, Homo sapiens
  source 1..1875: mol_type = unassigned DNA
gggggaagtgggggctgggaaggaaccacgggcccccgcccgaggcccatgggcccctcctaggcctttgcctgagcagtccggtgtcactaccgcagagcctcgaggagaagttccccaactttcccgcctctcagcctttgaaagaaagaaaggggagggggcaggccgcgtgcagccgcgagcggtgctgggctccggctccaattccccatctcagtcgttcccaaagtcctcctgtttcatccaagcgtgtaagggtccccgtccttgactccctagtgtcctgctgcccacagtccagtcctgggaaccagcaccgatcacctcccatcgggccaatctcagtcccttcccccctacgtcggggcccacacgctcggtgcgtgcccagttgaaccaggcggctgcggaaaaaaaaaagcggggagaaagtagggcccggctactagcggttttacgggcgcacgtagctcaggcctcaagaccttgggctgggactggctgagcctggcgggaggcggggtccgagtcaccgcctgccgccgcgcccccggtttctataaattgagcccgcagcctcccgcttcgctctctgctcctcctgttcgacagtcagccgcatcttcttttgcgtcgccagccgagccacatcgctcagacaccatggggaaggtgaaggtcggagtcaacggatttggtcgtattgggcgcctggtcaccagggctgcttttaactctggtaaagtggatattgttgccatcaatgaccccttcattgacctcaactacatggtttacatgttccaatatgattccacccatggcaaattccatggcaccgtcaaggctgagaacgggaagcttgtcatcaatggaaatcccatcaccatcttccaggagcgagatccctccaaaatcaagtggggcgatgctggcgctgagtacgtcgtggagtccactggcgtcttcaccaccatggagaaggctggggctcatttgcaggggggagccaaaagggtcatcatctctgccccctctgctgatgcccccatgttcgtcatgggtgtgaaccatgagaagtatgacaacagcctcaagatcatcagcaatgcctcctgcaccaccaactgcttagcacccctggccaaggtcatccatgacaactttggtatcgtggaaggactcatgaccacagtccatgccatcactgccacccagaagactgtggatggcccctccgggaaactgtggcgtgatggccgcggggctctccagaacatcatccctgcctctactggcgctgccaaggctgtgggcaaggtcatccctgagctgaacgggaagctcactggcatggccttccgtgtccccactgccaacgtgtcagtggtggacctgacctgccgtctagaaaaacctgccaaatatgatgacatcaagaaggtggtgaagcaggcgtcggagggccccctcaagggcatcctgggctacactgagcaccaggtggtctcctctgacttcaacagcgacacccactcctccacctttgacgctggggctggcattgccctcaacgaccactttgtcaagctcatttcctggtatgacaacgaatttggctacagcaacagggtggtggacctcatggcccacatggcctccaaggagtaagacccctggaccaccagccccagcaagagcacaagaggaagagagagaccctcactgctggggagtccctgccacactcagtcccccaccacactgaatctcccctcctcacagttgccatgtagaccccttgaagaggggaggggcctagggagccgcaccttgtcatgtaccatcaataaagtaccctgtgctcaacca

SEQ ID NO: 8203 - DNA, 390 bp, Homo sapiens
  source 1..390: mol_type = unassigned DNA
gcttcgctctctgctcctcctgttcgacagtcagccgcatcttcttttgcgtcgccagccgagccacatcgctcagacaccatggggaaggtgaaggtcggagtcaacgggtgagttcgcgggtggctggggggccctgggctgcgaccgcccccgaaccgcgtctacgagccttgcgggctccgggtctttgcagtcgtatgggggcagggtagctgttccccgcaaggagagctcaaggtcagcgctcggacctggcggagccccgcacccaggctgtggcgccctgtgcagctccgcccttgcggcgccatctgcccggagcctccttcccctagtccccagaaacaggaggtccctactcccgcccgagatcccgacccggacccc

SEQ ID NO: 8204 - DNA, 1266 bp, Homo sapiens
  source 1..1266: mol_type = unassigned DNA
tgttcgacagtcagccgcatcttcttttgcgtcgccagccgagccacatcgctcagacaccatggggaaggtgaaggtcggagtcaacggatttggtcgtattgggcgcctggtcaccagggctgcttttaactctggtaaagtggatattgttgccatcaatgaccccttcattgacctcaactacatggtttacatgttccaatatgattccacccatggcaaattccatggcaccgtcaaggctgagaacgggaagcttgtcatcaatggaaatcccatcaccatcttccaggagtgagtggaagacagaatggaagaaatgcgagatccctccaaaatcaagtggggcgatgctggcgctgagtacgtcgtggagtccactggcgtcttcaccaccatggagaaggctggggctcatttgcaggggggagccaaaagggtcatcatctctgccccctctgctgatgcccccatgttcgtcatgggtgtgaaccatgagaagtatgacaacagcctcaagatcatcagcaatgcctcctgcaccaccaactgcttagcacccctggccaaggtcatccatgacaactttggtatcgtggaaggactcatgaccacagtccatgccatcactgccacccagaagactgtggatggcccctccgggaaactgtggcgtgatggccgcggggctctccagaacatcatccctgcctctactggcgctgccaaggctgtgggcaaggtcatccctgagctgaacgggaagctcactggcatggccttccgtgtccccactgccaacgtgtcagtggtggacctgacctgccgtctagaaaaacctgccaaatatgatgacatcaagaaggtggtgaagcaggcgtcggagggccccctcaagggcatcctgggctacactgagcaccaggtggtctcctctgacttcaacagcgacacccactcctccacctttgacgctggggctggcattgccctcaacgaccactttgtcaagctcatttcctggtatgacaacgaatttggctacagcaacagggtggtggacctcatggcccacatggcctccaaggagtaagacccctggaccaccagccccagcaagagcacaagaggaagagagagaccctcactgctggggagtccctgccacactcagtcccccaccacactgaatctcccctcctcacagttgccatgtagaccccttgaagaggggaggggcctagggagccgcaccttgtcatg

SEQ ID NO: 8205 - DNA, 930 bp, Homo sapiens
  source 1..930: mol_type = unassigned DNA
gttcgacagtcagccgcatcttcttttgcgtcgccagccgagccacatcgctcagacaccatggggaaggtgaaggtcggagtcaacgggtgagttcgcgggtggctggggggccctgggctgcgaccgcccccgaaccgcgtctacgagccttgcgggctccgggtctttgcagtcgtatgggggcagggtagctgttccccgcaaggagagctcaagatttggtcgtattgggcgcctggtcaccagggctgcttttaactctggtaaagtggatattgttgccatcaatgaccccttcattgacctcaactacatggtttacatgttccaatatgattccacccatggcaaattccatggcaccgtcaaggctgagaacgggaagcttgtcatcaatggaaatcccatcaccatcttccaggagcgagatccctccaaaatcaagtggggcgatgctggcgctgagtacgtcgtggagtccactggcgtcttcaccaccatggagaaggctggggctcatttgcaggggggagccaaaagggtcatcatctctgccccctctgctgatgcccccatgttcgtcatgggtgtgaaccatgagaagtatgacaacagcctcaagatcatcagcaatgcctcctgcaccaccaactgcttagcacccctggccaaggtcatccatgacaactttggtatcgtggaaggactcatgaccacagtccatgccatcactgccacccagaagactgtggatggcccctccgggaaactgtggcgtgatggccgcggggctctccagaacatcatccctgcctctactggcgctgccaaggctgtgggcaaggtcatccctgagctgaacgggaagctcactggcatggccttccgtgtccccactgccaacgtgtcagtggtggacctgacctg

SEQ ID NO: 8206 - DNA, 1348 bp, Homo sapiens
  source 1..1348: mol_type = unassigned DNA
ttcgacagtcagccgcatcttcttttgcgtcgccaggtgaagacgggcggagagaaacccgggaggctagggacggcctgaaggcggcaggggcgggcgcaggccggatgtgttcgcgccgctgcgggccgagccacatcgctcagacaccatggggaaggtgaaggtcggagtcaacggatttggtcgtattgggcgcctggtcaccagggctgcttttaactctggtaaagtggatattgttgccatcaatgaccccttcattgacctcaactacatggtttacatgttccaatatgattccacccatggcaaattccatggcaccgtcaaggctgagaacgggaagcttgtcatcaatggaaatcccatcaccatcttccaggagcgagatccctccaaaatcaagtggggcgatgctggcgctgagtacgtcgtggagtccactggcgtcttcaccaccatggagaaggctggggctcatttgcaggggggagccaaaagggtcatcatctctgccccctctgctgatgcccccatgttcgtcatgggtgtgaaccatgagaagtatgacaacagcctcaagatcatcagcaatgcctcctgcaccaccaactgcttagcacccctggccaaggtcatccatgacaactttggtatcgtggaaggactcatgaccacagtccatgccatcactgccacccagaagactgtggatggcccctccgggaaactgtggcgtgatggccgcggggctctccagaacatcatccctgcctctactggcgctgccaaggctgtgggcaaggtcatccctgagctgaacgggaagctcactggcatggccttccgtgtccccactgccaacgtgtcagtggtggacctgacctgccgtctagaaaaacctgccaaatatgatgacatcaagaaggtggtgaagcaggcgtcggagggccccctcaagggcatcctgggctacactgagcaccaggtggtctcctctgacttcaacagcgacacccactcctccacctttgacgctggggctggcattgccctcaacgaccactttgtcaagctcatttcctggtatgacaacgaatttggctacagcaacagggtggtggacctcatggcccacatggcctccaaggagtaagacccctggaccaccagccccagcaagagcacaagaggaagagagagaccctcactgctggggagtccctgccacactcagtcccccaccacactgaatctcccctcctcacagttgccatgtagaccccttgaagaggggaggggcctagggagccgcaccttgtcatgtaccatcaataaagtaccc

SEQ ID NO: 8207 - DNA, 1333 bp, Homo sapiens
  source 1..1333: mol_type = unassigned DNA; mol_type = unassigned DNA
gtcagccgcatcttcttttgcgtcgccagccgagccacatcgctcagacaccatggggaaggtgaaggtcggagtcaacggatttggtcgtattgggcgcctggtcaccagggctgcttttaactctggtaaagtggatattgttgccatcaatgaccccttcattgacctcaactacatggtttacatgttccaatatgattccacccatggcaaattccatggcaccgtcaaggctgagaacgggaagcttgtcatcaatggaaatcccatcaccatcttccaggagtgagtggaagacagaatggaagaaatgtgctttggggaggcaactaggatggtgtggctcccttgggtatatggtaaccttgtgtccctcaatatggtcctgtccccatctcccccccacccccataggcgagatccctccaaaatcaagtggggcgatgctggcgctgagtacgtcgtggagtccactggcgtcttcaccaccatggagaaggctggggctcatttgcaggggggagccaaaagggtcatcatctctgccccctctgctgatgcccccatgttcgtcatgggtgtgaaccatgagaagtatgacaacagcctcaagatcatcagcaatgcctcctgcaccaccaactgcttagcacccctggccaaggtcatccatgacaactttggtatcgtggaaggactcatgaccacagtccatgccatcactgccacccagaagactgtggatggcccctccgggaaactgtggcgtgatggccgcggggctctccagaacatcatccctgcctctactggcgctgccaaggctgtgggcaaggtcatccctgagctgaacgggaagctcactggcatggccttccgtgtccccactgccaacgtgtcagtggtggacctgacctgccgtctagaaaaacctgccaaatatgatgacatcaagaaggtggtgaagcaggcgtcggagggccccctcaagggcatcctgggctacactgagcaccaggtggtctcctctgacttcaacagcgacacccactcctccacctttgacgctggggctggcattgccctcaacgaccactttgtcaagctcatttcctggtatgacaacgaatttggctacagcaacagggtggtggacctcatggcccacatggcctccaaggagtaagacccctggaccaccagccccagcaagagcacaagaggaagagagagaccctcactgctggggagtccctgccacactcagtcccccaccacactgaatctcccctcctcacagttgccatgtagaccccttgaagaggggagg

SEQ ID NO: 8208 - DNA, 1363 bp, Homo sapiens
  source 1..1363: mol_type = unassigned DNA; mol_type = unassigned DNA
aggcgtgtgtgtcggccggggccactaggcgctcactgttctctccctccgcgcagccgagccacatcgctcagacaccatggggaaggtgaaggtcggagtcaacggatttggtcgtattgggcgcctggtcaccagggctgcttttaactctggtaaagtggatattgttgccatcaatgaccccttcattgacctcaactacatggtttacatgttccaatatgattccacccatggcaaattccatggcaccgtcaaggctgagaacgggaagcttgtcatcaatggaaatcccatcaccatcttccaggagtgagtggaagacagaatggaagaaatgtgctttggggaggcaactaggatggtgtggctcccttgggtatatggtaaccttgtgtccctcaatatggtcctgtccccatctcccccccacccccataggcgagatccctccaaaatcaagtggggcgatgctggcgctgagtacgtcgtggagtccactggcgtcttcaccaccatggagaaggctggggctcatttgcaggggggagccaaaagggtcatcatctctgccccctctgctgatgcccccatgttcgtcatgggtgtgaaccatgagaagtatgacaacagcctcaagatcatcagcaatgcctcctgcaccaccaactgcttagcacccctggccaaggtcatccatgacaactttggtatcgtggaaggactcatgaccacagtccatgccatcactgccacccagaagactgtggatggcccctccgggaaactgtggcgtgatggccgcggggctctccagaacatcatccctgcctctactggcgctgccaaggctgtgggcaaggtcatccctgagctgaacgggaagctcactggcatggccttccgtgtccccactgccaacgtgtcagtggtggacctgacctgccgtctagaaaaacctgccaaatatgatgacatcaagaaggtggtgaagcaggcgtcggagggccccctcaagggcatcctgggctacactgagcaccaggtggtctcctctgacttcaacagcgacacccactcctccacctttgacgctggggctggcattgccctcaacgaccactttgtcaagctcatttcctggtatgacaacgaatttggctacagcaacagggtggtggacctcatggcccacatggcctccaaggagtaagacccctggaccaccagccccagcaagagcacaagaggaagagagagaccctcactgctggggagtccctgccacactcagtcccccaccacactgaatctcccctcctcacagttgccatgtagaccccttgaagaggggaggggc

SEQ ID NO: 8209 - DNA, 1256 bp, Homo sapiens
  source 1..1256: mol_type = unassigned DNA; mol_type = unassigned DNA
aggcgtgtgtgtcggccggggccactaggcgctcactgttctctccctccgcgcagccgagccacatcgctcagacaccatggggaaggtgaaggtcggagtcaacggatttggtcgtattgggcgcctggtcaccagggctgcttttaactctggtaaagtggatattgttgccatcaatgaccccttcattgacctcaactacatggtttacatgttccaatatgattccacccatggcaaattccatggcaccgtcaaggctgagaacgggaagcttgtcatcaatggaaatcccatcaccatcttccaggagcgagatccctccaaaatcaagtggggcgatgctggcgctgagtacgtcgtggagtccactggcgtcttcaccaccatggagaaggctggggctcatttgcaggggggagccaaaagggtcatcatctctgccccctctgctgatgcccccatgttcgtcatgggtgtgaaccatgagaagtatgacaacagcctcaagatcatcagcaatgcctcctgcaccaccaactgcttagcacccctggccaaggtcatccatgacaactttggtatcgtggaaggactcatgaccacagtccatgccatcactgccacccagaagactgtggatggcccctccgggaaactgtggcgtgatggccgcggggctctccagaacatcatccctgcctctactggcgctgccaaggctgtgggcaaggtcatccctgagctgaacgggaagctcactggcatggccttccgtgtccccactgccaacgtgtcagtggtggacctgacctgccgtctagaaaaacctgccaaatatgatgacatcaagaaggtggtgaagcaggcgtcggagggccccctcaagggcatcctgggctacactgagcaccaggtggtctcctctgacttcaacagcgacacccactcctccacctttgacgctggggctggcattgccctcaacgaccactttgtcaagctcatttcctggtatgacaacgaatttggctacagcaacagggtggtggacctcatggcccacatggcctccaaggagtaagacccctggaccaccagccccagcaagagcacaagaggaagagagagaccctcactgctggggagtccctgccacactcagtcccccaccacactgaatctcccctcctcacagttgccatgtagaccccttgaagaggggaggggcctagggagccgcaccttgtcat

SEQ ID NO: 8210 - DNA, 1720 bp, Homo sapiens
  source 1..1720: mol_type = unassigned DNA; mol_type = unassigned DNA
ttctctccctccgcgcagccgagccacatcgctcagacaccatggggaaggtgaaggtcggagtcaacggatttggtcgtattgggcgcctggtcaccagggctgcttttaactctggtaaagtggatattgttgccatcaatgaccccttcattgacctcaactacatggtttacatgttccaatatgattccacccatggcaaattccatggcaccgtcaaggctgagaacgggaagcttgtcatcaatggaaatcccatcaccatcttccaggagtgagtggaagacagaatggaagaaatgtgctttggggaggcaactaggatggtgtggctcccttgggtatatggtaaccttgtgtccctcaatatggtcctgtccccatctcccccccacccccataggcgagatccctccaaaatcaagtggggcgatgctggcgctgagtacgtcgtggagtccactggcgtcttcaccaccatggagaaggctggggtgagtgcaggagggcccgcgggaggggaagctgactcagccctgcaaaggcaggacccgggttcataactgtctgcttctctgctgtaggctcatttgcaggggggagccaaaagggtcatcatctctgccccctctgctgatgcccccatgttcgtcatgggtgtgaaccatgagaagtatgacaacagcctcaagatcatcaggtgaggaaggcagggcccgtggagaagcggccagcctggcaccctatggacacgctcccctgacttgcgccccgctccctctttctttgcagcaatgcctcctgcaccaccaactgcttagcacccctggccaaggtcatccatgacaactttggtatcgtggaaggactcatggtatgagagctggggaatgggactgaggctcccacctttctcatccaagactggctcctccctgccggggctgcgtgcaaccctggggttgggggttctggggactggctttcccataatttcctttcaaggtggggagggaggtagaggggtgatgtggggagtacgctgcagggcctcactccttttgcagaccacagtccatgccatcactgccacccagaagactgtggatggcccctccgggaaactgtggcgtgatggccgcggggctctccagaacatcatccctgcctctactggcgctgccaaggctgtgggcaaggtcatccctgagctgaacgggaagctcactggcatggccttccgtgtccccactgccaacgtgtcagtggtggacctgacctgccgtctagaaaaacctgccaaatatgatgacatcaagaaggtggtgaagcaggcgtcggagggccccctcaagggcatcctgggctacactgagcaccaggtggtctcctctgacttcaacagcgacacccactcctccacctttgacgctggggctggcattgccctcaacgaccactttgtcaagctcatttcctggtatgacaacgaatttggctacagcaacagggtggtggacctcatggcccacatggcctccaaggagtaagacccctggaccaccagccccagcaagagcacaagaggaagagagagaccctcactgctggggagtccctgccacactcagtcccccaccacactgaatctcccctcctcacagttgccatgtagaccccttgaagaggggaggggcctagggagccgcaccttgtc

SEQ ID NO: 8211 - DNA, 1292 bp, Homo sapiens
  source 1..1292: mol_type = unassigned DNA; mol_type = unassigned DNA
tgcaaccgggaaggaaatgaatgggcagccgttaggaaagcctgccggtgactaaccctgcgctcctgcctcgatgggtggagtcgcgtgtggcggggaagtcaggtggagcgaggctagctggcccgatttctcctccgggtgatgcttttcctagattattctctgatttggtcgtattgggcgcctggtcaccagggctgcttttaactctggtaaagtggatattgttgccatcaatgaccccttcattgacctcaactacatggtttacatgttccaatatgattccacccatggcaaattccatggcaccgtcaaggctgagaacgggaagcttgtcatcaatggaaatcccatcaccatcttccaggagcgagatccctccaaaatcaagtggggcgatgctggcgctgagtacgtcgtggagtccactggcgtcttcaccaccatggagaaggctggggctcatttgcaggggggagccaaaagggtcatcatctctgccccctctgctgatgcccccatgttcgtcatgggtgtgaaccatgagaagtatgacaacagcctcaagatcatcagcaatgcctcctgcaccaccaactgcttagcacccctggccaaggtcatccatgacaactttggtatcgtggaaggactcatgaccacagtccatgccatcactgccacccagaagactgtggatggcccctccgggaaactgtggcgtgatggccgcggggctctccagaacatcatccctgcctctactggcgctgccaaggctgtgggcaaggtcatccctgagctgaacgggaagctcactggcatggccttccgtgtccccactgccaacgtgtcagtggtggacctgacctgccgtctagaaaaacctgccaaatatgatgacatcaagaaggtggtgaagcaggcgtcggagggccccctcaagggcatcctgggctacactgagcaccaggtggtctcctctgacttcaacagcgacacccactcctccacctttgacgctggggctggcattgccctcaacgaccactttgtcaagctcatttcctggtatgacaacgaatttggctacagcaacagggtggtggacctcatggcccacatggcctccaaggagtaagacccctggaccaccagccccagcaagagcacaagaggaagagagagaccctcactgctggggagtccctgccacactcagtcccccaccacactgaatctcccctcctcacagttgccatgtagaccccttgaagaggggaggg

SEQ ID NO: 8212 - DNA, 1086 bp, Homo sapiens
  source 1..1086: mol_type = unassigned DNA; mol_type = unassigned DNA
atggtttacatgttccaatatgattccacccatggcaaattccatggcaccgtcaaggctgagaacgggaagcttgtcatcaatggaaatcccatcaccatcttccaggagcgagatccctccaaaatcaagtggggcgatgctggcgctgagtacgtcgtggagtccactggcgtcttcaccaccatggagaaggctggggctcatttgcaggggggagccaaaagggtcatcatctctgccccctctgctgatgcccccatgttcgtcatgggtgtgaaccatgagaagtatgacaacagcctcaagatcatcagcaatgcctcctgcaccaccaactgcttagcacccctggccaaggtcatccatgacaactttggtatcgtggaaggactcatgaccacagtccatgccatcactgccacccagaagactgtggatggcccctccgggaaactgtggcgtgatggccgcggggctctccagaacatcatccctgcctctactggcgctgccaaggctgtgggcaaggtcatccctgagctgaacgggaagctcactggcatggccttccgtgtccccactgccaacgtgtcagtggtggacctgacctgccgtctagaaaaacctgccaaatatgatgacatcaagaaggtggtgaagcaggcgtcggagggccccctcaagggcatcctgggctacactgagcaccaggtggtctcctctgacttcaacagcgacacccactcctccacctttgacgctggggctggcattgccctcaacgaccactttgtcaagctcatttcctggtatgacaacgaatttggctacagcaacagggtggtggacctcatggcccacatggcctccaaggagtaagacccctggaccaccagccccagcaagagcacaagaggaagagagagaccctcactgctggggagtccctgccacactcagtcccccaccacactgaatctcccctcctcacagttgccatgtagaccccttgaagaggggaggggcctagggagccgcaccttgtcatgtaccatcaataaagtaccctgtgctcaaccagtt

SEQ ID NO: 8213 - DNA, 4161 bp, Homo sapiens
  source 1..4161: mol_type = unassigned DNA; mol_type = unassigned DNA
cgcggcccggcggggctgccaggcggcgagcgccgcggcggccccgggaggtggcggcgggcgcgagagcctgggccgcgcgggactgaccgtcggggccccgggacggcggccccggggcgcccatgccatggagaagctggcggccgggctggccggcctgcgctggagcatgggcgccttcccgctcgacctcatcgtcagccgctgccgcctgcccacgctcgcctgccttgggccaggggagtacgccgagggcgtcagtgagcgagacatcctgctcatccactcctgccggcagtggacaacggtgacagctcataccctggaggagggccactatgtcatcgggcccaagatcgacatccccctgcagtacccagggaagttcaagctcctggaacaggcccgggatgtgcgggagccagtgaggtacttcagcagcgtggaggaggtggccagtgtcttccctgaccgcatcttcgtgatggaagccatcaccttcagcgtcaaggtggtgtcgggcgagttcagcgaggacagcgaggtgtacaacttcacgctgcatgcgggcgacgagctcactcttatgggccaggcggagatcctgtgcgccaagaccaccaaggagcgctcgcgcttcaccaccctcctgcgaaagctgggccgggccggggcgctggccggggtgggcggcggcggcccagcgagcgcgggggccgcgggaggcactggcggcgggggcgccaggccggtcaaaggcaagatgccctgcctcatctgcatgaaccaccgcaccaacgaaagcctgagcctgccctttcagtgccagggccgcttcagcactcgcagcccgctggagctgcagatgcaagagggcgagcacacggtgcgcgccatcatcgagcgcgtgaggctgccggtgaacgtgctggtgcccagccggccgccgcgcaacccctacgacctgcacccggtgcgggagggtcattgctacaagctggttagcatcatctccaagacggtggtgctggggctggcgctgcgccgcgagggcccggcgccgctgcacttcctgctgctcacggacacgccgcgcttcgcgctgccgcagggcctgctggccggggacccgcgcgtcgagcgcctggtgcgcgacagcgcctcctactgccgcgagcgcttcgaccccgacgagtactccacggccgtgcgcgaggcgccagcggagctcgccgaagactgcgccagcccgcgccgcgcgcgcctctgcctgcccgcgccgcgcgcccccgggctcgcccgcgcccccggcccgctagcgccggctcccgccggcgagggcgaccaggagtacgtgagccccgactgggcagccgcgcccgagcccgccgcgccgcccgccgagatcccctacgaggagttgtgggcgcaccaggggcccgagggcctcgtccggccgcccccagggctcgatctcatctccttcggggccgcgggaccgccgcgtcgggagccggaagcgccgccgcctccagtccctcccaaatccgaggcggtgaaggaggagtgccgcctgctcaatgcccctccagtgcctccccggggtggcaatggcagcggccggctctccagcagccccccggttccccctcgcttccccaagctgcagccggtacattcccccagctccagcctctcctactactcctctggcctccaggatggggcgggttcccgcagtggcagtggctccccatcgccggacacctactccctctattgctacccatgcacctggggagactgcaaggtgggcgagtcctctagccgcccagcccccggtcccctaccctcaaccacacagcccagccaggcctcccgggccctcacagagcctctgagcggtcgagccgcctcccttctgggggctgacacccctgttaagacctaccacagctgccctcctctattcaagccctcacatccccagaagcgctttgctccgtttggagctctcaaccctttttccgggcctgcctacccctcaggcccttcagcggccttgtcttctgggcccagaaccacctcgggtcctgtggctacctctggccctgcgtattccccaggcccagcctcgccaggccaggcctattcagctgctcccccctcctcctgcgccccctcctcctcctcttcttctgaatggcaggaaccagtcctggagcccttcgatccctttgagctggggcagggcagttctccagagcctgagctgctgcgttctcaggagcccagagcagtggggacacctgggcctggaccccgcctttcaccacttggcccctccaaggcctttgagcctgaaggtttggtgctgcaccaggtccccaccccactgtcaccagctgctctgcagggacccgaggcgggaggagcactttttctaacccaagggcgcctggaagggcctcctgccagtccccgggatggagccacaggctttggagtccgagatgcctcctcctggcagccccctgctgacctgtctgcactctccctggaggaggtctctcgcagtctgcgtttcatcgggctctcagaggatgtggtgagcttctttgcccgagaacgcatcgatggtagcatctttgtgcagctcagtgaggacatcctggcagatgacttccacctcaccaagctgcaggtcaagaagatcatgcagttcatcaaaggctggaggcccaagatctgaactgcccagctggagctgcacagctggaatgctggtatgggggccccaggtacagcactccggaggagcaggtgctgcctgcaagaaggatctatgtcgagactgaggctgctcagcagccactgggtggatccaggggagatgcatgtggaaatgtggtcctctggggtcagacccctgcacgggacatcttgcctttgagtgtgcagagtacatggggaaggggctgggggcaccactgtgtacctgggcccagtaaggcatttgccgtgattcccacaacggggtcaaaagctggccttcagggtgacctaacaccacctcatgccctgctatagaccttcacaaacgacttccactgctgaagcctgtaggctctgtttagagacaagaagatggctggtaatttaagcaccgatttcccaagtgcccactctcctttgtgctctgttggcttttggcctaaagctgccccagagtgagggtgtagatgtctgtgtctgtgagatgcctttcccttccccctctgctccaccgtggttgaggggggtggggcctggccccgcacacaggtgagtcgtgtacaagcctaacccatggcacctcagaggctccacctgtgggtcctggttcatgggtgacaactttggaagagcacagctctgcaattgacccgacccacttatctagttaggaagccagacactgcccagatgactctagcaccctggcttctgctctgactttactgcagctagtcatccatccgtcaggtggcgttcagtctcagaatactgattccgtggaagagcaggttgatttaggtcagcttctccttgattctagaagcaagcggtagtcaaccacctccaattccgccaatctcttgcccccatcatttgtctctgacaatacttggtgtttttccctggttttctgtcactggcacaggagggtacagttgggagagtgcgttcctggagctcagtcctgcatttgttcacgtgcctcacagcaggcctttgtgcccttgaatctcaaacatggggatctgcttggtacccagagctctggtcattgtgtccaaccacacaccccaccccatccgtgtcctccatctcacccagaaccacagggtgcccactagtgtcagggcccaaagtgccagccttctcttctgccttacctagtctacctatttatttcctccactttttatcttaaaagtagctaagccatgctggtgcccatactccaagcaggctgcctcagctcagagaagtggtcagagagtagagcacagaacctgtgatgtggggacatttggttttcttgcagatcatttaatgaatcctcaaggactaatgaaataaatgctagactgctgaagatgagtacaagtggca

SEQ ID NO: 8214 - DNA, 5138 bp, Homo sapiens
  source 1..5138: mol_type = unassigned DNA; mol_type = unassigned DNA
aagcgattcccctgcctcagcctcccaagtagctgggactacaggtgtgtgccaccacacccagagagttttttgtatttttagtagagatggggtttcaccatgttggccaggctggtctcaaactgctgacctcaagtgatctgcccactttggcctcccaaagtgctgggttacaagcgtgagccaccgtgcctggcctgccatctccatttctgaccaggctggtggcctgagtacatcatcctgagtcccttccttccccacctcccccttcttctgtcacccaagcctgctgggtctcccttcccagtatctcttggtctgtttctgctattccctagctcttctccagaaccccttactggtttgtttacctgactggtctcccggttattttaatagagctgaacctggatcatggtatttctttgctcgaaacactccagtgggtctcatgttgtacagaataaagctttactgctttagcaaggcattcagagcctttcaaatcccagttgctgtctgcatcccctcctgtcctccctctccctaagtccttccctgcaggcacgcaccatctggggcaggtggtctgcttttgtgtctctgtgtctgtgtttacagtgtttcttccacagggaatgcccattctgtgaattccctttgattcttaaggtgcagctcagtgatcctctcagattccgccaggcaggttttgcctacctagccgtcttgtaactcttttgtcacaagtctgttgtagcacttatcacatcctgccaccattgggtactcatcgtctcacccattatatctggatttctttaagggcagactgtattttacacagatttgtaccctctgtgtggcctaccatagtgtctgacacatagtgagtgctccatcaatatctgtgcaataattaaatgaatgaactgtgacagaagcaactaccacaggggcttcagaagctaaagaaggcccagcgcggtggctcacacctgtaatcccagcactttgggaggccatagcaggaggattgctcgagcccaggagtttgagaccagcctgggcaacatcatgagacgtcatctctaataaaaataaaaaattagccaggcatggtggcacatgcctgtggtcccaggtacttgagaggctgaggcaggaggatcccttgagcccagaaggttgaagctgcagtgagttgtgatcatgccactgtactccagcctgggcgacagcaagaccctgtctcaaaaaaaacacccagaggctaaagagtcaccttgtcttctctcgacttgttccctcacctattcatggctctcttcctactgtataaagcttgagaagaggccatccatcagatgccagggcggctcagagcttgttttgtgctcatgtgggtatgcatataacaggtgtctggccagtgaggtgagagagcttacacagggatgtcagcttcacagactggcaatcacttccgtaaagtctgtgtctcctaggggcatgtgctgagcttggcaaagcacgcagccccagactgcaggttgggaaggcctactctcagggaggtggctttgctgggttcaggtcagagcctctgggagagtaggattggatattggaccagggcagggtgtgggaacagagctggggtcagagtggttctcccagggccttcaagggctgggccaggccctggttggcccagtgccacctccatgcggatcagcagcccagggcgatgcacaggatgccagatccagggaagttcaagctcctggaacaggcccgggatgtgcgggagccagtgaggtacttcagcagcgtggaggaggtggccagtgtcttccctgaccgcatcttcgtgatggaagccatcaccttcagcgtcaaggtggtgtcgggcgagttcagcgaggacagcgaggtgtacaacttcacgctgcatgcgggcgacgagctcactcttatgggccaggcggagatcctgtgcgccaagaccaccaaggagcgctcgcgcttcaccaccctcctgcgaaagctgggccgggccggggcgctggccggggtgggcggcggcggcccagcgagcgcgggggccgcgggaggcactggcggcgggggcgccaggccggtcaaaggcaagatgccctgcctcatctgcatgaaccaccgcaccaacgaaagcctgagcctgccctttcagtgccagggccgcttcagcactcgcagcccgctggagctgcagatgcaagagggcgagcacacggtgcgcgccatcatcgagcgcgtgaggctgccggtgaacgtgctggtgcccagccggccgccgcgcaacccctacgacctgcacccggtgcgggagggtcattgctacaagctggttagcatcatctccaagacggtggtgctggggctggcgctgcgccgcgagggcccggcgccgctgcacttcctgctgctcacggacacgccgcgcttcgcgctgccgcagggcctgctggccggggacccgcgcgtcgagcgcctggtgcgcgacagcgcctcctactgccgcgagcgcttcgaccccgacgagtactccacggccgtgcgcgaggcgccagcggagctcgccgaagactgcgccagcccgcgccgcgcgcgcctctgcctgcccgcgccgcgcgcccccgggctcgcccgcgcccccggcccgctagcgccggctcccgccggcgagggcgaccaggagtacgtgagccccgactgggcagccgcgcccgagcccgccgcgccgcccgccgagatcccctacgaggagttgtgggcgcaccaggggcccgagggcctcgtccggccgcccccagggctcgatctcatctccttcggggccgcgggaccgccgcgtcgggagccggaagcgccgccgcctccagtccctcccaaatccgaggcggtgaaggaggagtgccgcctgctcaatgcccctccagtgcctccccggggtggcaatggcagcggccggctctccagcagccccccggttccccctcgcttccccaagctgcagccggtacattcccccagctccagcctctcctactactcctctggcctccaggatggggcgggttcccgcagtggcagtggctccccatcgccggacacctactccctctattgctacccatgcacctggggagactgcaaggaaccagtcctggagcccttcgatccctttgagctggggcagggcagttctccagagcctgagctgctgcgttctcaggagcccagagcagtggggacacctgggcctggaccccgcctttcaccacttggcccctccaaggcctttgagcctgaaggtttggtgctgcaccaggtccccaccccactgtcaccagctgctctgcagggacccgaggcgggaggagcactttttctaacccaagggcgcctggaagggcctcctgccagtccccgggatggagccacaggctttggagtccgagatgcctcctcctggcagccccctgctgacctgtctgcactctccctggaggaggtctctcgcagtctgcgtttcatcgggctctcagaggatgtggtgagcttctttgcccgagaacgcatcgatggtagcatctttgtgcagctcagtgaggacatcctggcagatgacttccacctcaccaagctgcaggtcaagaagatcatgcagttcatcaaaggctggaggcccaagatctgaactgcccagctggagctgcacagctggaatgctggtatgggggccccaggtacagcactccggaggagcaggtgctgcctgcaagaaggatctatgtcgagactgaggctgctcagcagccactgggtggatccaggggagatgcatgtggaaatgtggtcctctggggtcagacccctgcacgggacatcttgcctttgagtgtgcagagtacatggggaaggggctgggggcaccactgtgtacctgggcccagtaaggcatttgccgtgattcccacaacggggtcaaaagctggccttcagggtgacctaacaccacctcatgccctgctatagaccttcacaaacgacttccactgctgaagcctgtaggctctgtttagagacaagaagatggctggtaatttaagcaccgatttcccaagtgcccactctcctttgtgctctgttggcttttggcctaaagctgccccagagtgagggtgtagatgtctgtgtctgtgagatgcctttcccttccccctctgctccaccgtggttgaggggggtggggcctggccccgcacacaggtgagtcgtgtacaagcctaacccatggcacctcagaggctccacctgtgggtcctggttcatgggtgacaactttggaagagcacagctctgcaattgacccgacccacttatctagttaggaagccagacactgcccagatgactctagcaccctggcttctgctctgactttactgcagctagtcatccatccgtcaggtggcgttcagtctcagaatactgattccgtggaagagcaggttgatttaggtcagcttctccttgattctagaagcaagcggtagtcaaccacctccaattccgccaatctcttgcccccatcatttgtctctgacaatacttggtgtttttccctggttttctgtcactggcacaggagggtacagttgggagagtgcgttcctggagctcagtcctgcatttgttcacgtgcctcacagcaggcctttgtgcccttgaatctcaaacatggggatctgcttggtacccagagctctggtcattgtgtccaaccacacaccccaccccatccgtgtcctccatctcacccagaaccacagggtgcccactagtgtcagggcccaaagtgccagccttctcttctgccttacctagtctacctatttatttcctccactttttatcttaaaagtagctaagccatgctggtgcccatactccaagcaggctgcctcagctcagagaagtggtcagagagtagagcacagaacctgtgatgtggggacatttggttttcttgcagatcatttaatgaatcctcaaggactaatgaaataaatgctagactgctg

SEQ ID NO: 8215 - DNA, 273 bp, Homo sapiens
  source 1..273: mol_type = unassigned DNA; mol_type = unassigned DNA
gagccggaagcgccgccgcctccagtccctcccaaatccgaggcgggcgggttcccgcagtggcagtggctccccatcgccggacacctactccctctattgctacccatgcacctggggagactgcaaggtgggcgagtcctctagccgcccagcccccggtcccctaccctcaaccacacagcccagccaggcctcccgggccctcacagagcctctgagcggtcgagccgcctcccttctgggggctgacacccctgttaagacctacca

SEQ ID NO: 8216 - DNA, 905 bp, Homo sapiens
  source 1..905: mol_type = unassigned DNA; mol_type = unassigned DNA
tacctcccccttgatgggtggcgggatcccggagccaacgcagaccggacgtcggaacgccgctttagccccgggacagctgcccagcctccaggcccactgatggacccgttaacgaaggtgccttgtgggagtcagatagcacaaaccattctatggaaagcaaagtcgtctctctccttcggcatccagccccttcagacatggccaacgaaagaccctgaactagagtcccaggtcaacctctctgtctcggaagacctaggctgtagacgtggggatttcagtaggaaacattatggatctgtggagctgcttatttccagtgatgctgatggagccatccaaagggctggaagattcagagtggaaaatggctcttcagatgagaatgcaactgccctgcctggtacttggcgaagaacagacgtgcacttagagaacccagaataccacaccagatggtatttcaaatattttttaggacaagtccatcagaactacattggaaacgatgccgagaagagccctttcttcttgtccgtgaccctttctgaccaaaacaatcaacgtgtccctcaataccgtgcaattctttggagaaaaacaggtacccagaaaatatgccttccctacagtcccacaaaaactctttctgtgaagtccatcttaagtgccatgaatctggacaaatttgagaaaggccccagggaaatttttcatcctgaaatacaaaaggacttgctggttcttgaagaacaagagggctctgtgaatttcaagtttggggttctttttgccaaagatgggcagctcactgatgatgagatgttcagcaatgaaattggaagcgagccttttcaaaaatttttaaatcttctgggtgacacaatcactctaaaggg

SEQ ID NO: 8217 - DNA, 667 bp, Homo sapiens
  source 1..667: mol_type = unassigned DNA; mol_type = unassigned DNA
agagcagaactgagcaggcggtggagctgggtctggtccgggcacggagtgggggcttcgaagggaaaaggcggggctcctgggggcggagccatacctgtgggcgggacatgggaaaggagggcccgaggggcggagctacaatagaaagggccaggaggtgctgaggcgaggagaggccgaactccaagggacgacgctcgcggaagcagaggtttggggacagctgcccagcctccaggcccactgatggacccgttaacgaaggtgccttgtgggagtcagatagcacaaaccattctatggaaagcaaagtcgtctctctccttcggcatccagccccttcagacatggccaacgaaagaccctgaactagagtcccaggtcaacctctctgtctcggaagacctaggctgtagacgtggggatttcagtaggaaacattatggatctgtggagctgcttatttccagtgatgctgatggagccatccaaagggctggaagattcagagtggaaaatggctcttcagatgagaatgcaactgccctgcctggtacttggcgaagaacagacgtgcacttagagaacccagaataccacaccagatggtatttcaaatattttttaggacaagtccatcagaactacattggaaacgatgccg

SEQ ID NO: 8218 - DNA, 694 bp, Homo sapiens
  source 1..694: mol_type = unassigned DNA; mol_type = unassigned DNA
aggcggggctcctgggggcggagccatacctgtgggcgggacatgggaaaggagggcccgaggggcggagctacaatagaaagggccaggaggtgctgaggacagctgcccagcctccaggcccactgatggacccgttaacgaaggtgccttgtgggagtcagatagcacaaaccattctatggaaagcaaagtcgtctctctccttcggcatccagccccttcagacatggccaacgaaagaccctgaactagagtcccaggtcaacctcttatttccagtgatgctgatggagccatccaaagggctggaagattcagagtggaaaatggctcttcagatgagaatgcaactgccctgcctggtacttggcgaagaacagacgtgcacttagagaacccagaataccacaccagatggtatttcaaatattttttaggacaagtccatcagaactacattggaaacgatgccgagaagagccctttcttcttgtccgtgaccctttctgaccaaaacaatcaacgtgtccctcaataccgtgcaattctttggagaaaaacaggtacccagaaaatatgccttccctacagtcccacaaaaactctttctgtgaagtccatcttaagtgccatgaatctggacaaatttgagaaaggccccagggaaatttttcatcctgaaatacaaaag

SEQ ID NO: 8219 - DNA, 536 bp, Homo sapiens
  source 1..536: mol_type = unassigned DNA; mol_type = unassigned DNA
aggaggtgctgaggcgaggagaggccgaactccaagggacgacgctcgcggaagcagaggtttggggacagctgcccagcctccaggcccactgatggacccgttaacgaaggtgccttgtgggagtcagatagcacaaaccattctatggaaagcaaagtcgtctctctccttcggcatccagccccttcagacatggccaacgaaagaccctgaactagagtcccaggtcaacctgtaacttatttccagtgatgctgatggagccatccaaagggctggaagattcagagtggaaaatggctcttcagatgagaatgcaactgccctgcctggtacttggcgaagaacagacgtgcacttagagaacccagaataccacaccagatggtatttcaaatattttttaggacaagtccatcagaactacattggaaacgatgccgagaagagccctttcttcttgtccgtgaccctttctgaccaaaacaatcaacgtgtccctcaataccgtgcaattctttggagaaaaacag

SEQ ID NO: 8220 - DNA, 523 bp, Homo sapiens
  source 1..523: mol_type = unassigned DNA; mol_type = unassigned DNA
gcgcgagccgagcggccggccgaggcccgagcccacccgagtgcgcccgagcccgcggcccccgcccggggcgatggaaccggagcccggcggggtggccgctgcgctcctgcggcagaagagggcggcgctgcggcgcagggggtgcagcttcgagagcccaaggacagctgcccagcctccaggcccactgatggacccgttaacgaaggtgccttgtgggagtcagatagcacaaaccattctatggaaagcaaagtcgtctctctccttcggcatccagccccttcagacatggccaacgaaagaccctgaactagagtcccaggtcaacctctctgtctcggaagacctaggctgtagacgtggggatttcagtaggaaacattatggatctgtggagctgcttatttccagtgatgctgatggagccatccaaagggctggaagattcagagtggaaaatggctcttcagatgagaatgcaactgccctgcctggtacttggcgaagaacagacgtg

SEQ ID NO: 8221 - DNA, 653 bp, Homo sapiens
  source 1..653: mol_type = unassigned DNA; mol_type = unassigned DNA
agaagagggcggcgctgcggcgcagggggtgcagcttcgagagcccaaggacagctgcccagcctccaggcccactgatggacccgttaacgaaggtgccttgtgggagtcagatagcacaaaccattctatggaaagcaaagtcgtctctctccttcggcatccagccccttcagacatggccaacgaaagaccctgaactagagtcccaggtcaacctgtaactctgtctcggaagacctaggctgtagacgtggggatttcagtaggaaacattatggatctgtggagctgcttatttccagtgatgctgatggagccatccaaagggctggaagattcagagtggaaaatggctcttcagatgagaatgcaactgccctgcctggtacttggcgaagaacagacgtgcacttagagaacccagaataccacaccagatggtatttcaaatattttttaggacaagtccatcagaactacattggaaacgatgccgagaagagccctttcttcttgtccgtgaccctttctgaccaaaacaatcaacgtgtccctcaataccgtgcaattctttggagaaaaacaggtacccagaaaatatgccttccctacagtcccacaaaaactctttctgtgaagtccatcttaag

SEQ ID NO: 8222 - DNA, 577 bp, Homo sapiens
  source 1..577: mol_type = unassigned DNA; mol_type = unassigned DNA
gattggcggccggagggatggcaaagctgccacgcgcacgggggtgcaggctgcgggactgcgatcgctgccggataggaccagctctgtctcggaagacctaggctgtagacgtggggatttcagtaggaaacattatggatctgtggagctgcttatttccagtgatgctgatggagccatccaaagggctggaagattcagagtggaaaatggctcttcagatgagaatgcaactgccctgcctggtacttggcgaagaacagacgtgcacttagagaacccagaataccacaccagatggtatttcaaatattttttaggacaagtccatcagaactacattggaaacgatgccgagaagagccctttcttcttgtccgtgaccctttctgaccaaaacaatcaacgtgtccctcaataccgtgcaattctttggagaaaaacaggtacccagaaaatatgccttccctacagtcccacaaaaactctttctgtgaagtccatcttaagtgccatgaatctggacaaatttgagaaaggccccagggaaatttttcatcctgaaatacaaaag

SEQ ID NO: 8223 - DNA, 831 bp, Homo sapiens
  source 1..831: mol_type = unassigned DNA; mol_type = unassigned DNA
actagaagcaagaatgtagcctgggtaatatctggaacactttcaaactgcatgcattgatgtgttgcccattttcagctaagagagggaggactacaaaaggttaaatttctcatataagattaattcagccatctctgtgaaatggtggaagcagaatgccattagactctctaatctcatttctctcatgctgtctttcttggagcctgtcaaacagtgtcctggcagagagtcagttctctggttgctaaacatcagagtcagtctctttctgcatgtgccaagagggctgtaatttagaaaatgcaacctaccttttaaggaaggatgaaaagctctgtctcggaagacctaggctgtagacgtggggatttcagtaggaaacattatggatctgtggagctgcttatttccagtgatgctgatggagccatccaaagggctggaagattcagagtggaaaatggctcttcagatgagaatgcaactgccctgcctggtacttggcgaagaacagacgtgcacttagagaacccagaataccacaccagatggtatttcaaatattttttaggacaagtccatcagaactacattggaaacgatgccgagaagagccctttcttcttgtccgtgaccctttctgaccaaaacaatcaacgtgtccctcaataccgtgcaattctttggagaaaaacaggtacccagaaaatatgccttccctacagtcccacaaaaactctttctgtgaagtccatcttaagtgccatgaatctggacaaatttgagaaaggccccagggaaatttttcatcctgaaatacaaaag

SEQ ID NO: 8224 - DNA, 578 bp, Homo sapiens
  source 1..578: mol_type = unassigned DNA; mol_type = unassigned DNA
attcaggatgaaaacgtagtaacaattttgcccttgttttaattactcttcaacaacatgtgatttttgaaatctgatttaagcctttttgggggctctgtctcggaagacctaggctgtagacgtggggatttcagtaggaaacattatggatctgtggagctgcttatttccagtgatgctgatggagccatccaaagggctggaagattcagagtggaaaatggctcttcagatgagaatgcaactgccctgcctggtacttggcgaagaacagacgtgcacttagagaacccagaataccacaccagatggtatttcaaatattttttaggacaagtccatcagaactacattggaaacgatgccgagaagagccctttcttcttgtccgtgaccctttctgaccaaaacaatcaacgtgtccctcaataccgtgcaattctttggagaaaaacaggtacccagaaaatatgccttccctacagtcccacaaaaactctttctgtgaagtccatcttaagtgccatgaatctggacaaatttgagaaaggccccagggaaatttttcatcctga

SEQ ID NO: 8225 - DNA, 554 bp, Homo sapiens
  source 1..554: mol_type = unassigned DNA; mol_type = unassigned DNA
atttttatgttgcatatttgggacaaagagctctcttaaatgaaagataattgcaagatccggttcagcagctttgtcccttgcctcaagtttactgcagggcttctctcctctctggttatacagaaatgaaattataaaccaccagtaaccttggaaatttcaatcgattccaaatgactaaatatttaattgaatcattgcctatacttccagggatgactctggcgtttgctttttattgagggctccatgaaagccaggctctgcaatggctgctggggactgtgtctgttgcaaggaggctcccctgcagtgaggagccggggcactgcaagtctgttccatagcagccctttttgcaaatgctctgtctcggaagacctaggctgtagacgtggggatttcagtaggaaacattatggatctgtggagctgcttatttccagtgatgctgatggagccatccaaagggctggaagattcagagtggaaaatggctcttcagatgagaatgcaactgccctgcctggtacttggcgaagaacagacgt

SEQ ID NO: 8226 - DNA, 3800 bp, Homo sapiens
  source 1..3800: mol_type = unassigned DNA; mol_type = unassigned DNA
atatttgggacaaagagctctcttaaatgaaagataattgcaagatccggttcagcagctttgtcccttgcctcaagtttactgcagggcttctctcctctctggttatacagaaatgaaattataaaccaccagtaaccttggaaatttcaatcgattccaaatgactaaatatttaattgaatcattgcctatacttccagggatgactctggcgtttgctttttattgagggctccatgaaagccaggctctgcaatggctgctggggactgtgtctgttgcaaggaggctcccctgcagtgaggagccggggcactgcaagtctgttccatagcagccctttttgcaaatggtagttgatttttgcagaaggtttgtggccagatcgctatgtataatactgatgaagcatttttgttccagctctgtctcggaagacctaggctgtagacgtggggatttcagtaggaaacattatggatctgtggagctgcttatttccagtgatgctgatggagccatccaaagggctggaagattcagagtggaaaatggctcttcagatgagaatgcaactgccctgcctggtacttggcgaagaacagacgtgcacttagagaacccagaataccacaccagatggtatttcaaatattttttaggacaagtccatcagaactacattggaaacgatgccgagaagagccctttcttcttgtccgtgaccctttctgaccaaaacaatcaacgtgtccctcaataccgtgcaattctttggagaaaaacaggtacccagaaaatatgccttccctacagtcccacaaaaactctttctgtgaagtccatcttaagtgccatgaatctggacaaatttgagaaaggccccagggaaatttttcatcctgaaatacaaaaggacttgctggttcttgaagaacaagagggctctgtgaatttcaagtttggggttctttttgccaaagatgggcagctcactgatgatgagatgttcagcaatgaaattggaagcgagccttttcaaaaatttttaaatcttctgggtgacacaatcactctaaagggctggacgggctaccgtggcggtctggataccaaaaatgataccacagggatacattcagtttatactgtgtaccaagggcatgagatcatgtttcatgtttccaccatgttgccatattccaaagagaacaaacagcaggtggaaaggaaacgccacattggaaacgatatcgtcaccattgtgttccaagaaggagaggaatcttctcctgcctttaagccttccatgatccgctcccactttacacatatttttgccttagtgagatacaatcaacaaaatgacaattacaggctgaaaatattttcagaagagagcgtaccactctttggccctcccttgccaactccaccagtgtttacagaccaccaggaattcagggactttttgctagtgaaattaattaatggtgaaaaagccactttggaaaccccaacatttgcccagaaacgtcggcgtaccctggatatgttgattagatctttacaccaggatttgatgccagatttgcataagaacatgcttaatagacgatcttttagtgatgtcttaccagagtcacccaagtcagcgcggaagaaagaggaggcccgccaggcggagtttgttagaatagggcaggcactaaaactgaaatccattgtgagaggggatgctccatcaagcttggcagcttcagggatctgtaaaaaagagccgtgggagccccagtgtttctgcagtaatttccctcatgaagccgtgtgtgcagatccctggggccaggccttgctggtttccactgatgctggcgtcttgctagtggatgatgaccttccatcagtgcccgtgtttgacagaactctgccagtgaagcaaatgcatgtgcttgagaccctggaccttctggttctcagagcagacaaaggaaaagatgctcgcctctttgtcttcaggctaagtgctctgcaaaagggccttgaggggaagcaggctgggaagagcaggtctgactgcagagaaaacaagttggagaaaacaaaaggctgccacctgtatgctattaacactcaccacagcagagagctgaggattgtggttgcaattcggaataaactgcttctgatcacaagaaaacacaacaagccaagcggggtcaccagcacctcattgttatctcccctgtctgagtcacctgttgaagaattccagtacatcagggagatctgtctgtctgactctcccatggtgatgaccttagtggatgggccagctgaagagagtgacaatctcatctgtgtggcttatcgacaccaatttgatgtggtgaatgagagcacaggagaagccttcaggctgcaccacgtggaggccaacagggttaattttgttgcagctattgatgtgtacgaagatggagaagctggtttgctgttgtgttacaactacagttgcatctataaaaaggtttgcccctttaatggtggctcttttttggttcaaccttctgcgtcagatttccagttctgttggaaccaggctccctatgcaattgtctgtgctttcccgtatctcctggccttcaccaccgactccatggagatccgcctggtggtgaacgggaacctggtccacactgcagtcgtgccgcagctgcagctggtggcctccaggtcggatatatacttcacagcaactgcagctgtgaatgaggtctcatctggaggcagctccaagggggccagtgcccgaaattctcctcagacacccccgggccgagatactccagtatttccttcttccctgggggaaggtgaaattcaatcaaaaaatctgtacaagattccacttagaaacctcgtgggcagaagcatcgaacgacctctgaagtcacccttagtctccaaggtcatcaccccacccactcccatcagtgtgggccttgctgccattccagtcacgcactccttgtccctgtctcgcatggagatcaaagaaatagcaagcaggacccgcagggaactactgggcctctcggatgaaggtggacccaagtcagaaggagcgccaaaggccaaatcaaaaccccggaagcggttagaagaaagccaaggaggccccaagccaggggcagtgaggtcatctagcagtgacaggatcccatcaggctccttggaaagtgcttctacttccgaagccaaccctgaggggcactcagccagctctgaccaggaccctgtggcagacagagagggcagcccggtctccggcagcagccccttccagctcacggctttctccgatgaagacattatagacttgaagtaacagagttgaatctcatttgccatctttagttttcttatggaggtttatactctttaaacagttctgatgtaatttctcaacaaaatgtggcttttagcctgtcagtgatctattggaccaaaccttctgcacactcggccagttccctctccaatgtccggtgccatctttcctgacctttgtttctttctgttcaggaaccatcagtccccttgtaataaaggtggtagatttcattgaggttttagattgaaactttgaataaatcaaaaatactcattcttatttactgcaaccttctcatattttatatacttagatggaaaattattttttcattacagttttgatttatgtcacataatgtgtttcttttataaagaaaagtcgttgctttttaacttta

SEQ ID NO: 8227 - DNA, 3143 bp, Homo sapiens
  source 1..3143: mol_type = unassigned DNA; mol_type = unassigned DNA
ataatactgatgaagcatttttgttccagctctgtctcggaagacctaggctgtagacgtggggatttcagtaggaaacattatggatctgtggagctgcttatttccagtgatgctgatggagccatccaaagggctggaagattcagagtggaaaatggctcttcagatgagaatgcaactgccctgcctggtacttggcgaagaacagacgtgcacttagagaacccagaataccacaccagatggtatttcaaatattttttaggacaagtccatcagaactacattggaaacgatgccgagaagagccctttcttcttgtccgtgaccctttctgaccaaaacaatcaacgtgtccctcaataccgtgcaattctttggagaaaaacaggtacccagaaaatatgccttccctacagtcccacaaaaactctttctgtgaagtccatcttaagtgccatgaatctggacaaatttgagaaaggccccagggaaatttttcatcctgaaatacaaaaggacttgctggttcttgaagaacaagagggctctgtgaatttcaagtttggggttctttttgccaaagatgggcagctcactgatgatgagatgttcagcaatgaaattggaagcgagccttttcaaaaatttttaaatcttctgggtgacacaatcactctaaagggctggacgggctaccgtggcggtctggataccaaaaatgataccacagggatacattcagtttatactgtgtaccaagggcatgagatcatgtttcatgtttccaccatgttgccatattccaaagagaacaaacagcaggtggaaaggaaacgccacattggaaacgatatcgtcaccattgtgttccaagaaggagaggaatcttctcctgcctttaagccttccatgatccgctcccactttacacatatttttgccttagtgagatacaatcaacaaaatgacaattacaggctgaaaatattttcagaagagagcgtaccactctttggccctcccttgccaactccaccagtgtttacagaccaccaggaattcagggactttttgctagtgaaattaattaatggtgaaaaagccactttggaaaccccaacatttgcccagaaacgtcggcgtaccctggatatgttgattagatctttacaccaggatttgatgccagatttgcataagaacatgcttaatagacgatcttttagtgatgtcttaccagagtcacccaagtcagcgcggaagaaagaggaggcccgccaggcggagtttgttagaatagggcaggcactaaaactgaaatccattgtgagaggggatgctccatcaagcttggcagcttcagggatctgtaaaaaagagccgtgggagccccagtgtttctgcagtaatttccctcatgaagccgtgtgtgcagatccctggggccaggccttgctggtttccactgatgctggcgtcttgctagtggatgatgaccttccatcagtgcccgtgtttgacagaactctgccagtgaagcaaatgcatgtgcttgagaccctggaccttctggttctcagagcagacaaaggaaaagatgctcgcctctttgtcttcaggctaagtgctctgcaaaagggccttgaggggaagcaggctgggaagagcaggtctgactgcagagaaaacaagttggagaaaacaaaaggctgccacctgtatgctattaacactcaccacagcagagagctgaggattgtggttgcaattcggaataaactgcttctgatcacaagaaaacacaacaagccaagcggggtcaccagcacctcattgttatctcccctgtctgagtcacctgttgaagaattccagtacatcagggagatctgtctgtctgactctcccatggtgatgaccttagtggatgggccagctgaagagagtgacaatctcatctgtgtggcttatcgacaccaatttgatgtggtgaatgagagcacaggagaagccttcaggctgcaccacgtggaggccaacagggttaattttgttgcagctattgatgtgtacgaagatggagaagctggtttgctgttgtgttacaactacagttgcatctataaaaaggtttgcccctttaatggtggctcttttttggttcaaccttctgcgtcagatttccagttctgttggaaccaggctccctatgcaattgtctgtgctttcccgtatctcctggccttcaccaccgactccatggagatccgcctggtggtgaacgggaacctggtccacactgcagtcgtgccgcagctgcagctggtggcctccagggtgaaattcaatcaaaaaatctgtacaagattccacttagaaacctcgtgggcagaagcatcgaacgacctctgaagtcacccttagtctccaaggtcatcaccccacccactcccatcagtgtgggccttgctgccattccagtcacgcactccttgtccctgtctcgcatggagatcaaagaaatagcaagcaggacccgcagggaactactgggcctctcggatgaaggtggacccaagtcagaaggagcgccaaaggccaaatcaaaaccccggaagcggttagaagaaagccaaggaggccccaagccaggggcagtgaggtcatctagcagtgacaggatcccatcaggctccttggaaagtgcttctacttccgaagccaaccctgaggggcactcagccagctctgaccaggaccctgtggcagacagagagggcagcccggtctccggcagcagccccttccagctcacggctttctccgatgaagacattatagacttgaagtaacagagttgaatctcatttgccatctttagttttcttatggaggtttatactctttaaacagttctgatgtaatttctcaacaaaatgtggcttttagcctgtcagtgatctattggaccaaaccttctgcacactcggccagttccctctccaatgtccggtgccatctttcctgacctttgtttctttctgttcaggaaccatcagtccccttgtaataaaggtggtagatttcattgaggttttagattgaaactttgaataaatcaaaaatactcattctta

SEQ ID NO: 8228 - DNA, 549 bp, Homo sapiens
  source 1..549: mol_type = unassigned DNA; mol_type = unassigned DNA
attatggatctgtggagctgcttatttccagtgatgctgatggagccatccaaagggctggaagattcagagtggaaaatggctcttcagatgagaatgcaactgccctgcctggtacttggcgaagaacagacgtgcacttagagaacccagaataccacaccagatggtatttcaaatattttttaggacaagtccatcagaactacattggaaacgatgccgagaagagccctttcttcttgtccgtgaccctttctgaccaaaacaatcaacgtgtccctcaataccgtgcaattctttggagaaaaacaggtacccagaaaatatgccttccctacagtcccacaaaaactctttctgtgaagtccatcttaagtgccatgaatctggacaaatttgagaaaggccccagggaaatttttcatcctgaaatacaaaaggctgaaaatattttcagaagagagcgtaccactctttggccctcccttgccaactccaccagtgtttacagaccaccaggaattcagggactttttgctagtgaaa

SEQ ID NO: 8229 - DNA, 737 bp, Homo sapiens
  source 1..737: mol_type = unassigned DNA; mol_type = unassigned DNA
agggctggacaccacctgcagtgtcctctaccatctgtggctggcaggatcagttgcattctcactgttctaaacctttcttttccagtccatcagaactacattggaaacgatgccgagaagagccctttcttcttgtccgtgaccctttctgaccaaaacaatcaacgtgtccctcaataccgtgcaattctttggagaaaaacaggtacccagaaaatatgccttccctacagtcccacaaaaactctttctgtgaagtccatcttaagtgccatgaatctggacaaatttgagaaaggccccagggaaatttttcatcctgaaatacaaaaggacttgctggttcttgaagaacaagagggctctgtgaatttcaagtttggggttctttttgccaaagatgggcagctcactgatgatgagatgttcagcaatgaaattggaagcgagccttttcaaaaatttttaaatcttctgggtgacacaatcactctaaagggctggacgggctaccgtggcggtctggataccaaaaatgataccacagggatacattcagtttatactgtgtaccaagggcatgagatcatgtttcatgtttccaccatgttgccatattccaaagagaacaaacagcaggtggaaaggaaacgccacattggaaacgatatcgtcaccattgtgttccaagaaggagaggaatcttctcctgcctttaagccttccatgatccg

SEQ ID NO: 8230 - DNA, 569 bp, Homo sapiens
  source 1..569: mol_type = unassigned DNA; mol_type = unassigned DNA
tgatgccagatttgcataagaacatgcttaatagacgatcttttagtgatgtcttaccagagtcacccaagtcagcgcggaagaaagaggaggcccgccaggcggagtttgttagaatagggcaggcactaaaactgaaatccattgtgagaggggatgctccatcaagcttggcagcttcagggatctgtaaaaaagagatgaccttccatcagtgcccgtgtttgacagaactctgccagtgaagcaaatgcatgtgcttgagaccctggaccttctggttctcagagcagacaaaggaaaagatgctcgcctctttgtcttcaggctaagtgctctgcaaaagggccttgaggggaagcaggctgggaagagcaggtctgactgcagagaaaacaagttggagaaaacaaaaggctgccacctgtatgctattaacactcaccacagcagagagctgaggattgtggttgcaattcggaataaactgcttctgatcacaagaaaacacaacaagccaagcggggtcaccagcacctcattgttatctcccctgtctgagtcacctg

SEQ ID NO: 8231 - DNA, 639 bp, Homo sapiens
  source 1..639: mol_type = unassigned DNA; mol_type = unassigned DNA
ggtacaaccctagtaaaaattggtattgagagatgttgctttttctttgatgaacaaaaatagcgttttcatgcctctgctgctacgccccctatatagagttcgggatatagaattgcctatgggaagaaagcatcagtacttcttcctgagctaggaggagaatagtgcttgaatgtattttgtagagcttatgaaagccctagaagctgacttccttccttgcctagagataacttgggttcaaaactacccacaggcacgtttggtgggttctggaaagcgtgggctgggttgcagtgatgggtaaccaggtttccttttccagatgaccttccatcagtgcccgtgtttgacagaactctgccagtgaagcaaatgcatgtgcttgagaccctggaccttctggttctcagagcagacaaaggaaaagatgctcgcctctttgtcttcaggctaagtgctctgcaaaagggccttgaggggaagcaggctgggaagagcaggtctgactgcagagaaaacaagttggagaaaacaaaaggctgccacctgtatgctattaacactcaccacagcagagagctgaggattgtggttgcaattcggaataaactgcttctgatcacaagaaaacac

SEQ ID NO: 8232 - DNA, 488 bp, Homo sapiens
  source 1..488: mol_type = unassigned DNA; mol_type = unassigned DNA
tatgctattaacactcaccacagcagagagctgaggattgtggttgcaattcggaataaactgcttctgatcacaagaaaacacaacaagccaagcggggtcaccagcacctcattgttatctcccctgtctgagtcacctgttgaagaattccagtacatcagggagatctgtctgtctgactctcccatggtgatgaccttagtggatgggccagctgaagagagtgacaatctcatctgtgtggcttatcgacaccaatttgatgtggtgaatgagagcacaggagaagccttcaggctgcaccacgtggaggccaacagggttaattttgttgcagctattgatgtgtacgaagatggagaagctggtttgctgttgtgttacaactcttcccagcagcaagcaccagccttccacggcaacacggtatcttcgtgcagctttcctgtttacactactgcttttttattaaatggtgttcagtt

SEQ ID NO: 8233 - DNA, 1859 bp, Homo sapiens
  source 1..1859: mol_type = unassigned DNA; mol_type = unassigned DNA
attcggaataaactgcttctgatcacaagaaaacacaacaagccaagcggggtcaccagcacctcattgttatctcccctgtctgagtcacctgttgaagaattccagtacatcaggactagggtacattaaggtatggaatatatctagcattggccactaagatggagtatttctactggagagctgagaaggagatctgtctgtctgactctcccatggtgatgaccttagtggatgggccagctgaagagagtgacaatctcatctgtgtggcttatcgacaccaatttgatgtggtgaatgagagcacaggagaagccttcaggctgcaccacgtggaggccaacaggcagggtcagtgttctcatgatgcctgctttacagacgaagacctaaggccagaggctaagccatttgccacacaccacagaggcaaaactgaggcccagagagaggagtttgccccagaccacggaactaggtgttctgacacccttttcattgcaccatgctgcctctcttgacatgaagaacagagaaagaataaagtgtgaagacatgccgtggcgattttaaggtgcacagactttatctgttggaggcagaaggatgcctcgctggaggttaattttgttgcagctattgatgtgtacgaagatggagaagctggtttgctgttgtgttacaactacagttgcatctataaaaaggtttgcccctttaatggtggctcttttttggttcaaccttctgcgtcagatttccagttctgttggaaccaggctccctatgcaattgtctgtgctttcccgtatctcctggccttcaccaccgactccatggagatccgcctggtggtgaacgggaacctggtccacactgcagtcgtgccgcagctgcagctggtggcctccaggtcggatatatacttcacagcaactgcagctgtgaatgaggtctcatctggaggcagctccaagggggccagtgcccgaaattctcctcagacacccccgggccgagatactccagtatttccttcttccctgggggaaggtgaaattcaatcaaaaaatctgtacaagattccacttagaaacctcgtgggcagaagcatcgaacgacctctgaagtcacccttagtctccaaggtcatcaccccacccactcccatcagtgtgggccttgctgccattccagtcacgcactccttgtccctgtctcgcatggagatcaaagaaatagcaagcaggacccgcagggaactactgggcctctcggatgaaggtggacccaagtcagaaggagcgccaaaggccaaatcaaaaccccggaagcggttagaagaaagccaaggaggccccaagccaggggcagtgaggtcatctagcagtgacaggatcccatcaggctccttggaaagtgcttctacttccgaagccaaccctgaggggcactcagccagctctgaccaggaccctgtggcagacagagagggcagcccggtctccggcagcagccccttccagctcacggctttctccgatgaagacattatagacttgaagtaacagagttgaatctcatttgccatctttagttttcttatggaggtttatactctttaaacagttctgatgtaatttctcaacaaaatgtggcttttagcctgtcagtgatctattggaccaaaccttctgcacactcggccagttccctctccaatgtccggtgccatctttcctgacctttgtttctttctgttcaggaaccatcagtccccttgtaataaaggtggtagatttcattgaggttttagattgaaactttgaataaatcaaaaatactcattctta

SEQ ID NO: 8234 - DNA, 4816 bp, Homo sapiens
  source 1..4816: mol_type = unassigned DNA; mol_type = unassigned DNA
attgccacgtctgtctgcctgtcagcacagcgttggagccccttggtagacttacttgatgccaagtacccccctggtgtctgtggtcattgtgcatagatcttggtctaaaaggctgcctgaacttcctccatacgtgtcaccactgccaccctccctcaccccaccccaaacacacacacaggccttatctctaaactaaaagcctgtctagttccacctttcccactgcagtcaaccctcccataattataataattgtggccatcactgaatggccacctctgtgtaccaggccctgggtcagagcatgtcataagcgttatgtcttggaaggggctcttcatttctccttttttttttttttttttttgagacagagtttcgctcttgtaccccaggctggagtgcaaggcacgatcttggctcactgcaacctccacctcccaggttcaagcgattctcctgcctcagcctcccaagtaactgggattaggtgcccaccaccacacccgactaatttttttttttttttgtatttttagtagagacagggttttgccatgctagccaggcttgtcctgaactcctgacttcaggcccacctcggcctcccaaagtgctgggattacaggcatgagccaccatgcctggcacatttctccatttttattgaaaaggatactgaagtcagaaagaagaagtcacttacttaccccagagcacacagctagtaagtggcagaggcaggacttggaccccagctggctgactccagagaccatgttcccacagctggtggggatagcaggtccagccacaaagctggtagcactcggcccctcccgtggagaagctcccagtctggcagagcagacacggtgcagcacaaagcctctagctgagatagtgaagtaaaactaacatgtacagggacatctgaggaggaagggattttaagtcaaagtggtggggccaggaaggctcctttctggggtcagaggagactccaggaccatccttcatgtaatatacccattggtgctggttccttatctaaataaaggtatcagccaacattgagcatttaccgagctccaggccctgtgctaggtgcttagataagttacctcctggagtcctcaagccagtaggcctagatactcttattttctaccatcttacaaacgaagaaactgaaggtccgagaggggaaacaactggcgtgagtgcgcatgcctctgaagtgatggagctgggatttcatttactcacttgcccatccgatgagtttattctatccctgccacccgccaggccctgatctggatgatgaggggccagcagtgagcagcacagacaggcctttgcgtcatgagccttagatctcatggggaggggagccacagggaacaaacagacaagagagcaccagagggtgagggacactctgcagagagcctaaaacacagggcatgataggagccatggggattattttggatttgacaacccccgggtctgtccaatgccagtgctggagctcttggccactggtcctcactgtcactccctgctgagctcctgcaacttttggttgaggcatttgccccattataccttgttttatgtacttatgtgcttttctggttttttttcttaaggggtcaacctcaccttattcttttctgtatcctagtggcactgaatacagtgctagataatgacagatgggagagagctggggattccattggaaggggcacccaagcccaggcagtggcactggctgaggatggccagttggggccttggcaccataatgagaccttttagaggtgaaggctgtgttctggtgacaccagtgaagagaagggtcagccagtgcagggccagtgggaggagcacagtgtggacggaagggctgggacagaggagccagcaggagcccacaacatggtgctcctgtgaggaggtcagggcttagcctagaacagcagcaggggcacaaaaaaacacctgagaaactgtatgaagaggctgctgctggacttgggttggaggtggccctgagactttgagaatagttatgctaacaaaaaggaggagttttagaaggaaagctggttgtgtgggagataaaaagccaatagccttcactgagtgctcatcatgcatgaggccctgtgctaaaatctctgccttgtctcactgaattcccattacaatccagcagggtcagtgttctcatgatgcctgctttacagacgaagacctaaggccagaggctaagccatttgccacacaccacagaggcagtaagtggcctagacagggcttgatctcccatctgtctgcccagtctgtgcccctccaaccaccccacccccaatccactacctcctgcttttaatgacttggatgtggaatcagttacatctgagaacaaacgacatagtctaggggctgcagccctggggagaatgtgtgcctgagcccgtgaatttagggttttgggcacaaagcaaaatttggagctatagaagtggggttttactaaggagagaagagccaagaaattgaagaataatctgaggtgggagagagggcaggaggcagaagatgtcacccatcagaggctgcagagggcaggatggatagatgagcagaggccaaggccttcggttggggagaaggagatcttggctgagctcaaagggtggttttcctggaagcacaggaggccaggctctaagggttgagaatacaagtgaggaagtgaaaggagcaggaggctcttagagggctggagttttgaaaatcaagaaggaccaaggacaccatcaggttgagtgccctcctctcaaatgcagaaactgaggcccagagagaggagtttgccccagaccacggaactaggtgttctgacacccttttcattgcaccatgctgcctctcttgacatgaagaacagagaaagaataaagtgtgaagacatgccgtggcgattttaaggtgcacagactttatctgttggaggcagaaggatgcctcgctggaggtacgagagcggtaaggttgaaagagaaccagaacattagttcagatgttggctgtggcgtgtaccagtcaagggacttaagtgacttcaccctgagcctcactttcatcttctgtaaaatgataattataccataatgtcaataatattaggttgatgcaaaagtaattgcagtttttgccattggaaataatggcatataaacctgaggcatttcaatagagagaggagacataccaaacacagagcttctcaacggctatgaaaagatgatgagaaagtcccagagaagaaagaatggagagacttttctttcttttttttcttttcttttctttctcacttccattgtattataatcccagcccccaatgtgcattgtgggtgctggtggggcagacatgaccctatggcacctgcatgacagagggcctcggcctccacaaatgctcacaacttgtaaaagtcttttcacagggtcagcatccagcctgcccactaccgttgcccgttatcattgcaggttaattttgttgcagctattgatgtgtacgaagatggagaagctggtttgctgttgtgttacaactacagttgcatctataaaaaggtttgcccctttaatggtggctcttttttggttcaaccttctgcgtcagatttccagttctgttggaaccaggctccctatgcaattgtctgtgctttcccgtatctcctggccttcaccaccgactccatggagatccgcctggtggtgaacgggaacctggtccacactgcagtcgtgccgcagctgcagctggtggcctccaggtcggatatatacttcacagcaactgcagctgtgaatgaggtctcatctggaggcagctccaagggggccagtgcccgaaattctcctcagacacccccgggccgagatactccagtatttccttcttccctgggggaaggtgaaattcaatcaaaaaatctgtacaagattccacttagaaacctcgtgggcagaagcatcgaacgacctctgaagtcacccttagtctccaaggtcatcaccccacccactcccatcagtgtgggccttgctgccattccagtcacgcactccttgtccctgtctcgcatggagatcaaagaaatagcaagcaggacccgcagggaactactgggcctctcggatgaaggtggacccaagtcagaaggagcgccaaaggccaaatcaaaaccccggaagcggttagaagaaagccaaggaggccccaagccaggggcagtgaggtcatctagcagtgacaggatcccatcaggctccttggaaagtgcttctacttccgaagccaaccctgaggggcactcagccagctctgaccaggaccctgtggcagacagagagggcagcccggtctccggcagcagccccttccagctcacggctttctccgatgaagacattatagacttgaagtaacagagttgaatctcatttgccatctttagttttcttatggaggtttatactctttaaacagttctgatgtaatttctcaacaaaatgtggcttttagcctgtcagtgatctattggaccaaaccttctgcacactcggccagttccctctccaatgtccggtgccatctttcctgacctttgtttctttctgttcaggaaccatcagtccccttgtaataaaggtggtagatttcattgaggttttagattgaaactttgaataaatcaaaaatactcattctt

SEQ ID NO: 8235 - DNA, 304 bp, Homo sapiens
  source 1..304: mol_type = unassigned DNA; mol_type = unassigned DNA
gggccagtggatgcaaggcctagaacaccaggcagcccggtaatgctctctcttcctttctagtcggatatatacttcacagcaactgcagctgtgaatgaggtctcatctggaggcagctccaagggggccagtgcccgaaattctcctcagacacccccgggccgagatactccagtatttccttcttccctgggggaaggtgaaattcaatcaaaaaatctgtacaagattccacttagaaacctcgtgggcagaagcatcgaacgacctctgaagtcacccttagtctccaaggtcatca

SEQ ID NO: 8236 - DNA, 887 bp, Homo sapiens
  source 1..887: mol_type = unassigned DNA; mol_type = unassigned DNA
aacagtagtgggttttgaaagctaaaagaatagagtcatcaagcctagacattccccagcacatgcagtctttcactctatctggctttgcccgcaaaccccagaggcctctgctgtggttacctcatcgctttgaacacagcgcttttcataaattcttaccacatcactcatctttattgcacgcagttaagataaagcacagaattccccaagcagggcagctttttgcttttcttgtctagtcttttttcctgtgcagtcacgagtgcattttacctaatttacacatgaaaatgctcttagaaaacgcaaagccatcaggcaccctcaaatcagtgctcctggccagccctcccagtgggacattacagatcagtgtgtgacataacgtcttccttcatgctatgttaaggaacaagaaattactctcttgtaaataatgtgcacttttcttaaagttctgatgttctttttgaaatcacatttcaggtgaaattcaatcaaaaaatctgtacaagattccacttagaaacctcgtgggcagaagcatcgaacgacctctgaagtcacccttagtctccaaggtcatcaccccacccactcccatcagtgtgggccttgctgccattccagtcacgcactccttgtccctgtctcgcatggagatcaaagaaatagcaagcaggacccgcagggaactactgggcctctcggatgaaggtggacccaagtcagaaggagcgccaaaggccaaatcaaaaccccggaagcggttagaagaaagccaaggaggccccaagccaggggcagtgaggtcatctagcagtgacaggatcccatcaggctccttggaaagtgcttctacttccgaagccaaccctgag

SEQ ID NO: 8237 - DNA, 3599 bp, Homo sapiens
  source 1..3599: mol_type = unassigned DNA; mol_type = unassigned DNA
actagaagcaagaatgtagcctgggtaatatctggaacactttcaaactgcatgcattgatgtgttgcccattttcagctaagagagggaggactacaaaaggttaaatttctcatataagattaattcagccatctctgtgaaatggtggaagcagaatgccattagactctctaatctcatttctctcatgctgtctttcttggagcctgtcaaacagtgtcctggcagagagtcagttctctggttgctaaacatcagagtcagtctctttctgcatgtgccaagagggctgtaatttagaaaatgcaacctaccttttaaggaaggatgaaaagctctgtctcggaagacctaggctgtagacgtggggatttcagtaggaaacattatggatctgtggagctgcttatttccagtgatgctgatggagccatccaaagggctggaagattcagagtggaaaatggctcttcagatgagaatgcaactgccctgcctggtacttggcgaagaacagacgtgcacttagagaacccagaataccacaccagatggtatttcaaatattttttaggacaagtccatcagaactacattggaaacgatgccgagaagagccctttcttcttgtccgtgaccctttctgaccaaaacaatcaacgtgtccctcaataccgtgcaattctttggagaaaaacaggtacccagaaaatatgccttccctacagtcccacaaaaactctttctgtgaagtccatcttaagtgccatgaatctggacaaatttgagaaaggccccagggaaatttttcatcctgaaatacaaaaggacttgctggttcttgaagaacaagagggctctgtgaatttcaagtttggggttctttttgccaaagatgggcagctcactgatgatgagatgttcagcaatgaaattggaagcgagccttttcaaaaatttttaaatcttctgggtgacacaatcactctaaagggctggacgggctaccgtggcggtctggataccaaaaatgataccacagggatacattcagtttatactgtgtaccaagggcatgagatcatgtttcatgtttccaccatgttgccatattccaaagagaacaaacagcaggtggaaaggaaacgccacattggaaacgatatcgtcaccattgtgttccaagaaggagaggaatcttctcctgcctttaagccttccatgatccgctcccactttacacatatttttgccttagtgagatacaatcaacaaaatgacaattacaggctgaaaatattttcagaagagagcgtaccactctttggccctcccttgccaactccaccagtgtttacagaccaccaggaattcagggactttttgctagtgaaattaattaatggtgaaaaagccactttggaaaccccaacatttgcccagaaacgtcggcgtaccctggatatgttgattagatctttacaccaggatttgatgccagatttgcataagaacatgcttaatagacgatcttttagtgatgtcttaccagagtcacccaagtcagcgcggaagaaagaggaggcccgccaggcggagtttgttagaatagggcaggcactaaaactgaaatccattgtgagaggggatgctccatcaagcttggcagcttcagggatctgtaaaaaagagccgtgggagccccagtgtttctgcagtaatttccctcatgaagccgtgtgtgcagatccctggggccaggccttgctggtttccactgatgctggcgtcttgctagtggatgatgaccttccatcagtgcccgtgtttgacagaactctgccagtgaagcaaatgcatgtgcttgagaccctggaccttctggttctcagagcagacaaaggaaaagatgctcgcctctttgtcttcaggctaagtgctctgcaaaagggccttgaggggaagcaggctgggaagagcaggtctgactgcagagaaaacaagttggagaaaacaaaaggctgccacctgtatgctattaacactcaccacagcagagagctgaggattgtggttgcaattcggaataaactgcttctgatcacaagaaaacacaacaagccaagcggggtcaccagcacctcattgttatctcccctgtctgagtcacctgttgaagaattccagtacatcagggagatctgtctgtctgactctcccatggtgatgaccttagtggatgggccagctgaagagagtgacaatctcatctgtgtggcttatcgacaccaatttgatgtggtgaatgagagcacaggagaagccttcaggctgcaccacgtggaggccaacagggttaattttgttgcagctattgatgtgtacgaagatggagaagctggtttgctgttgtgttacaactacagttgcatctataaaaaggtttgcccctttaatggtggctcttttttggttcaaccttctgcgtcagatttccagttctgttggaaccaggctccctatgcaattgtctgtgctttcccgtatctcctggccttcaccaccgactccatggagatccgcctggtggtgaacgggaacctggtccacactgcagtcgtgccgcagctgcagctggtggcctccaggtcggatatatacttcacagcaactgcagctgtgaatgaggtctcatctggaggcagctccaagggggccagtgcccgaaattctcctcagacacccccgggccgagatactccagtatttccttcttccctgggggaaggtgaaattcaatcaaaaaatctgtacaagattccacttagaaacctcgtgggcagaagcatcgaacgacctctgaagtcacccttagtctccaaggtcatcaccccacccactcccatcagtgtgggccttgctgccattccagtcacgcactccttgtccctgtctcgcatggagatcaaagaaatagcaagcaggacccgcagggaactactgggcctctcggatgaaggtggacccaagtcagaaggagcgccaaaggccaaatcaaaaccccggaagcggttagaagaaagccaaggaggccccaagccaggggcagtgaggtcatctagcagtgacaggatcccatcaggctccttggaaagtgcttctacttccgaagccaaccctgaggggcactcagccagctctgaccaggaccctgtggcagacagagagggcagcccggtctccggcagcagccccttccagctcacggctttctccgatgaagacattatagacttgaagtaacagagttgaatctcatttgccatctttagttttcttatggaggtttatactctttaaacagttctgatgtaatttctcaacaaaatgtggcttttagcctgtcagtgatctattggaccaaaccttctgcacactcggccagttccctctccaatgtccggtgccatctttcctgacctttgtttctttctgttcaggaaccatcagtccccttgtaataaaggtggtagatttcattgaggttttagattgaaactttgaataaatcaaaaatactcattcttatttactgc

SEQ ID NO: 8238 - DNA, 2827 bp, Homo sapiens
  source 1..2827: mol_type = unassigned DNA
agcagccggcacggggacagccggccgcacaacggatctgcaggcgcggagcaaaatgcacccgccgcgccgcgcggtcctgcagccccgccacggccccgcggcccgcacccccccggggcgacagtgagcctctcccgccaccaccgggggccgagcggagggctctcgggtgggagagcgggaccagatctcgacagctgttcatttccaggaagccaccgcagccagagcgaaaggggaccttctgccaccagcggggcatcagccagcggcgcgcatggatttatgaagacactcatgcaagaagtgggcaggacttggacaaacttttccaccggctccgcgtccgccgctccccgcgcctcgtctcctttcccctcctctcccggcggccgccgctgcccgcgatggtggccgcgctgctgggcggcggcggcgaggcccgcggggggacagtgccgggcgcctggctgtgcctgatggcgctgctgcagctgctgggctcggcgccgcggggatcggggctggcgcacggccgccgcctcatctgctggcaggcgctgctgcagtgccagggggagccggagtgcagctacgcctacaaccagtacgccgaggcgtgcgcgccggtgctggcgcagcacggcgggggcgacgcgcccggggccgccgccgccgctttcccggcctcggccgcctctttctcgtcgcgctggcgctgcccgagtcactgcatctcggccctcattcagctcaaccacacgcgccgcgggcccgccctggaggactgtgactgcgcgcaggacgagaactgcaagtccaccaagcgcgccattgagccgtgcctgccccggacgagcggcggcggcgcgggcggccccggcgcgggcggggtcatgggctgcaccgaggcccggcggcgctgcgaccgcgacagccgctgcaacctggcgctgagccgctacctgacctactgcggcaaagtcttcaacgggctgcgctgcacggacgaatgccgcaccgtcattgaggacatgctggctatgcccaaggcggcgctgctcaacgactgcgtgtgcgacggcctcgagcggcccatctgcgagtcggtcaaggagaacatggcccgcctgtgcttcggcgccgagctgggcaacggccccggcagcagcggctcggacgggggcctggacgactactacgatgaggactacgatgacgagcagcgcaccgggggcgcgggtggtgagcagccgctggacgacgacgacggcgtcccgcacccaccgcgcccgggcagcggcgctgctgcatcgggcggccgcggggacctgccctatgggcctgggcgcaggagcagcggcggcggcggccgcttggcgccccggggcgcctggaccccactcgcctccatcttgctgctgctgcttgggccgctcttttagccctcgcgccccccgccgttggctgcgggagagcccgcgtcccactcccgtgctcgcctcgaccccgcgccgggcacctgtggcttgggacagatagaagggatggttggggatacttcccaaaactttttccaagtcaacttggtgtagccggttccccggccacgactctgggcacttcccctgaagctcctctccggagcttgacttcttggacctcctcccccgccccaattccaagctccagaaactcccaactcgtctgccgtccagaaagctagctgcagtgttcaggacgtccgggaggaagcaagcatgtgggggacagaacagtagtcctggactcgaaagggaaggtgctgaccagtggggccttagcaatttgaagggttgggaaggaggaattatatttgcaaaggggctgtctattagcatatttcctttgagggggcaaaaaaaagtgccagtatcgacttttacagattgtggccagtgaggatattataatcctatgtaaacagaaaagtcccacttaccgattcattctttcactgtttgtatctgcgcccagaattctcagtgacgtgggggtgagggtgggtggcgattgccttagagggaacccctaaattggttttggataagtttgagcccttgaccttaatttcattgctaccactctgatctcttagcacatttcttaggattaagggtccaaaaatgctgatctaaggggttgccatggtgttgaacaatgcaactttttatttaaaaaagctctgcactgccatgtatgaaagtctctttatgatgtttgtttttttgtcatttttgttctttacatcaagaaattttatgtttaaatatgcggagaatgtatattgcctctgctcctatcagggttgctaaaccctggtacatcgtatataaaatgtattaaaactggggtttgttaccagttgctgtactttgtatatagaatttttataaattgtatgcttcagaaataatttatttttaaaaagaaattaaaagttttaaactcacatccatattacacctttcccccctgaaatgtatagaatccatttgtcatcaggaatcaaaacccacagtccattgtgaagtgtgctatatttagaacagtcttaaaatgtacagtgtattttatagaattgaagttaacattcttattttcaagagaatttatggacgttgtagaaatgtacaaatgcatttccaaactgccttaaacgttgtatttttatagacatgttttttaaaaatcctaagtttttaaataactatggatttgtgtattttttttggttatttgttttattaaaacatgtacatcagtaaagagttttaaacaatga

SEQ ID NO: 8239 - DNA, 2597 bp, Homo sapiens
  source 1..2597: mol_type = unassigned DNA; mol_type = unassigned DNA
aacgggccttcttgcgacgctcgggtctgggtccgggtccggacgtgcaacagaagccgtcagtggccccgctggctaaaaaagggcaagcatcggaggctcgagccagcggccgcggcgcttcccgacagttcctaattcggggcgctacgccggccccaccacctgttcccggcagccaatggggccgcggggggcggccggggcggagcgcggctacaaaaggcctcgggccccgcgcgcccgcccaccccgctccgggcgcgctctcgggaaggcttggaccgacgcggcccagaggccaggaacattccgcgcgtggaccagccgggccagggcgatgctgcgggtgcggtgtctgcgcggcgggagccgcggcgccgaggcggtgcactacatcggatctcggcttggacgaaccttgacaggatgggtgcagcgaactttccagagcacccaggcagctacggcttcctcccggaactcctgtgcagctgacgacaaagccactgagcctctgcccaaggactgccctgtctcttcttacaacgaatgggaccccttagaggaagtgatagtgggcagagcagaaaacgcctgtgttccaccgttcaccatcgaggtgaaggccaacacatatgaaaagtactggccattttaccagaagcaaggagggcattattttcccaaagatcatttgaaaaaggctgttgctgaaattgaagaaatgtgcaatattttaaaaacggaaggagtgacagtaaggaggcctgaccccattgactggtcattgaagtataaaactcctgattttgagtctacgggtttatacagtgcaatgcctcgagacatcctgatagttgtgggcaatgagattatcgaggctcccatggcatggcgttcacgcttctttgagtaccgagcgtacaggtcaattatcaaagactacttccaccgtggcgccaagtggacaacagctcctaagcccacaatggctgatgagctttataaccaggattatcccatccactctgtagaagacagacacaaattggctgctcagggaaaatttgtgacaactgagtttgagccatgctttgatgctgctgacttcattcgagctggaagagatatttttgcacagagaagccaggttacaaactacctaggcattgaatggatgcgtaggcatcttgctccagactacagagtgcatatcatctcctttaaagatcccaatcccatgcatattgatgctaccttcaacatcattggacctggtattgtgctttccaaccctgaccgaccatgtcaccagattgatcttttcaagaaagcaggatggactatcattactcctccaacaccaatcatcccagacgatcatccactctggatgtcatccaaatggctttccatgaatgtcttaatgctagatgaaaaacgtgttatggtggatgccaatgaagttccaattcaaaagatgtttgaaaagctgggtatcactaccattaaagttaacattcgtaatgccaattccctgggaggaggcttccattgctggacctgcgatgtccggcgccgaggcaccttacagtcctacttggactgaacaggcctgatggagcttgtggctggcctcagatacacctaagaagcttaggggcaaggttcattctcctgctttaaaaagtgcatgaactgtagtgctttaaacaatcatctccttaacaggggtcgtaagcctggtttgcttctattacttttctttgacataaagaaaataacttctgctaggtattactctctactcctaaagttatttactatttggcttcaagtataaaattttggtgaatgtgtaccaagaaaaaattagtcacctgagtaacttggccactaataattaaccatctacctctgtttttaattttctttccaaaaggcagcttgaaatgttggtcctaatcttaattttttttcctcttctatagacttgagaatgtttttctctaaatgagagaaagacttagaatgtacacagatccaaaatagaatcagattatctctttttttctaaaggagagaaagacttagaacatacacagatcctaagtagaaccaggtaattgtctctttttctaataaggaatttgggtaatttttaattttttgttttttaaaaaataacctagactatgcaaaacatcaaagtgaattttccatgaatgtttttaatattctcatctcaacattgtgatatatgctactaaaaaccttttcatatacatcttacctcatttcaagtgaattattttaatctttttctctctttccaaaaatttaggaatgtttagtgtaattggatttcgctatcagttcccatccttaagttttgatattcaatatctgatagatacactgcatctttggtcatctaagatttgtttacaaatgtgcaaattatttagagcatagactttataagcattaaaaaaaactaatggaggtaaaacctaaatgcgatgtgaaataattttagtgttgataccgtatgtgtatttttattctaataaacttttgtgttccagattgaa

SEQ ID NO: 8240 - DNA, 3911 bp, Homo sapiens
  source 1..3911: mol_type = unassigned DNA; mol_type = unassigned DNA
accccgctccgggcgcgctctcgggaaggcttggaccgacgcggcccagaggccaggaacattccgcgcgtggaccagccgggccagggcgatgctgcgggtgcggtgtctgcgcggcgggagccgcggcgccgaggcggtgcactacatcggatctcgggtgcgtgcgccaccggcctcgtctggcggccgcgtgactcactcgatcctgcgggcggcgtggagcactcgctcgctccctgcccggagccgccaccttccctcgctttccctagccggaattgcacgagagtgtcccttctggtatccctgggaagctcagcttcaagagccttcgcaggctccaggagctgggcggcgtcccccagtcagggggaacttgcgttgcggctccagcccttggggtccacttgctgtctgcgcgtccgcggcctgctggcccacggcgcagggggcgccgcccccctctaccggaccttggtgcgctgcaccaagcttcccgctcggagcaaggggttgggacgacggaggctcctcttagtaaaagggtggcgttattggggttcagtagcctgagtgggcgtcgagttggggagatttctggaaaatgcgtgtggggtagatggatggggagaagaggcaagcaaagtgggaatcggggacggggagcgagcgaccagattcactccaagtataacatgggatcccacgtctggagaggagtcggggcgagtgcagcctgtaagcagagtttctgcgctccccgccctcggctgccctggcagcagaccctcccatgcttctagtactggaatcgctccgacattctggcttcctcccagcaactggttcctgaacagctgtcattctccgtctttcttctgcctccacccgagttctcctcctgcccacttcctaaggcttttaacagagcaggatagagatttggggggttgaggtttgctcaggggttgagggaccctccctgctctagattttataggccatgcatttttaaaaggcttttgaagtttttagatctccttcttatttgtttgaatttacgcctgagctaatcctgaccttggctagggtactgtggaccatctgtaaaatggagcagatggcagttgctcactctcagaattgaagtgccaaagaatgcgaagtgtatgtcaaagatgaaaaaaatttgatttgaagctggttattctgaaagataaggtcctttacaaatgttcccaacttttcatttgtaaaaaaaaataaataaaaagcctaatattggtaacctttgatacttaagggaaaaggaggttccgtccccagctgagactggcgggaagttttagagcagctgtctatggttttctgagaggaggactgacccatctgcaaaacagttgcttaaagcttgagtgcaggaattgcattctgagataaagatgggggtgtatggtagctggggacacggtcttctgaggagttttaaagagttacagcaattaatagataagaagacaatttgtagataaacaagagggttaaaaaaattatctgtaatcccactacccacctacacactgttaacgtcttggtttatgctgttctaaaggggtttaagtggcaatgttatgctggatttttactccatctccacttcctcctctctgtaagtactgatagagcaatgcaatacaataatcttttctttgttcttggaagcttggacgaaccttgacaggatgggtgcagcgaactttccagagcacccaggcagctacggcttcctcccggaactcctgtgcagctgacgacaaagccactgagcctctgcccaaggactgccctgtctcttcttacaacgaatgggaccccttagaggaagtgatagtgggcagagcagaaaacgcctgtgttccaccgttcaccatcgaggtgaaggccaacacatatgaaaagtactggccattttaccagaagcaaggagggcattattttcccaaagatcatttgaaaaaggctgttgctgaaattgaagaaatgtgcaatattttaaaaacggaaggagtgacagtaaggaggcctgaccccattgactggtcattgaagtataaaactcctgattttgagtctacgggtttatacagtgcaatgcctcgagacatcctgatagttgtgggcaatgagattatcgaggctcccatggcatggcgttcacgcttctttgagtaccgagcgtacaggtcaattatcaaagactacttccaccgtggcgccaagtggacaacagctcctaagcccacaatggctgatgagctttataaccaggattatcccatccactctgtagaagacagacacaaattggctgctcagggaaaatttgtgacaactgagtttgagccatgctttgatgctgctgacttcattcgagctggaagagatatttttgcacagagaagccaggttacaaactacctaggcattgaatggatgcgtaggcatcttgctccagactacagagtgcatatcatctcctttaaagatcccaatcccatgcatattgatgctaccttcaacatcattggacctggtattgtgctttccaaccctgaccgaccatgtcaccagattgatcttttcaagaaagcaggatggactatcattactcctccaacaccaatcatcccagacgatcatccactctggatgtcatccaaatggctttccatgaatgtcttaatgctagatgaaaaacgtgttatggtggatgccaatgaagttccaattcaaaagatgtttgaaaagctgggtatcactaccattaaagttaacattcgtaatgccaattccctgggaggaggcttccattgctggacctgcgatgtccggcgccgaggcaccttacagtcctacttggactgaacaggcctgatggagcttgtggctggcctcagatacacctaagaagcttaggggcaaggttcattctcctgctttaaaaagtgcatgaactgtagtgctttaaacaatcatctccttaacaggggtcgtaagcctggtttgcttctattacttttctttgacataaagaaaataacttctgctaggtattactctctactcctaaagttatttactatttggcttcaagtataaaattttggtgaatgtgtaccaagaaaaaattagtcacctgagtaacttggccactaataattaaccatctacctctgtttttaattttctttccaaaaggcagcttgaaatgttggtcctaatcttaattttttttcctcttctatagacttgagaatgtttttctctaaatgagagaaagacttagaatgtacacagatccaaaatagaatcagattatctctttttttctaaaggagagaaagacttagaacatacacagatcctaagtagaaccaggtaattgtctctttttctaataaggaatttgggtaatttttaattttttgttttttaaaaaataacctagactatgcaaaacatcaaagtgaattttccatgaatgtttttaatattctcatctcaacattgtgatatatgctactaaaaaccttttcatatacatcttacctcatttcaagtgaattattttaatctttttctctctttccaaaaatttaggaatgtttagtgtaattggatttcgctatcagttcccatccttaagttttgatattcaatatctgatagatacactgcatctttggtcatctaagatttgtttacaaatgtgcaaattatttagagcatagactttataagcattaaaaaaaactaatggaggtaaaacctaaatgcgatgtgaaataattttagtgttgataccgtatgtgtatttttattctaataaacttttgtgttccagattg

SEQ ID NO: 8241 - DNA, 1522 bp, Homo sapiens
  source 1..1522: mol_type = unassigned DNA; mol_type = unassigned DNA
cccaccccgctccgggcgcgctctcgggaaggcttggaccgacgcggcccagaggccaggaacattccgcgcgtggaccagccgggccagggcgatgctgcgggtgcggtgtctgcgcggcgggagccgcggcgccgaggcggtgcactacatcggatctcggcttggacgaaccttgacaggatgggtgcagcgaactttccagagcacccaggcagctacggcttcctcccggaactcctgtgcagctgacgacaaagccactgagcctctgcccaaggactgccctgtctcttcttacaacgaatgggaccccttagaggaagtgatagtgggcagagcagaaaacgcctgtgttccaccgttcaccatcgaggtgaaggccaacacatatgaaaagtactggccattttaccagaagcaaggagggcattattttcccaaagatcatttgaaaaaggctgttgctgaaattgaagaaatgtgcaatattttaaaaacggaaggagtgacagtaaggaggcctgaccccattgactggtcattgaagtataaaactcctgattttgagtctacgggtttatacagtgcaatgcctcgagacatcctgatagttgtgggcaatgagattatcgaggctcccatggcatggcgttcacgcttctttgagtaccgagcgtacaggtcaattatcaaagactacttccaccgtggcgccaagtggacaacagctcctaagcccacaatggctgatgagctttataaccaggattatcccatccactctgtagaagacagacacaaattggctgctcagggaaaatttgtgacaactgagtttgagccatgctttgatgctgctgacttcattcgagctggaagagatatttttgcacagagaagccaggttacaaactacctaggcattgaatggatgcgtaggcatcttgctccagactacagagtgcatatcatctcctttaaagatcccaatcccatgcatattgatgctaccttcaacatcattggacctggtattgtgctttccaaccctgaccgaccatgtcaccagattgatcttttcaagaaagcaggatggactatcattactcctccaacaccaatcatcccagacgatcatccactctggatgtcatccaaatggctttccatgaatgtcttaatgctagatgaaaaacgtgttatggtggatgccaatgaagttccaattcaaaagatgtttgaaaagctgggtatgtacaacaaatgaaacatgttgtcatacatgaaaacgttaaatgagaagaactaaagaaatgacatgctaggtttgataaatggtttgtctaattcaattttgattccttttagaggcaccaagttattatttcacagaaagtcagtatttttattttcaacacacgtagccccaacaagttggagatgcatcctgagctcctgagacatccccttaacaataagtttataaatcttatatgacttagccaacgttttggtgccc

SEQ ID NO: 8242 - DNA, 562 bp, Homo sapiens
  source 1..562: mol_type = unassigned DNA; mol_type = unassigned DNA
caaccctgaccgaccatgtcaccagattgatcttttcaagaaagcaggatggactatcattactcctccaacaccaatcatcccagacggtatgtttactttcatacactgttagactaaaataattactttagtgaccaaggatctttctcctatagagagcagcccaaatgttagcagcttagagaatgtgtttcctcagtaaggtgtgaagtggtgcttgggactgtgagcatcagaacaaggctgggacttgtgtttgcaactttttcatccatagaaaatgaagtaaggagaagacagaataaaacaacatcacgtaaagcaagatatgactttttttttttttttgagacagtgtcttgctttgtcacccaggcttgagtgcagttgtgcagtcacagctcactgcagcctcaagactcctgggctcaagtgatctttccactccagcttcctaagtagctgggactacaaatgcaggccactatgcccagcaagttatttttttttatttgtagagatgatgtcttgctgtgttccccagtgaggcaccatctct

SEQ ID NO: 8243 - DNA, 913 bp, Homo sapiens
  source 1..913: mol_type = unassigned DNA; mol_type = unassigned DNA
attcaacagatactgagtgtctgcccagagggcttatgtgctcaatgctagggatcagcactgaacatggagtggttggagtctcaattccaataccttatacaaagagctgtttactgcctatgaacctatcatgagctgtatttttctcctgtaagtattgtgtttatttgcttctacttccaggccaacacatatgaaaagtactggccattttaccagaagcaaggagggcattattttcccaaagatcatttgaaaaaggctgttgctgaaattgaagaaatgtgcaatattttaaaaacggaaggagtgacagtaaggaggcctgaccccattgactggtcattgaagtataaaactcctgattttgagtctacgggtttatacagtgcaatgcctcgagacatcctgatagttgtgggcaatgagattatcgaggctcccatggcatggcgttcacgcttctttgagtaccgagcgtacaggtcaattatcaaagactacttccaccgtggcgccaagtggacaacagctcctaagcccacaatggctgatgagctttataaccaggattatcccatccactctgtagaagacagacacaaattggctgctcagggaaaatttgtgacaactgagtttgagccatgctttgatgctgctgacttcattcgagctggaagagatatttttgcacagagaagccaggttacaaactacctaggcattgaatggatgcgtaggcatcttgctccagactacagagtgcatatcatctcctttaaagatcccaatcccatgcatattgatgctaccttcaacatcattggacctggtattgtgctttccaaccctgaccgaccatgtcaccagattgatcttttcaagaaagcaggatggactatcatta

SEQ ID NO: 8244 - DNA, 569 bp, Homo sapiens
  source 1..569: mol_type = unassigned DNA; mol_type = unassigned DNA
aaggcttggaccgacgcggcccagaggccaggaacattccgcgcgtggaccagccgggccagggcgatgctgcgggtgcggtgtctgcgcggcgggagccgcggcgccgaggcggtgcactacatcggatctcgggccaacacatatgaaaagtactggccattttaccagaagcaaggagggcattattttcccaaagatcatttgaaaaaggctgttgctgaaattgaagaaatgtgcaatattttaaaaacggaaggagtgacagtaaggaggcctgaccccattgactggtcattgaagtataaaactcctgattttgagtctacgggtttatacagtgcaatgcctcgagacatcctgatagttgtgggcaatgagattatcgaggctcccatggcatggcgttcacgcttctttgagtaccgagcgtacaggtcaattatcaaagactacttccaccgtggcgccaagtggacaacagctcctaagcccacaatggctgatgagctttataaccaggattatcccatccactctgtagaagacagacacaaattggctgctca

SEQ ID NO: 8245 - DNA, 493 bp, Homo sapiens
  source 1..493: mol_type = unassigned DNA; mol_type = unassigned DNA
accggaccttggtgcgctgcaccaagcttcccgctcggagcaaggggttgggacgacggaggctcctcttagtaaaaggcttggacgaaccttgacaggatgggtgcagcgaactttccagagcacccaggcagctacggcttcctcccggaactcctgtgcagctgacgacaaagccactgagcctctgcccaaggactgccctgtctcttcttacaacgaatgggaccccttagaggaagtgatagtgggcagagcagaaaacgcctgtgttccaccgttcaccatcgaggtgaaggccaacacatatgaaaagtactggccattttaccagaagcaaggagggcattattttcccaaagatcatttgaaaaaggctgttgctgaaattgaagaaatgtgcaatattttaaaaacggaaggagtgacagtaaggaggcctgaccccattgactggtcattgaagtataaaactcctgattttgagtctacg

SEQ ID NO: 8246 - DNA, 903 bp, Homo sapiens
  source 1..903: mol_type = unassigned DNA; mol_type = unassigned DNA
aaatcgagttgcctaacccagagctttcccgagatggtcttcgttacaggtgtctgggaggcggcttaagctcacttcactaggtcattaagcatgtactttggtggttacatatatcttggaagtcaccggctttacattctgttttcctggccttcgaactggagcatcagtactaccgccgttggaatagcaacctagagactttgctattttgtgaagaaactctaactatccgcatgggcacagaattttgggtgctctggtgcaaatgtctcagttctggaggctgggaagtcaaagacaaggcactggcagattccatgactggaaaggagagaaggtctctgaggaagtgacattccagctgagacgtgaaggataagtagaaaccaagcagaagaattggaagaggaaagggaagagggaaaagcctgtgccaatgccctgagattggaatatgctttttgtgtttaagaaattaacagaagcttggacgaaccttgacaggatgggtgcagcgaactttccagagcacccaggcagctacggcttcctcccggaactcctgtgcagctgacgacaaagccactgagcctctgcccaaggactgccctgtctcttcttacaacgaatgggaccccttagaggaagtgatagtgggcagagcagaaaacgcctgtgttccaccgttcaccatcgaggtgaaggccaacacatatgaaaagtactggccattttaccagaagcaaggagggcattattttcccaaagatcatttgaaaaaggctgttgctgaaattgaagaaatgtgcaatattttaaaaacggaaggagtgacagtaaggaggcctgaccccattgactggtcattgaagtataaaactcctgattttgagtcta

SEQ ID NO: 8247 - DNA, 579 bp, Homo sapiens
  source 1..579: mol_type = unassigned DNA; mol_type = unassigned DNA
tagataagaagacaatttgtagataaacaagagggttaaaaaaattatctgtaatcccactacccacctacacactgttaacgtcttggtttatgctgttctaaaggggtttaagtggcaatgttatgctggatttttactccatctccacttcctcctctctgtaagtactgatagagcaatgcaatacaataatcttttctttgttcttggaagcttggacgaaccttgacaggatgggtgcagcgaactttccagagcacccaggcagctacggcttcctcccggaactcctgtgcagctgacgacaaagccactgagcctctgcccaaggactgccctgtctcttcttacaacgaatgggaccccttagaggaagtgatagtgggcagagcagaaaacgcctgtgttccaccgttcaccatcgaggtgaaggccaacacatatgaaaagtactggccattttaccagaagcaaggagggcattattttcccaaagatcatttgaaaaaggctgttgctgaaattgaagaaatgtgcaatattttaaaaacggaaggagtgacagtaaggaggcct

SEQ ID NO: 8248 - DNA, 554 bp, Homo sapiens
  source 1..554: mol_type = unassigned DNA; mol_type = unassigned DNA
attccgcgcgtggaccagccgggccagggcgatgctgcgggtgcggtgtctgcgcggcgggagccgcggcgccgaggcggtgcactacatcggatctcggcttggacgaaccttgacaggatgggtgcagcgaactttccagagcacccaggcagctacggcttcctcccggaactcctgtgcagctgacgacaaagccactgagcctctgcccaaggactgccctgtctcttcttacaacgaatgggaccccttagaggaagtgatagtgggcagagcagaaaacgcctgtgttccaccgttcaccatcgaggtgaagtagagacggggtttcaccgtgttagccaggatggtctcgatctcctgacctcgtgatccacacgccttggcctcccaaagtgctgggattgcaggggccaacacatatgaaaagtactggccattttaccagaagcaaggagggcattattttcccaaagatcatttgaaaaaggctgttgctgaaattgaagaaatgtgcaatattttaaaaacggaaggagtgacagtaagga

SEQ ID NO: 8249 - DNA, 549 bp, Homo sapiens
  source 1..549: mol_type = unassigned DNA; mol_type = unassigned DNA
actcaggaaagtccacgggatttaagagctccatgtcaggaacgagagtgaagaccaaacattagaaccaaagattctcctagcacccctgtaactcaggaaattacaagggtgttgggagctctaggccagagactagaggcagagaccatatatatatttcttacttcacaacaggaaaggagagaaggtctctgaggaagtgacattccagctgagacgtgaaggataagtagaaaccaagcagaagaattggaagaggaaagggaagagggaaaagcctgtgccaatgccctgagattggaatatgctttttgtgtttaagaaattaacagaagcttggacgaaccttgacaggatgggtgcagcgaactttccagagcacccaggcagctacggcttcctcccggaactcctgtgcagctgacgacaaagccactgagcctctgcccaaggactgccctgtctcttcttacaacgaatgggaccccttagaggaagtgatagtgggcagagcagaaaacgcctgtgttccaccgttcaccatcg

SEQ ID NO: 8250 - DNA, 1107 bp, Homo sapiens
  source 1..1107: mol_type = unassigned DNA; mol_type = unassigned DNA
gcgctagggcagactgcgttgctagcagctgagtgaaggccgaaagggccaatggaaacgttagacgacgctcgggcctctgggtagagcgttggtgtccgctttcgtgaaatcgagttgcctaacccagagctttcccgagatggtcttcgttacaggtgtctgggaggcggcttaagctcacttcactaggtcattaagcatgtactttggtggttacatatatcttggaagtcaccggctttacattctgttttcctggccttcgaactggagcatcagtactaccgccgttggaatagcaacctagagactttgctattttgtgaagaaactctaactatccgcatgggcacagaattttgggtgctctggtgcaaatgtctcaggtgacttggcgtaactgagaatacagccttgggaccttcgttctggaggctgggaagtcaaagacaaggcactggcagattccatgactggaaaggagagaaggtctctgaggaagtgacattccagctgagacgtgaaggataagtagaaaccaagcagaagaattggaagaggaaagggaagagggaaaagcctgtgccaatgccctgagattggaatatgctttttgtgtttaagaaattaacagaaggagaagcacatctctggctgccctcagtacactaagagaatcagacctcagaggtggctgcattttattgttgggaataagaagactgcaattcaggaagacatatagtagtctataagtgattcaggactggaactcagttatcctaattccctctcggaggctctttccaccatgccatctgctcgtctggtgctttccatccatgaactctggaaaacaagcttgagataccaaaattgaaaagacagctcatcaaaaatgaatagttataattctataagtacaaaaatgaaatactcaaatctcttgccccccctcctgctaggagcataaatgttaacctgagttctctagctctgtacaaatccacagcaattaagactgcactgtgagggaaaatacttttctaaaaaagaatcctgatcaagttgaaacaaaaattttaaaacatgaaatggaaggaa

SEQ ID NO: 8251 - DNA, 572 bp, Homo sapiens
  source 1..572: mol_type = unassigned DNA; mol_type = unassigned DNA
atgatcatggttgggctttccggtgaccagccctcatctaggagccgggcaagaattgccttggtagaacaaaagactgctcctatcactcaggaaagtccacgggatttaagagctccatgtcaggaacgagagtgaagaccaaacattagaaccaaagattctcctagcacccctgtaactcaggaaattacaagggtgttgggagctctaggccagagactagaggcagagaccatatatatatttcttacttcacaacaggaaaggagagaaggtctctgaggaagtgacattccagctgagacgtgaaggataagtagaaaccaagcagaagaattggaagaggaaagggaagagggaaaagcctgtgccaatgccctgagattggaatatgctttttgtgtttaagaaattaacagaagatcttggggactgagccagagagaagaccaggctccaggaacaaggaagatactgtccagaaatggtttattcatagcaacttcaaggagaagcacatctctggctgccctcagtacactaagagaatcagacctcagaggtggctg

SEQ ID NO: 8252 - DNA, 1257 bp, Homo sapiens
  source 1..1257: mol_type = unassigned DNA; mol_type = unassigned DNA
gcctcctcccttttgtccggcccggcccggccgccgccgccccccgcgcccggcgccgagctcccgggtctccgggccggctgtcggtgccggcagggcgcggagggggcgggggccgcggctcgtccccccgcggatgagccgccgcggacggggcgcgggcggacgatggaactccacatcctggagcaccggctgcaagttgccagcgtcgccaaggagagtatcccgctgttcacctacggcctgatcaaacttgccttcctgtcctccaagaccaggtgcaagttcttcagtctgactgagacgccagaggattacactatcattgtcgatgaggaaggattcctagagctgccctcctcggagcacctgagtgtggcagatgccacctggctggccctgaacgtggtgtccggcggtggcagcttctccagctcccagcccatcggcgtgaccaagatcgccaagtcagtcatcgccccactggctgaccagaacatatccgtgttcatgctgtccacgtatcagacagacttcatcctggtgcgcgagcgggacctgccctttgtcacccacacattgtcatcagagttcaccatcctgcgggtcgtcaatggcgagaccgtggcagccgagaacctcggcatcaccaatggcttcgtgaagcccaagctggtccagaggccagtcatccacccactgtccagcccgagcaacaggttctgtgtcaccagcctggaccctgacacgctgcctgctgttgccacactcctcatggatgtcatgttctactccaatggagtgaaggaccccatggccactggggatgactgcggccacatccgcttcttctccttctccctcatcgagggctacatctccctggtgatggacgtgcagacgcagcagaggtttcctagtaacttgctgttcacaagcgcatccggagagctctggaagatggtccggattggaggacagcccctggggtttgatgagtgtggcatcgtggcccagatctcagagcccttggctgctgcagacatcccagcctactacatcagtactttcaagtttgatcatgcacttgtccccgaagagaacatcaatggtgtcatcagtgccctgaaggtcagccaagcagagaagcactagaagggtctcttctgctcctccctgccgccgcccgggcccagccctaaccctgaagattgatcttgcagtatttctctacagactggaaaatcagcctgg

SEQ ID NO: 8253 - DNA, 809 bp, Homo sapiens
  source 1..809: mol_type = unassigned DNA; mol_type = unassigned DNA
ggaactctgggtgaactgagtcatcatccccagggcacgggtgggcagctgccccaggggacctgcctggactaatgagatattctgtgtctgtccatccatccaggtgcaagttcttcagtctgactgagacgccagaggattacactatcattgtcgatgaggaaggattcctagagctgccctcctcggagcacctgagtgtggcagatgccacctggctggccctgaacgtggtgtccggcggtggcagcttctccagctcccagcccatcggcgtgaccaagatcgccaagtcagtcatcgccccactggctgaccagaacatatccgtgttcatgctgtccacgtatcagacagacttcatcctggtgcgcgagcgggacctgccctttgtcacccacacattgtcatcagagttcaccatcctgcgggtcgtcaatggcgagaccgtggcagccgagaacctcggcatcaccaatggcttcgtgaagcccaagctggtccagaggccagtcatccacccactgtccagcccgagcaacaggttctgtgtcaccagcctggaccctgacacgctgcctgctgttgccacactcctcatggatgtcatgttctactccaatggagtgaaggaccccatggccactggggatgactgcggccacatccgcttcttctccttctccctcatcgagggctacatctccctggtgatggacgtgcagacgcagcagaggtttcctagtaacttgctgttcacaagcgcatccggagagctctggaagatggtccggattggaggacag

SEQ ID NO: 8254 - DNA, 402 bp, Homo sapiens
  source 1..402: mol_type = unassigned DNA; mol_type = unassigned DNA
cagacggacttcatcctggtgcgggagcaggacctgtccgtggtgatccacacgctggcccaggagttcgacatttaccgcgaggtggagtgggcaggtgctagcctgactgcgtgtctgcccatgcaggggaacacggtgctcggggcttaagcccccaacccatcactccctgcgcagcctcggcgtttgcacagtccctgcctgaggcctgagccattccccaaaggcttcctgggccagctgccccgctgacctccgttctgcctctggtggggttgccttccctggccaggtgagtcctgacagtgcctctccctcctggggcctccaaggaaagtattttgacatctctctctcttctgtttttattgacttgttaataaaggactttgtagtgac

SEQ ID NO: 8255 - DNA, 1623 bp, Homo sapiens
  source 1..1623: mol_type = unassigned DNA; mol_type = unassigned DNA
agcctcgcagcgggcggcgtggacgcggcagcgcagcggctcctttaaggctcgggcaccacccccgccgccccgcctcccgtgcggcctgggtctagttggcggcggggtcgggtccgcgcgagccgcgatggagctgcacatcctagaacaccgggtgcgggtgctgagcgtcgcccgtcccggtctctggctctacacccacccgctcatcaagctgctcttcctgccccgccgcagccggtgcaagttcttcagcctgacggagacccctgaggattacacgcttatggtggacgaggagggctttaaagagctgcccccatctgagttcctgcaagtagctgaggccacatggctggtgctgaacgtgtcgtctcacagcggtgcggcagtgcaggctgctggggtcaccaagatcgcccgttcggtcatcgcgccactggccgagcaccacgtgtctgtgctgatgctgtccacttaccagacggacttcatcctggtgcgggagcaggacctgtccgtggtgatccacacgctggcccaggagttcgacatttaccgcgaggtgggcggagagcctgtgcctgtgacgagggatgattccagcaatggctttccccgcactcagcatgggcccagccccacggtgcatcccatccagagcccacagaaccgcttctgtgtcctcacactggaccctgagacgcttccagccatcgccaccaccctcatagatgtcctcttctactcgcacagcacccccaaggaggcagcctctagcagtcctgaacccagctccatcacgttctttgccttctccctcatcgagggttatatctccattgtcatggatgctgaaacacagaaaaagttccccagtgacctcctgctgaccagctcctcgggggagctgtggaggatggtgcgcatcggtggacagcccctgggctttgatgaatgtggcatcgtggcacagattgcaggtcccctggctgccgctgacatctctgcctactacatcagcaccttcaacttcgaccacgccctggtgcccgaggacggtatcggcagcgtcatcgaggtcctccagcggcggcaggaaggcctggcttcctgaggcccatgggcaacagagcagcctccctgctctcccctcgacccaggcttccaaagacttctctaagctatttccttaagctctggaacgagccccctgttctgctggggaccctcgttccgctctctgtatgtaagctgcgtgcaggcaccggcttttacgcggacacctgtgtacactcacaggtggagtgggcaggtgctagcctgactgcgtgtctgcccatgcaggggaacacggtgctcggggcttaagcccccaacccatcactccctgcgcagcctcggcgtttgcacagtccctgcctgaggcctgagccattccccaaaggcttcctgggccagctgccccgctgacctccgttctgcctctggtggggttgccttccctggccaggtgagtcctgacagtgcctctccctcctggggcctccaaggaaagtattttgacatctctctctcttctgtttttattgacttgttaataaaggactttgtagtgac

SEQ ID NO: 8256 - DNA, 1460 bp, Homo sapiens
  source 1..1460: mol_type = unassigned DNA; mol_type = unassigned DNA
ggacgcggcagcgcagcggctcctttaaggctcgggcaccacccccgccgccccgcctcccgtgcggcctgggtctagttggcggcggggtcgggtccgcgcgagccgcgatggagctgcacatcctagaacaccgggtgcgggtgctgagcgtcgcccgtcccggtctctggctctacacccacccgctcatcaagctgctcttcctgccccgccgcagccggtgcaagttcttcagcctgacggagacccctgaggattacacgcttatggtggacgaggagggctttaaagagctgcccccatctgagttcctgcaagtagctgaggccacatggctggtgctgaacgtgtcgtctcacagcggtgcggcagtgcaggctgctggggtcaccaagatcgcccgttcggtcatcgcgccactggccgagcaccacgtgtctgtgctgatgctgtccacttaccagacggacttcatcctggtgcgggagcaggacctgtccgtggtgatccacacgctggcccaggagttcgacatttaccgcgaggtgggcggagagcctgtgcctgtgacgagggatgattccagcaatggctttccccgcactcagcatgggcccagccccacggtgcatcccatccagagcccacagaaccgcttctgtgtcctcacactggaccctgagacgcttccagccatcgccaccaccctcatagatgtcctcttctactcgcacaggttccccagtgacctcctgctgaccagctcctcgggggagctgtggaggatggtgcgcatcggtggacagcccctgggctttgatgaatgtggcatcgtggcacagattgcaggtcccctggctgccgctgacatctctgcctactacatcagcaccttcaacttcgaccacgccctggtgcccgaggacggtatcggcagcgtcatcgaggtcctccagcggcggcaggaaggcctggcttcctgaggcccatgggcaacagagcagcctccctgctctcccctcgacccaggcttccaaagacttctctaagctatttccttaagctctggaacgagccccctgttctgctggggaccctcgttccgctctctgtatgtaagctgcgtgcaggcaccggcttttacgcggacacctgtgtacactcacaggtggagtgggcaggtgctagcctgactgcgtgtctgcccatgcaggggaacacggtgctcggggcttaagcccccaacccatcactccctgcgcagcctcggcgtttgcacagtccctgcctgaggcctgagccattccccaaaggcttcctgggccagctgccccgctgacctccgttctgcctctggtggggttgccttccctggccaggtgagtcctgacagtgcctctccctcctggggcctccaaggaaagtattttgacatctctctctcttctgtttttatt

SEQ ID NO: 8257 - DNA, 793 bp, Homo sapiens
  source 1..793: mol_type = unassigned DNA; mol_type = unassigned DNA
ccacccccgccgccccgcctcccgtgcggcctgggtctagttggcggcggggtcgggtccgcgcgagccgcgatggagctgcacatcctagaacaccgggtgcgggtgctgagcgtcgcccgtcccggtctctggctctacacccacccgctcatcaagctgctcttcctgccccgccgcagccgagctgcccccatctgagttcctgcaagtagctgaggccacatggctggtgctgaacgtgtcgtctcacagcggtgcggcagtgcaggctgctggggtcaccaagatcgcccgttcggtcatcgcgccactggccgagcaccacgtgtctgtgctgatgctgtccacttaccagacggacttcatcctggtgcgggagcaggacctgtccgtggtgatccacacgctggcccaggagttcgacatttaccgcgaggtgggcggagagcctgtgcctgtgacgagggatgattccagcaatggctttccccgcactcagcatgatgaatgtggcatcgtggcacagattgcaggtcccctggctgccgctgacatctctgcctactacatcagcaccttcaacttcgaccacgccctggtgcccgaggacggtatcggcagcgtcatcgaggtcctccagcggcggcaggaaggcctggcttcctgaggcccatgggcaacagagcagcctccctgctctcccctcgacccaggcttccaaagacttctctaagctatttccttaagctctggaacgagccccctgttctgctggggaccctcgttccgc

SEQ ID NO: 8258 - DNA, 975 bp, Homo sapiens
  source 1..975: mol_type = unassigned DNA; mol_type = unassigned DNA
cgcagcgggcggcgtggacgcggcagcgcagcggctcctttaaggctcgggcaccacccccgccgccccgcctcccgtgcggcctgggtctagttggcggcggggtcgggtccgcgcgagccgcgatggagctgcacatcctagaacaccgggtgcgggtgctgagcgtcgcccgtcccggtctctggctctacacccacccgctcatcaagctgctcttcctgccccgccgcagccgagctgcccccatctgagttcctgcaagtagctgaggccacatggctggtgctgaacgtgtcgtctcacagcggtgcggcagtgcaggctgctggggtcaccaagatcgcccgttcggtcatcgcgccactggccgagcaccacgtgtctgtgctgatgctgtccacttaccagacggacttcatcctggtgcgggagcaggacctgtccgtggtgatccacacgctggcccaggagttcgacatttaccgcgaggtgggcggagagcctgtgcctgtgacgagggatgattccagcaatggctttccccgcactcagcatgggcccagccccacggtgcatcccatccagagcccacagaaccgcttctgtgtcctcacactggaccctgagacgcttccagccatcgccaccaccctcatagatgtcctcttctactcgcacagcacccccaaggaggcagcctctagcagtcctgaacccagctccatcacgttctttgccttctccctcatcgagggttatatctccattgtcatggatgctgaaacacagaaaaagttccccagtgacctcctgctgaccagctcctcgggggagctgtggaggatggtgcgcatcggtggacagcccctgggctttgatgaatgtggcatcgtggcacagattgcaggtcccctggctgccgctgacatctctgcctactacatcagcaccttcaacttcgaccacgccctg

SEQ ID NO: 8259 - DNA, 1143 bp, Homo sapiens
  source 1..1143: mol_type = unassigned DNA; mol_type = unassigned DNA
agttggcggcggggtcgggtccgcgcgagccgcgatggagctgcacatcctagaacaccgggtgcgggtgctgagcgtcgcccgtcccggtctctggctctacacccacccgctcatcaagctgctcttcctgccccgccgcagccgagctgcccccatctgagttcctgcaagtagctgaggccacatggctggtgctgaacgtgtcgtctcacagcggtgcggcagtgcaggctgctggggtcaccaagatcgcccgttcggtcatcgcgccactggccgagcaccacgtgtctgtgctgatgctgtccacttaccagacggacttcatcctggtgcgggagcaggacctgtccgtggtgatccacacgctggcccaggagttcgacatttaccgcgaggtgggcggagagcctgtgcctgtgacgagggatgattccagcaatggctttccccgcactcagcatgggcccagccccacggtgcatcccatccagagcccacagaaccgcttctgtgtcctcacactggaccctgagacgcttccagccatcgccaccaccctcatagatgtcctcttctactcgcacaggtggaccttggaacttcgtctttgtcctcacagcactgttccctacactctgtcccaccactttccgcccatctatcagttttgcacctcttgcttgtcctctcttggggttcctggcagcccatgatgctcacttgtgcttcactgatgttcggggaaggttcttgccccaaagctggatccctttccagtggggtcgtctgagccatgccctggtctggccctctcaccgtggaatcctttgtttttggcacaggctgggttcattgtcctcccccatccccacccacaccttccagagggctggacccttgggcgggtagcagatatggcagagcctgcccaggccaccataccagctccttcccagggttctggaggctgatcgggagcaggggcagtaggctgggtgcctggtagagcccctaaacctcccatccctccccagcacccccaaggaggcagcctctagcagtcctgaacccagctccatcacgttctttgccttctccctcatcgagggttatatctccattgtcatggatgctgaa

SEQ ID NO: 8260 - DNA, 740 bp, Homo sapiens
  source 1..740: mol_type = unassigned DNA; mol_type = unassigned DNA
gagccgcgatggagctgcacatcctagaacaccgggtgcgggtgctgagcgtcgcccgtcccggtctctggctctacacccacccgctcatcaagctgctcttcctgccccgccgcagccggtgcaagttcttcagcctgacggagacccctgaggattacacgcttatggtggacgaggagggctttaaagatgaggaaactgagactcaaatcacccaccccaggtcataagacaaattaacaaagctgggatttgaacccagagctgcccccatctgagttcctgcaagtagctgaggccacatggctggtgctgaacgtgtcgtctcacagcggtgcggcagtgcaggctgctggggtcaccaagatcgcccgttcggtcatcgcgccactggccgagcaccacgtgtctgtgctgatgctgtccacttaccagacggacttcatcctggtgcgggagcaggacctgtccgtggtgatccacacgctggcccaggagttcgacatttaccgcgaggtgggcggagagcctgtgcctgtgacgagggatgattccagcaatggctttccccgcactcagcatgggcccagccccacggtgcatcccatccagagcccacagaaccgcttctgtgtcctcacactggaccctgagacgcttccagccatcgccaccaccctcatagatgtcctcttctactcgcacagcacccccaaggaggcagcctctagcagtcc

SEQ ID NO: 8261 - DNA, 794 bp, Homo sapiens
  source 1..794: mol_type = unassigned DNA; mol_type = unassigned DNA
cctgggtctagttggcggcggggtcgggtccgcgcgagccgcgatggagctgcacatcctagaacaccgggtgcgggtgctgagcgtcgcccgtcccggtctctggctctacacccacccgctcatcaagctgctcttcctgccccgccgcagccggtgcgcgcccgggttcgggagcgcagataggggctgggggctctgctctcgctccgggccagggtcggaggattaggatcgccgtaaggcaggtgcaagttcttcagcctgacggagacccctgaggattacacgcttatggtggacgaggagggctttaaagagctgcccccatctgagttcctgcaagtagctgaggccacatggctggtgctgaacgtgtcgtctcacagcggtgcggcagtgcaggctgctggggtcaccaagatcgcccgttcggtcatcgcgccactggccgagcaccacgtgtctgtgctgatgctgtccacttaccagacggacttcatcctggtgcgggagcaggacctgtccgtggtgatccacacgctggcccaggagttcgacatttaccgcgaggtgggcggagagcctgtgcctgtgacgagggatgattccagcaatggctttccccgcactcagcatgggcccagccccacggtgcatcccatccagagcccacagaaccgcttctgtgtcctcacactggaccctgagacgcttccagccatcgccaccaccctcatagatgtcctcttctactcgcacagcacccccaaggaggcagcctctagcagtcc

SEQ ID NO: 8262 - DNA, 949 bp, Homo sapiens
  source 1..949: mol_type = unassigned DNA; mol_type = unassigned DNA
agttggcggcggggtcgggtccgcgcgagccgcgatggagctgcacatcctagaacaccgggtgcgggtgctgagcgtcgcccgtcccggtctctggctctacacccacccgctcatcaagctgctcttcctgccccgccgcagccggtgcaagttcttcagcctgacggagacccctgaggattacacgcttatggtggacgaggagggctttaaagagctgcccccatctgagttcctgcaagtagctgaggccacatggctggtgctgaacgtgtcgtctcacagcggtgcggcagtgcaggctgctggggtcaccaagatcgcccgttcggtcatcgcgccactggccgagcaccacgtgtctgtgctgatgctgtccacttaccagacggacttcatcctggtgcgggagcaggacctgtccgtggtgatccacacgctggcccaggagttcgacatttaccgcgaggtgggcggagagcctgtgcctgtgacgagggatgattccagcaatggctttccccgcactcagcatgcagggcccagccccacggtgcatcccatccagagcccacagaaccgcttctgtgtcctcacactggaccctgagacgcttccagccatcgccaccaccctcatagatgtcctcttctactcgcacaggtggaccttggaacttcgtctttgtcctcacagcactgttccctacactctgtcccaccactttccgcccatctatcagttttgcacctcttgcttgtcctctcttggggttcctggcagcccatgatgctcacttgtgcttcactgatgttcggggaaggttcttgccccaaagctggatccctttccagtggggtcgtctgagccatgccctggtctggccctctcaccgtggaatcctttgtttttggcacaggctgggttcattgtcctcccccatccc

SEQ ID NO: 8263 - DNA, 966 bp, Homo sapiens
  source 1..966: mol_type = unassigned DNA; mol_type = unassigned DNA
gtgcggcctgggtctagttggcggcggggtcgggtccgcgcgagccgcgatggagctgcacatcctagaacaccgggtgcgggtgctgagcgtcgcccgtcccggtctctggctctacacccacccgctcatcaagctgctcttcctgccccgccgcagccgagctgcccccatctgagttcctgcaagtagctgaggccacatggctggtgctgaacgtgtcgtctcacagcggtgcggcagtgcaggctgctggggtcaccaagatcgcccgttcggtcatcgcgccactggccgagcaccacgtgtctgtgctgatgctgtccacttaccagacggacttcatcctggtgcgggagcaggacctgtccgtggtgatccacacgctggcccaggagttcgacatttaccgcgaggtgggcggagagcctgtgcctgtgacgagggatgattccagcaatggctttccccgcactcagcatggtgagggccgccccctgacacttggacttgggcagggcctcctcttcccactgggtcccttcccttttgggccccagtggggcaggaggaccccggccagttcctggatagcaagacctgcccctggcccacgcctctccctgactagccaccagggggcgccccagcccacggacaccttttcacctgctgctgtcctccagcagggcccagccccacggtgcatcccatccagagcccacagaaccgcttctgtgtcctcacactggaccctgagacgcttccagccatcgccaccaccctcatagatgtcctcttctactcgcacaggtggaccttggaacttcgtctttgtcctcacagcactgttccctacactctgtcccaccactttccgcccatctatcagttttgcacctcttgcttgtcctctcttggggttcctggcagcccatgatgctcacttgtgcttcactgatgttc

SEQ ID NO: 8264 - DNA, 704 bp, Homo sapiens
  source 1..704: mol_type = unassigned DNA; mol_type = unassigned DNA
aaacagcctgggatgggcaatgcttaactcagtagtgtcaaatgggggcattcctacctggtcactgcggggagctccttccaggacgcctcccttcatgtcagaggggctggactagggggtccaaggtccgacgcccctggggctgtcgccgcgggtgcaagttcttcagcctgacggagacccctgaggattacacgcttatggtggacgaggagggctttaaagagctgcccccatctgagttcctgcaagtagctgaggccacatggctggtgctgaacgtgtcgtctcacagcggtgcggcagtgcaggctgctggggtcaccaagatcgcccgttcggtcatcgcgccactggccgagcaccacgtgtctgtgctgatgctgtccacttaccagacggacttcatcctggtgagtttcctgctggtgctgatgcagagcagggtggatataggtacctgggagcccatgtgatgtgccatctgctgtggcccaggtgcgggagcaggacctgtccgtggtgatccacacgctggcccaggagttcgacatttaccgcgaggtgggcggagagcctgtgcctgtgacgagggatgattccagcaatggctttccccgcactcagcatggtgagggccgccccctgacacttggacttgggcagggcctcctcttcccactgggtcccttcccttttgg

SEQ ID NO: 8265 - DNA, 580 bp, Homo sapiens
  source 1..580: mol_type = unassigned DNA; mol_type = unassigned DNA
tggagctgcacatcctagaacaccgggtgcgggtgctgagcgtcgcccgtcccggtctctggctctacacccacccgctcatcaagctgctcttcctgccccgccgcagccggtgcgcgcccgggttcgggagcgcagataggggctgggggctctgctctcgctccgggccagggtcggaggattaggatcgccgtaaggtgcaagttcttcagcctgacggagacccctgaggattacacgcttatggtggacgaggagggctttaaagagctgcccccatctgagttcctgcaagtagctgaggccacatggctggtgctgaacgtgtcgtctcacagcggtgcggcagtgcaggctgctggggtcaccaagatcgcccgttcggtcatcgcgccactggccgagcaccacgtgtctgtgctgatgctgtccacttaccagacggacttcatcctggtgcgggagcaggacctgtccgtggtgatccacacgctggcccaggagttcgacatttaccgcgaggtgggcggagagcctgtgcctgtgacgagggatgattccagcaatggctttcccc

SEQ ID NO: 8266 - DNA, 340 bp, Homo sapiens
  source 1..340: mol_type = unassigned DNA; mol_type = unassigned DNA
gccccctggtggtgccatgtggtacaaagcttctgctaacccacagaagacaccgtagtgagagctgcccccatctgagttcctgcaagtagctgaggccacatggctggtgctgaacgtgtcgtctcacagcggtgcggcagtgcaggctgctggggtcaccaagatcgcccgttcggtcatcgcgccactggccgagcaccacgtgtctgtgctgatgctgtccacttaccagacggacttcatcctggtgcgggagcaggacctgtccgtggtgatccacacgctggcccaggagttcgacatttaccgcgaggtgggcggagagcctgtgcctgtg

SEQ ID NO: 8267 - DNA, 372 bp, Homo sapiens
  source 1..372: mol_type = unassigned DNA; mol_type = unassigned DNA
gtgcggcctgggtctagttggcggcggggtcgggtccgcgcgagccgcgatggagctgcacatcctagaacaccgggtgcgggtgctgagcgtcgcccgtcccggtctctggctctacacccacccgctcatcaagctgctcttcctgccccgccgcagccggtgcgcgcccgggttcgggagcgcagataggggctgggggctctgctctcgctccgggccagggtcggaggattaggatcgccgtaagagctgcccccatctgagttcctgcaagtagctgaggccacatggctggtgctgaacgtgtcgtctcacagcggtgcggcagtgcaggctgctggggtcaccaagatcgcccgttcggtcatc

SEQ ID NO: 8268 - DNA, 2922 bp, Homo sapiens
  source 1..2922: mol_type = unassigned DNA; mol_type = unassigned DNA
gagactctggaacccctgtgctcttctcctcatctagtgaccctgaggtgatggagttttcaagtccttccagagaggaatgtcccaagccttcgggtagggtaagcatcatggctggcagcctcacaggattgcttctacttcaggcagtgtcgtgggcatcagatgagtgagtcaaggcagtggggaggtagcacagagcctcccttctgcctcatagtcctttggtagccttccagtaagctggtggtagacttttagtaggtgctcaataaatccttttgagtgactgagaccaactttggggtgaggatttttgaaaccgtcttcagtctctccaaacagctgtgtccgttctccacatccttgtcagacctcacctctgcttgtgctccctccctcccaggtggtgcccctgcatccctaaaagcttcagtacagctcggtggtctgtgtctgcaatgccacatactgtgactcttgaccccccgacctttcctgccctaggtgccttcagccgctacaagagcagaagcagtgggcattggatggagctgagtacaggaccatacaggctaattgcaccggcacaggtaaccattacacccttcaccccccgggccaggctgggtcctcctagaggtaaacggtgtcagtgatcaccatggagtttctcccctgggcactgataaccctgtggatgtcctcaggcctgctactgatcctgcagccagaagttccagaaagtgaagggatttggaggggccgtgacagatgcaggtgccctcaacatccttgccctgtcaccccctgcccagaatttgctacttaaatggtacttctctgaagaagatgaggaggaaggggacaggatgacatagagccactgacacttttctttgccaattctttggaccctgacttctgcccatccctgacatttggttcctgtcttaatgccagtgaaataagatttcgccgcctatcatctgctaactgctacggactcaggctcagaaaggcctgcgcttcacccaggaatcggatataacatcatctgggtacccatggccagctgtgacttctccatccgcacctacacctatgcagacacccctgatgatttccagttgcacaacttcagcctcccagaggaagataccaagctcaagatacccctgattcaccgagccctgcagttggcccagcgtcccgtttcactccttgccagcccctggacatcacccactcggctcaagaccaggggagcggggaatgggaaggggccactcaagggacagcccagagacatctaccaccagacctgggccagatacattgtgaagtaagggatcagcaaggatgtgggatcaggactggcctcccctttggccatgctgatctgtgtcccaaccctcaacctggttccacttccagatctgcctgtcctcagctcacctttctaccttctgggcctttcaaacttggatctgtcagtcttgcccactccatcaggcttcctgttctctcggtctggcccactttcttggctggatcattcatgacctttctcttgccaggttcctggatgcctatgctgagcacaagttacagttctgggcagtgacagctgaaaatgagccttctgctgggctgttgagtggataccccttccagtgcctgggcttcacccctgaacatcagcgagacttcattgcccgtgacctaggtcctacccttgccaacggtactcaccacaatgtccgcctactcatgctggatgaccaacgcttgctgctgccccactgggcaaaggtggtactgacagacccagaagcagctaagtatgttcatggtattgctgtacattggtacctggactttctggctccagccaaagccaccctaagggagacacaccacctgttccccaacaccatgctctttgcctcagaggcctgtgtgggttccaagttctgggagcagagtgtgcggctaggctcctgggatcgagggatgcagtacagccacagcatcatcacaaacctcctgtaccatgtggtcggctggaccgactggaacccatcattgtagacatcaccaagcacacgttttacaaacagcccatgttctaccaccttggccacttcagcaagttcattcctgagggctcccagagagtggggctggttgccagtcagaagaacgacccggacgcagtggcactgatgcatcccgatggctctgctgttgtggtcgtgctaaaccgctcctctaaggatgtgcctcttaccatcaaggatcctgctgtgggcttcctggagacaatctcacctggctactccattcacacctacctgtggcgtcgccagtgatggagcagatactcaaggaggcactgggctcagcctgggcattaaagggacagagtcagctcacacgctgtctgtgactaaagagggcacagcagggccagtgtgagcttacagcgacgtaagcccaggggcaatggtttgggtgactcactttcccctctaggtggtgccaggggctggaggcccctagaaaaagatcagtaagccccagtgtccccccagcccccatgcttatgtgaacatgcgctgtgtgctgcttgctttggaaactgggcctgggtccaggcctagggtgagctcactgtccgtacaaacacaagatcagggctgagggtaaggaaaagaagagactaggaaagctgggcccaaaactggagactgtttgtctttcctggagatgcagaactgggcccgtggagcagcagtgtcagcatcagggcggaagccttaaagcagcagcgggtgtgcccaggcacccagatgattcctatggcaccagccaggaaaaatggcagctcttaaaggagaaaatgtttgagcccagtca

SEQ ID NO: 8269 - DNA, 1884 bp, Homo sapiens
  source 1..1884: mol_type = unassigned DNA; mol_type = unassigned DNA
gtggatcctctatccttcagagactctggaacccctgtgctcttctcctcatctagtgaccctgaggtgatggagttttcaagtccttccagagaggaatgtcccaagccttcgggtagggtaagcatcatggctggcagcctcacaggattgcttctacttcaggcagtgtcgtgggcatcagatgagtgccttcagccgctacaagagcagaagcagtgggcattggatggagctgagtacaggaccatacaggctaattgcaccggcacagtgaaataagatttcgccgcctatcatctgctaactgctacggactcaggctcagaaaggcctgcgcttcacccaggaatcggatataacatcatctgggtacccatggccagctgtgacttctccatccgcacctacacctatgcagacacccctgatgatttccagttgcacaacttcagcctcccagaggaagataccaagctcaagatacccctgattcaccgagccctgcagttggcccagcgtcccgtttcactccttgccagcccctggacatcacccactcggctcaagaccaggggagcggggaatgggaaggggccactcaagggacagcccagagacatctaccaccagacctgggccagatacattgtgaagttcctggatgcctatgctgagcacaagttacagttctgggcagtgacagctgaaaatgagccttctgctgggctgttgagtggataccccttccagtgcctgggcttcacccctgaacatcagcgagacttcattgcccgtgacctaggtcctacccttgccaacggtactcaccacaatgtccgcctactcatgctggatgaccaacgcttgctgctgccccactgggcaaaggtggtactgacagacccagaagcagctaaaggcctgtgtgggttccaagttctgggagcagagtgtgcggctaggctcctgggatcgagggatgcagtacagccacagcatcatcacaaacctcctgtaccatgtggtcggctggaccgactggaacccatcattgtagacatcaccaagcacacgttttacaaacagcccatgttctaccaccttggccacttcagcaagttcattcctgagggctcccagagagtggggctggttgccagtcagaagaacgacccggacgcagtggcactgatgcatcccgatggctctgctgttgtggtcgtgctaaaccgctcctctaaggatgtgcctcttaccatcaaggatcctgctgtgggcttcctggagacaatctcacctggctactccattcacacctacctgtggcgtcgccagtgatggagcagatactcaaggaggcactgggctcagcctgggcattaaagggacagagtcagctcacacgctgtctgtgactaaagagggcacagcagggccagtgtgagcttacagcgacgtaagcccaggggcaatggtttgggtgactcactttcccctctaggtggtgccaggggctggaggcccctagaaaaagatcagtaagccccagtgtccccccagcccccatgcttatgtgaacatgcgctgtgtgctgcttgctttggaaactgggcctgggtccaggcctagggtgagctcactgtccgtacaaacacaagatcagggctgagggtaaggaaaagaagagactaggaaagctgggcccaaaactggagactgtttgtctttcctggagatgcagaactgggcccgtggagcagcagtgtcagcatcagggcggaagccttaaagcagcagcgggtgtgcccaggcacccagatgattcctatggcaccagccaggaaaaatggcagctcttaaaggagaaaatgtttgagccca

SEQ ID NO: 8270 - DNA, 1873 bp, Homo sapiens
  source 1..1873: mol_type = unassigned DNA; mol_type = unassigned DNA
cttttgccttcggttggggctgctgtttctcttcgccgacggtgacagggctttccctatgttgcccaggttcgtctcaaactcctgggctcaaaagatcctcatcttctcaagtggttgaatatacacgctccagcgaccatgcctggctgaatgaagagctttgagattttgaagaaacaggaaccatgaaatttgctttgcaactgtttgcaacctttaaggaagactgaaaaggcattcctgaagcatgtgccttcagccgctacaagagcagaagcagtgggcattggatggagctgagtacaggaccatacaggctaattgcaccggcacaggaatcggatataacatcatctgggtacccatggccagctgtgacttctccatccgcacctacacctatgcagacacccctgatgatttccagttgcacaacttcagcctcccagaggaagataccaagctcaagatacccctgattcaccgagccctgcagttggcccagcgtcccgtttcactccttgccagcccctggacatcacccactcggctcaagaccaggggagcggggaatgggaaggggccactcaagggacagcccagagacatctaccaccagacctgggccagatacattgtgaagttcctggatgcctatgctgagcacaagttacagttctgggcagtgacagctgaaaatgagccttctgctgggctgttgagtggataccccttccagtgcctgggcttcacccctgaacatcagcgagacttcattgcccgtgacctaggtcctacccttgccaacggtactcaccacaatgtccgcctactcatgctggatgaccaacgcttgctgctgccccactgggcaaaggtggtactgacagacccagaagcagctaaaggcctgtgtgggttccaagttctgggagcagagtgtgcggctaggctcctgggatcgagggatgcagtacagccacagcatcatcacaaacctcctgtaccatgtggtcggctggaccgactggaacccatcattgtagacatcaccaagcacacgttttacaaacagcccatgttctaccaccttggccacttcagcaagttcattcctgagggctcccagagagtggggctggttgccagtcagaagaacgacccggacgcagtggcactgatgcatcccgatggctctgctgttgtggtcgtgctaaaccgctcctctaaggatgtgcctcttaccatcaaggatcctgctgtgggcttcctggagacaatctcacctggctactccattcacacctacctgtggcgtcgccagtgatggagcagatactcaaggaggcactgggctcagcctgggcattaaagggacagagtcagctcacacgctgtctgtgactaaagagggcacagcagggccagtgtgagcttacagcgacgtaagcccaggggcaatggtttgggtgactcactttcccctctaggtggtgccaggggctggaggcccctagaaaaagatcagtaagccccagtgtccccccagcccccatgcttatgtgaacatgcgctgtgtgctgcttgctttggaaactgggcctgggtccaggcctagggtgagctcactgtccgtacaaacacaagatcagggctgagggtaaggaaaagaagagactaggaaagctgggcccaaaactggagactgtttgtctttcctggagatgcagaactgggcccgtggagcagcagtgtcagcatcagggcggaagccttaaagcagcagcgggtgtgcccaggcacccagatgattcctatggcaccagccaggaaaaatggcagctcttaaaggagaaaatgtttgagccca

SEQ ID NO: 8271 - DNA, 1823 bp, Homo sapiens
  source 1..1823: mol_type = unassigned DNA; mol_type = unassigned DNA
cccaagccttcgggtagggtgccttcagccgctacaagagcagaagcagtgggcattggatggagctgagtacaggaccatacaggctaattgcaccggcacagtgaaataagatttcgccgcctatcatctgctaactgctacggactcaggctcagaaaggcctgcgcttcacccaggaatcggatataacatcatctgggtacccatggccagctgtgacttctccatccgcacctacacctatgcagacacccctgatgatttccagttgcacaacttcagcctcccagaggaagataccaagctcaagatacccctgattcaccgagccctgcagttggcccagcgtcccgtttcactccttgccagcccctggacatcacccactcggctcaagaccaggggagcggggaatgggaaggggccactcaagggacagcccagagacatctaccaccagacctgggccagatacattgtgaagttcctggatgcctatgctgagcacaagttacagttctgggcagtgacagctgaaaatgagccttctgctgggctgttgagtggataccccttccagtgcctgggcttcacccctgaacatcagcgagacttcattgcccgtgacctaggtcctacccttgccaacggtactcaccacaatgtccgcctactcatgctggatgaccaacgcttgctgctgccccactgggcaaaggtggtactgacagacccagaagcagctaagtatgttcatggtattgctgtacattggtacctggactttctggctccagccaaagccaccctaagggagacacaccacctgttccccaacaccatgctctttgcctcagaggcctgtgtgggttccaagttctgggagcagagtgtgcggctaggctcctgggatcgagggatgcagtacagccacagcatcatcacaaacctcctgtaccatgtggtcggctggaccgactggaacccatcattgtagacatcaccaagcacacgttttacaaacagcccatgttctaccaccttggccacttcagcaagttcattcctgagggctcccagagagtggggctggttgccagtcagaagaacgacccggacgcagtggcactgatgcatcccgatggctctgctgttgtggtcgtgctaaaccgctcctctaaggatgtgcctcttaccatcaaggatcctgctgtgggcttcctggagacaatctcacctggctactccattcacacctacctgtggcgtcgccagtgatggagcagatactcaaggaggcactgggctcagcctgggcattaaagggacagagtcagctcacacgctgtctgtgactaaagagggcacagcagggccagtgtgagcttacagcgacgtaagcccaggggcaatggtttgggtgactcactttcccctctaggtggtgccaggggctggaggcccctagaaaaagatcagtaagccccagtgtccccccagcccccatgcttatgtgaacatgcgctgtgtgctgcttgctttggaaactgggcctgggtccaggcctagggtgagctcactgtccgtacaaacacaagatcagggctgagggtaaggaaaagaagagactaggaaagctgggcccaaaactggagactgtttgtctttcctggagatgcagaactgggcccgtggagcagcagtgtcagcatcagggcggaagccttaaagcagcagcgggtgtgcccaggcacccagatgattcctatggcaccagccaggaaaaatggcagctcttaaaggagaaaatgtttgagccc

SEQ ID NO: 8272 - DNA, 2711 bp, Homo sapiens
  source 1..2711: mol_type = unassigned DNA; mol_type = unassigned DNA
ggaagccagaattacttgcaggagtaacctagtgcctatagctatggcaggtacctgcatccttgtttttgtttagtggatcctctatccttcagagactctggaacccctgtgctcttctcctcatctagtgaccctgaggtgatggagttttcaagtccttccagagaggaatgtcccaagccttcgggtagggtaagcatcatggctggcagcctcacaggattgcttctacttcaggcagtgtcgtgggcatcagatgagtgccttcagccgctacaagagcagaagcagtgggcattggatggagctgagtacaggaccatacaggctaattgcaccggcacaggtaaccattacacccttcaccccccgggccaggctgggtcctcctagaggtaaacggtgtcagtgatcaccatggagtttctcccctgggcactgataaccctgtggatgtcctcaggcctgctactgatcctgcagccagaagttccagaaagtgaagggatttggaggggccgtgacagatgcaggtgccctcaacatccttgccctgtcaccccctgcccagaatttgctacttaaatggtacttctctgaagaagatgaggaggaaggggacaggatgacatagagccactgacacttttctttgccaattctttggaccctgacttctgcccatccctgacatttggttcctgtcttaatgccagtgaaataagatttcgccgcctatcatctgctaactgctacggactcaggctcagaaaggcctgcgcttcacccaggtgccagcctccacaggttccaacccaggagcccaagttccttttggccctgactcagacactattaggactggcaagtgataagcagagtcccatactctcctattgactcggactaccatatcttgatcatccttttctgtaggaatcggatataacatcatctgggtacccatggccagctgtgacttctccatccgcacctacacctatgcagacacccctgatgatttccagttgcacaacttcagcctcccagaggaagataccaagctcaagatacccctgattcaccgagccctgcagttggcccagcgtcccgtttcactccttgccagcccctggacatcacccactcggctcaagaccaggggagcggggaatgggaaggggccactcaagggacagcccagagacatctaccaccagacctgggccagatacattgtgaagttcctggatgcctatgctgagcacaagttacagttctgggcagtgacagctgaaaatgagccttctgctgggctgttgagtggataccccttccagtgcctgggcttcacccctgaacatcagcgagacttcattgcccgtgacctaggtcctacccttgccaacggtactcaccacaatgtccgcctactcatgctggatgaccaacgcttgctgctgccccactgggcaaaggtggtactgacagacccagaagcagctaaaggcctgtgtgggttccaagttctgggagcagagtgtgcggctaggctcctgggatcgagggatgcagtacagccacagcatcatcacagtctgcacacctcattgccccttttgcaactactgaggcacttgcagctgcctcagacttctcagctccccttgagatgcctggatcttcacacccccaactccttagctactaaggaatgtgcccctcacagggctgacctacccacagctgcctctcccacacgtgacccttacctacactctctggggacccccagtgttgcgcctttgtctccttgcctttgtccttaccctagaacctcctgtaccatgtggtcggctggaccgactggaacccatcattgtagacatcaccaagcacacgttttacaaacagcccatgttctaccaccttggccacttcagcaagttcattcctgagggctcccagagagtggggctggttgccagtcagaagaacgacccggacgcagtggcactgatgcatcccgatggctctgctgttgtggtcgtgctaaaccgctcctctaaggatgtgcctcttaccatcaaggatcctgctgtgggcttcctggagacaatctcacctggctactccattcacacctacctgtggcgtcgccagtgatggagcagatactcaaggaggcactgggctcagcctgggcattaaagggacagagtcagctcacacgctgtctgtgactaaagagggcacagcagggccagtgtgagcttacagcgacgtaagcccaggggcaatggtttgggtgactcactttcccctctaggtggtgccaggggctggaggcccctagaaaaagatcagtaagccccagtgtccccccagcccccatgcttatgtgaacatgcgctgtgtgctgcttgctttggaaactgggcctgggtccaggcctagggtgagctcactgtccgtacaaacacaagatcagggctgagggtaaggaaaagaagagactaggaaagctgggcccaaaactggagactgtttgtctttcctggagatgcagaactgggcccgtggagcagcagtgtcagcatcagggcggaagccttaaagcagcagcgggtgtgcccaggcacccagatgattcctatggcaccagccaggaaaaatggcagctcttaaaggagaaaatgtttgagccc

SEQ ID NO: 8273 - DNA, 1546 bp, Homo sapiens
  source 1..1546: mol_type = unassigned DNA; mol_type = unassigned DNA
atggagttttcaagtccttccagagaggaatgtcccaagccttcgggtagggtaagcatcatggctggcagcctcacaggattgcttctacttcaggcagtgtcgtgggcatcaggtggtgcccctgcatccctaaaagcttcagtacagctcggtggtctgtgtctgcaatgccacatactgtgactcttgaccccccgacctttcctgccctaggtgccttcagccgctacaagagcagaagcagtgggcattggatggagctgagtacaggaccatacaggctaattgcaccggcacaggcctgctactgatcctgcagccagaagttccagaaagtgaagggatttggaggggccgtgacagatgcaggtgccctcaacatccttgccctgtcaccccctgcccagaatttgctacttaaatggtacttctctgaagaaggaatcggatataacatcatctgggtacccatggccagctgtgacttctccatccgcacctacacctatgcagacacccctgatgatttccagttgcacaacttcagcctcccagaggaagataccaagctcaagatacccctgattcaccgagccctgcagttggcccagcgtcccgtttcactccttgccagcccctggacatcacccactcggctcaagaccaggggagcggggaatgggaaggggccactcaagggacagcccagagacatctaccaccagacctgggccagatacattgtgaagttcctggatgcctatgctgagcacaagttacagttctgggcagtgacagctgaaaatgagccttctgctgggctgttgagtggataccccttccagtgcctgggcttcacccctgaacatcagcgagacttcattgcccgtgacctaggtcctacccttgccaacggtactcaccacaatgtccgcctactcatgctggatgaccaacgcttgctgctgccccactgggcaaaggtggtactgacagacccagaagcagctaagtatgttcatggtattgctgtacattggtacctggactttctggctccagccaaagccaccctaagggagacacaccacctgttccccaacaccatgctctttgcctcagaggcctgtgtgggttccaagttctgggagcagagtgtgcggctaggctcctgggatcgagggatgcagtacagccacagcatcatcacaaacctcctgtaccatgtggtcggctggaccgactggaacccatcattgtagacatcaccaagcacacgttttacaaacagcccatgttctaccaccttggccacttcagcaagttcattcctgagggctcccagagagtggggctggttgccagtcagaagaacgacccggacgcagtggcactgatgcatcccgatggctctgctgttgtggtcgtgctaaaccgctcctctaaggatgtgcctcttaccatcaaggatcctgctgtgggcttcctggagacaatctcacctggctactccattcacacctacctgtggcgtcgccagtga

SEQ ID NO: 8274 - DNA, 830 bp, Homo sapiens
  source 1..830: mol_type = unassigned DNA; mol_type = unassigned DNA
gaggatttttgaaaccgtcttcagtctctccaaacagctgtgtccgttctccacatccttgtcagacctcacctctgcttgtgctccctccctcccaggtggtgcccctgcatccctaaaagcttcagtacagctcggtggtctgtgtctgcaatgccacatactgtgactcttgaccccccgacctttcctgccctaggtgccttcagccgctacaagagcagaagcagtgggcattggatggagctgagtacaggaccatacaggctaattgcaccggcacaggaatcggatataacatcatctgggtacccatggccagctgtgacttctccatccgcacctacacctatgcagacacccctgatgatttccagttgcacaacttcagcctcccagaggaagataccaagctcaagatacccctgattcaccgagccctgcagttggcccagcgtcccgtttcactccttgccagcccctggacatcacccactcggctcaagaccaggggagcggggaatgggaaggggccactcaagggacagcccagagacatctaccaccagacctgggccagatacattgtgaagttcctggatgcctatgctgagcacaagttacagttctgggcagtgacagctgaaaatgagccttctgctgggctgttgagtggataccccttccagtgcctgggcttcacccctgaacatcagcgagacttcattgcccgtgacctaggtcctacccttgccaacggtactcaccacaatgtccgcctactcatgctggatgaccaacgcttgctgctgccccactgggcaaaggtg

SEQ ID NO: 8275 - DNA, 529 bp, Homo sapiens
  source 1..529: mol_type = unassigned DNA
cattgggaagccagaattacttgcaggagtaacctagtgcctatagctatggcaggtacctgcatccttgtttttgtttagtggatcctctatccttcagagactctggaacccctgtgctcttctcctcatctagtgaccctgaggtgatggagttttcaagtccttccagagaggtgccttcagccgctacaagagcagaagcagtgggcattggatggagctgagtacaggaccatacaggctaattgcaccggcacaggaatcggatataacatcatctgggtacccatggccagctgtgacttctccatccgcacctacacctatgcagacacccctgatgatttccagttgcacaacttcagcctcccagaggaagataccaagctcaagatacccctgattcaccgagccctgcagttggcccagcgtcccgtttcactccttgccagcccctggacatcacccactcggctcaagaccaggggagcggggaatgggaaggggccactcaagggacagccca

SEQ ID NO: 8276 - DNA, 814 bp, Homo sapiens
  source 1..814: mol_type = unassigned DNA
gaaagcgaattctctctgacaccaagaccaacgctctagcaaagctcctccggcggatattttgttttcccagcaggttctgccttaacaataaggtcctttgtaggccaaaatgtgcagggcataaaagcatgtgatttgggactttccaaaggggaagtgaacagaaactgccacagacccggacgtgaacagggagttaccctcggctggtgaatgtaggcaggcctggctgagggtggtgagactgcgagggacaggtgagagatgaagctcagaagacatctttgcagagatgtggagaagacaggaggaagtccttcctaaaataaacctgacctcctattgctggtatttatgcagctttgaccaggacctggtaacagatgtggatggacttgaaccaccaactcagcttagaaggaagccaagacttaaagtttcctagatcccagctttttggaaattttagcattcaggtgccaggaatgcagatgggacagccagtgccagaaacaggcccagctatactcctcgatggatactctgggccagcatattcagacacttattcctcagctggtgactccgtgtatacttacttcagtgctgttgctggacaggatggtgaagtggatgctgaagaacttcagagatgtttgacacagtctggaattaatggaacttactctcccttcagtttggaaacctgcagaattatgattgccatgttggatagagatcacacaggaaaaatgggatttaatgcattcaaagagctatgggcagctcttaatgcctggaaggaaaactt

SEQ ID NO: 8277 - DNA, 691 bp, Homo sapiens
  source 1..691: mol_type = unassigned DNA
ctcctccggcggatattttgttttcccagcaggttctgccttaacaataaggtcctttgtaggccaaaatgtgcagggcataaaagcatgtgatttgggactttccaaaggggaagtgaacagaaactgccacagacccggacgtgaacagggagttaccctcggctggtgaatgtaggcaggcctggctgagggtggtgagactgcgagggacaggtgagagatgaagctcagaagacatctttgcagagatgtggagaagacaggaggaagtccttcctaaaataaacctgacctcctgtgggttcccaaacactaacttgtttccctgggaatttggaggtgggttcgaaaaatttggaaattttagcattcaggtgccaggaatgcagatgggacagccagtgccagaaacaggcccagctatactcctcgatggatactctgggccagcatattcagacacttattcctcagctggtgactccgtgtatacttacttcagtgctgttgctggacaggatggtgaagtggatgctgaagaacttcagagatgtttgacacagtctggaattaatggaacttactctcccttcagtttggaaacctgcagaattatgattgccatgttggatagagatcacacaggaaaaatgggatttaatgcattcaaagagctatgggcagctct

SEQ ID NO: 8278 - DNA, 824 bp, Homo sapiens
  source 1..824: mol_type = unassigned DNA
gggagttaccctcggctggtgaatgtaggcaggcctggctgagggtggtgagactgcgagggacaggtgagagatgaagctcagaagacatctttgcagagatgtggagaagacaggaggaagtccttcctaaaataaacctgacctcctgtgggttcccaaacactaacttgtttccctgggaatttggagtttggaaattttagcattcaggtgccaggaatgcagatgggacagccagtgccagaaacaggcccagctatactcctcgatggatactctgggccagcatattcagacacttattcctcagctggtgactccgtgtatacttacttcagtgctgttgctggacaggatggtgaagtggatgctgaagaacttcagagatgtttgacacagtctggaattaatggaacttactctcccttcagtttggaaacctgcagaattatgattgccatgttggatagaaaagaaacttaaagatctttgtctgtgaagaagaaaattatctccctagttcaatctgtagtgaaataagactacagaaggcattgttttttccttttttattttttgtattatatatttttcttaaatatgttttattgtcttctctaagcaaaaagttcttaataaacatagtatttctctctgcgtcctatttcattagtgaagacatagttcacctaaaatggcatcctgctctgaatctagactttttagaaatggcatatgtttttgatgatatgtcaacattcaaaattgtcctaattaaattgttgtttaaatgtaatgtcaactctttataaacttaaaaa

SEQ ID NO: 8279 - DNA, 1992 bp, Homo sapiens
  source 1..1992: mol_type = unassigned DNA
ggcctgcggaagggggcgggttcggaggagtgaactgtgcggttagtgcgcctttcagcctcacctgcagctgcgcctccttgcacctgcgcctgtgctttttctcccagcactgcggacgcgactcgagggtgacgctcgctccgctcgtcccgctcgtcatggcctacccgggatacggaggagggtttggaaattttagcattcaggtgccaggaatgcagatgggacagccagtgccagaaacaggcccagctatactcctcgatggatactctgggccagcatattcagacacttattcctcagctggtgactccgtgtatacttacttcagtgctgttgctggacaggatggtgaagtggatgctgaagaacttcagagatgtttgacacagtctggaattaatggaacttactctcccttcagtttggaaacctgcagaattatgattgccatgttggatagagatcacacaggaaaaatgggatttaatgcattcaaagagctatgggcagctcttaatgcctggaaggaaaacttcatgactgttgatcaagatggaagtggcacagtagaacatcatgagttgcgtcaagccattggtcttatgggttataggttgagtcctcaaacattaactactattgttaaacgttatagcaagaatggcagaattttctttgatgattatgttgcttgctgtgtgaagcttcgagcattgacagatttctttaggaaaagagaccacttgcaacaagggtctgcgaatttcatatatgacgattttttgcagggcactatggcaatttgaatgcttagaattttaaacctgaagagacactgtgaattcttttgtttggaagaagtgaactggactactttaaaacttttaagggttttctatgttcttcctacctgttaaacctcttccctttctgtgtgtttttattttagcagatagttcaaagcaataaaagatttcttttttaatttgaggtattactgcttttggaaaagttattttataaatatgtgcatattgtcataaaatattgtatgattaattgatttaaataatgcttagccttaattttagataatgtaaatttagaggaatgtactttacaagatagattgtataagaagccaaataatgaaagcctagaaaaaactaatttatacttatctgaaggttacaaattagacttttaaattttctttgtagttggtggtgtttgagggttggctagaaatgaaagcctggattttgtgccatgtttgtaatatagtttgttccttgatcaaataatcagagaaaagaaacttaaagatctttgtctgtgaagaagaaaattatctccctagttcaatctgtagtgaaataagactacagaaggcattgttttttccttttttattttttgtattatatatttttcttaaatatgttttattgtcttctctaagcaaaaagttcttaataaacatagtatttctctctgcgtcctatttcattagtgaagacatagttcacctaaaatggcatcctgctctgaatctagactttttagaaatggcatatgtttttgatgatatgtcaacattcaaaattgtcctaattaaattgttgtttaaatgtaatgtcaactctttataaacttaaaaataaacaagtaattaaccactctaattgttcagaaattttacatttgacttatttgacaacattaacattagtggtggctttgccattaaaaacccagtaagtattttgagtgcatctatgtgatgtggtgttttgagcatagtaggcaccacagcaacttttctgcgtggtactaaaactgccgaaaatgcgacgtagaatcaccagatctttagtgtttaatatccctggtataagatgttataattaatgtaatttctttcttggcaaacacctcatgtctgtcttagtgaagatttaataaaccacttatttttcttat

SEQ ID NO: 8280 - DNA, 605 bp, Homo sapiens
  source 1..605: mol_type = unassigned DNA
tgcgcctttcagcctcacctgcagctgcgcctccttgcacctgcgcctgtgctttttctcccagcactgcggacgcgactcgagggtgacgctcgctccgctcgtcccgctcgtcatggcctacccgggatacggaggagggtttggaaattttagcattcaggtgccaggaatgcagatgggacagccagtgccagaaacaggcccagctatactcctcgatggatactctgggccagcatattcagacacttattcctcagctggtgactccgtgtatacttacttcagtgctgttgctggacaggatggtgaagtggatgctgaagaacttcagagatgtttgacacagtctggaattaatggaacttactctcccttcagtttggaaacctgcagaattatgattgccatgttggatgtatccttgaatagaaatagaaaatactagaataaagagtaattgctttctgactatcaagccagtggttagatttcagtgcctgtagtaaactagtgaatttaaaaatactttgtaagatcctgtttaaattctaggctttctagtttttatgcagaagtctgttcatataatgagtttggct

SEQ ID NO: 8281 - DNA, 652 bp, Homo sapiens
  source 1..652: mol_type = unassigned DNA
gcgcctttcagcctcacctgcagctgcgcctccttgcacctgcgcctgtgctttttctcccagcactgcggacgcgactcgagggtgacgctcgctccgctcgtcccgctcgtcatggcctacccgggatacggaggagggaagctgactgccaagctatgaaaaagtggaagagccatgtgaaagggcccatgtggaggagaactggggcccctggccaacaagtttggaaattttagcattcaggtgccaggaatgcagatgggacagccagtgccagaaacaggcccagctatactcctcgatggatactctgggccagcatattcagacacttattcctcagctggtgactccgtgtatacttacttcagtgctgttgctggacaggatggtgaagtggatgctgaagaacttcagagatgtttgacacagtctggaattaatggaacttactctcccttcagtttggaaacctgcagaattatgattgccatgttggatagagatcacacaggaaaaatgggatttaatgcattcaaagagctatgggcagctcttaatgcctggaaggaaaacttcatgactgttgatcaagatggaagtggcacagtagaacatcatgagttgcgtcaagccattggtcttatgg

SEQ ID NO: 8282 - DNA, 1808 bp, Homo sapiens
  source 1..1808: mol_type = unassigned DNA
tgcgcctccttgcacctgcgcctgtgctttttctcccagcactgcggacgcgactcgagggtgacgctcgctccgctcgtcccgctcgtcatggcctacccgggatacggaggagggtttggaaattttagcattcaggtgccaggaatgcagatgggacagccagtgccagaaacaggcccagctatactcctcgatggatactctgggccagcatattcagacacttattcctcagctggtgactccgtgtatacttacttcagtgctgttgctggacaggatggtgaagtggatgctgaagaacttcagagatgtttgacacagtctggaattaatggaacttactctcccttcagtttggaaacctgcagaattatgattgccatgttggatagagatcacacaggaaaaatgggatttaatgcattcaaagagctatgggcagctcttaatgcctggaaggaaaacttcatgactgttgatcaagatggaagtggcacagtagaacatcatgagttgcgtcaagccattggtcttatgggttataggttgagtcctcaaacattaactactattgttaaacgttatagcaagaatggcagaattttctttgatgattatgttgcttgctgtgtgaagcttcgagcattgacaggtattgactatttaaaactaagtgcacagtgttatgtagctatttttcttgaataatgtgtctcatttcctccagcaagtttataataatatgtgttttctccctttattcactgttaaatctaattagtttaaaggcttcaaatattaaggaatataaatgataaaaacgttatgttatttttggaagtttttctcatatctctgttgccagggctattcaatcacttaatatttaattgaatatgaaattattctttttgtgtacctgggtgcactaaatatttgaaactatgtattttaaattacaataaaaaagtaatttctttgtttaaagatttctttaggaaaagagaccacttgcaacaagggtctgcgaatttcatatatgacgattttttgcagggcactatggcaatttgaatgcttagaattttaaacctgaagagacactgtgaattcttttgtttggaagaagtgaactggactactttaaaacttttaagggttttctatgttcttcctacctgttaaacctcttccctttctgtgtgtttttattttagcagatagttcaaagcaataaaagatttcttttttaatttgaggtattactgcttttggaaaagttattttataaatatgtgcatattgtcataaaatattgtatgattaattgatttaaataatgcttagccttaattttagataatgtaaatttagaggaatgtactttacaagatagattgtataagaagccaaataatgaaagcctagaaaaaactaatttatacttatctgaaggttacaaattagacttttaaattttctttgtagttggtggtgtttgagggttggctagaaatgaaagcctggattttgtgccatgtttgtaatatagtttgttccttgatcaaataatcagagaaaagaaacttaaagatctttgtctgtgaagaagaaaattatctccctagttcaatctgtagtgaaataagactacagaaggcattgttttttccttttttattttttgtattatatatttttcttaaatatgttttattgtcttctctaagcaaaaagttcttaataaacatagtatttctctctgcgtcctatttcattagtgaagacatagttcacctaaa

SEQ ID NO: 8283 - DNA, 597 bp, Homo sapiens
  source 1..597: mol_type = unassigned DNA
gtgctttttctcccagcactgcggacgcgactcgagggtgacgctcgctccgctcgtcccgctcgtcatggcctacccgggatacggaggagggtttggaaattttagcattcaggtgccaggaatgcagatgggacagccagtgccagaaacaggcccagctatactcctcgatggatactctgggccagcatattcagacacttattcctcagctggtgactccgtgtatacttacttcagtgctgttgctggacaggatggtgaagtggatgctgaagaacttcagagatgtttgacacagtctggaattaatggaacttactctcccttcagtttggaaacctgcagaattatgattgccatgttggatagagatcacacaggaaaaatgggatttaatgcattcaaagagctatgggcagctcttaatgcctggaaggaaaacttcatgactgttgatcaagatggaagtggcacagtagaacatcatgagttgcgtcaagccattggtcttatgggtaagaacattaacattctttagaatctataaagctaatctttgttctttgattagatgaacttaattgcttcaat

SEQ ID NO: 8284 - DNA, 1694 bp, Homo sapiens
  source 1..1694: mol_type = unassigned DNA
tgccaacgtgcgggtccgcccttggctcctgctccctgcgtccgcgcctggtactcggcggcgccggattccggggctgttgggggccagggcctgggcgagcattgatcctgggctgacttggagccgcaggttttctggtcgttgaggaccctcgaggagcgtcctggtggagccgagggagtaattttggaaattttagcattcaggtgccaggaatgcagatgggacagccagtgccagaaacaggcccagctatactcctcgatggatactctgggccagcatattcagacacttattcctcagctggtgactccgtgtatacttacttcagtgctgttgctggacaggatggtgaagtggatgctgaagaacttcagagatgtttgacacagtctggaattaatggaacttactctcccttcagtttggaaacctgcagaattatgattgccatgttggatagagatcacacaggaaaaatgggatttaatgcattcaaagagctatgggcagctcttaatgcctggaaggaaaacttcatgactgttgatcaagatggaagtggcacagtagaacatcatgagttgcgtcaagccattggtcttatgggttataggttgagtcctcaaacattaactactattgttaaacgttatagcaagaatggcagaattttctttgatgattatgttgcttgctgtgtgaagcttcgagcattgacagatttctttaggaaaagagaccacttgcaacaagggtctgcgaatttcatatatgacgattttttgcagggcactatggcaatttgaatgcttagaattttaaacctgaagagacactgtgaattcttttgtttggaagaagtgaactggactactttaaaacttttaagggttttctatgttcttcctacctgttaaacctcttccctttctgtgtgtttttattttagcagatagttcaaagcaataaaagatttcttttttaatttgaggtattactgcttttggaaaagttattttataaatatgtgcatattgtcataaaatattgtatgattaattgatttaaataatgcttagccttaattttagataatgtaaatttagaggaatgtactttacaagatagattgtataagaagccaaataatgaaagcctagaaaaaactaatttatacttatctgaaggttacaaattagacttttaaattttctttgtagttggtggtgtttgagggttggctagaaatgaaagcctggattttgtgccatgtttgtaatatagtttgttccttgatcaaataatcagagaaaagaaacttaaagatctttgtctgtgaagaagaaaattatctccctagttcaatctgtagtgaaataagactacagaaggcattgttttttccttttttattttttgtattatatatttttcttaaatatgttttattgtcttctctaagcaaaaagttcttaataaacatagtatttctctctgcgtcctatttcattagtgaagacatagttcacctaaaatggcatcctgctctgaatctagactttttagaaatggcatatgtttttgatgatatgtcaacattcaaaattgtcctaattaaattgttgtttaaatgtaatgtcaactctttataaacttaaaaataaacaagtaattaaccactctaa

SEQ ID NO: 8285 - DNA, 655 bp, Homo sapiens
  source 1..655: mol_type = unassigned DNA
ccttcagtttggaaacctgcagaattatgattgccatgttggatagagatcacacaggaaaaatgggatttaatgcattcaaagagctatgggcagctcttaatgcctggaaggaaaacttcatgactgttgatcaagatggaagtggcacagtagaacatcatgagttgcgtcaagccattggtcttatgggttataggttgagtcctcaaacattaactactattgttaaacgttatagcaagaatggcagaattttctttgatgattatgttgcttgctgtgtgaagcttcgagcattgacagatttctttaggaaaagagaccacttgcaacaagggtctgcgaatttcatatatgacgattgtggaggaatgaacgtaattaactttgaacatcttgatacagaaagacctgaatctgtgtgcaaaagtgactaagttccctttatccccctggaattcccatgagttgaggatcatctgaatttgagttgcatccatgaacagttttatcccttggtttcttatttgcgtggaaggcattttcataacgaagtactggtttagtaaaagcagtaaataggagtctccatgcaagagaaattggagtttcctaacatgcatgtgatttaaaaaataaaaataaaaaataa

SEQ ID NO: 8286 - DNA, 1897 bp, Homo sapiens
  source 1..1897: mol_type = unassigned DNA
ctcggagtgtgatctaagcaggttgcgtaccttcctcaggtgactccggccacagcccattgtccgcggccaccggcggagtttagccgcagacctcgaagcgccccggggtccttcccgaacggcagcggctgcggcgggtccatggagaagggccctgtgcgggcaccggcggagaagccgcggggcgccaggtgcagcaatgggttccccgagcgggatccgccgcggcccgggcccagcaggccggcggagaagcccccgcggcccgaggccaagagcgcgcagcccgcggacggctggaagggcgagcggccccgcagcgaggaggataacgagctgaacctccctaacctggcagccgcctactcgtccatcctgagctcgctgggcgagaacccccagcggcaagggctgctcaagacgccctggagggcggcctcggccatgcagttcttcaccaagggctaccaggagaccatctcagatgtcctaaacgatgctatatttgatgaagatcatgatgagatggtgattgtgaaggacatagacatgttttccatgtgtgagcatcacttggttccatttgttggaaaggtccatattggttatcttcctaacaagcaagtccttggcctcagcaaacttgcgaggattgtagaaatctatagtagaagactacaagttcaggagcgccttacaaaacaaattgctgtagcaatcacggaagccttgcggcctgctggagtcggggtagtggttgaagcaacgaagtcaaataaatataataaagggttgagccctctactttcttcttgccacctttttgtggcaatattaaagtgaactgctaatagtgtctgcagaaccatagcttccacgcacctgaacgagcacagaatgaactgacggtggaagacattatgagctgtgtccaacgttttaaccaaagcgtatcgtaccaacgatctgtgaaaatgcactggaagcttctggtcccggtttcctttgtggtctatgtgggtcttgtcctcattgtaactccgtatagatggtataggtattttaatcctggaagctgttgccttattaatgattatcttaaaatttcctccattggggcagcgtgggccaaattaaaacaaacaaaaccgcaactcctccacagaaacacaaacacagttattccatgaagtttagtatttggttgacatagtgctcttcaaattcatcccattaccctaaaagtaataactttgatgcttgctttaactttagtcccatctctgccactttgatgctatttgggttatgatggggcaagatggcagaggtattgggtttttttgtttttttccattcctctctacttctgtttcctagctttttctttctggagtttaagtacagtgatggttggcttgagtacctttttaaatctagcccagtataaacattagcctgcttaatatttagacatttataggtagaattctgagcactcaactcatgtttggcattttaaagtaaaaacaagtgtgacttcgaggaccaaagaaattgtcagctatacatttatctttatgaactcatttatattcctttttaatgactcgttgttctaacatttcctagaagtgttcttataaaggtctaatgtatccacaggctgttgtcttattagtaaatgcaaagtaatgactttgtctgttttactctagtctttagtacttcaaaattaccttttcatatccatgatcttgagtccatttgggggatttttaagaatttgatgtatttcaatacactgttcaaaattaaattgtttaattttatgtatgagtatgtatgttcctgaaggtggtcctatttaaattattaaactattgtaactttg

SEQ ID NO: 8287 - DNA, 2943 bp, Homo sapiens
  source 1..2943: mol_type = unassigned DNA
aaaaaggaggcgcggccgggctttccagcctgtggccgctcccggctcggagtgtgatctaagcaggttgcgtaccttcctcaggtgactccggccacagcccattgtccgcggccaccggcggagtttagccgcagacctcgaagcgccccggggtccttcccgaacggcagcggctgcggcgggtccatggagaagggccctgtgcgggcaccggcggagaagccgcggggcgccaggtgcagcaatgggttccccgagcgggatccgccgcggcccgggcccagcaggccggcggagaagcccccgcggcccgaggccaagagcgcgcagcccgcggacggctggaagggcgagcggccccgcagcgaggaggataacgagctgaacctccctaacctggcagccgcctactcgtccatcctgagctcgctgggcgagaacccccagcggcaagggctgctcaagacgccctggagggcggcctcggccatgcagttcttcaccaagggctaccaggagaccatctcagatgtcctaaacgatgctatatttgatgaagatcatgatgagatggtgattgtgaaggacatagacatgttttccatgtgtgagcatcacttggttccatttgttggaaaggtccatattggttatcttcctaacaagcaagtccttggcctcagcaaacttgcgaggattgtagaaatctatagtagaagactacaagttcaggagcgccttacaaaacaaattgctgtagcaatcacggaagccttgcggcctgctggagtcggggtagtggttgaagcaacacacatgtgtatggtaatgcgaggtgtacagaaaatgaacagcaaaactgtgaccagcacaatgttgggtgtgttccgggaggatccaaagactcgggaagagttcctgactctcattaggagctgagcttcattcagtgtgtgtgcgttggttgccgatcgtactgccagtagcattgtctgtctgtccggtcttgtttgtacattccattttcaattgttacagatgtgaactttattccttgtcactaattatatttaaaattatttctaggaagtcaaataaatataataaagggttgagccctctactttcttcttgccacctttttgtggcaatattaaagtgaactgctaatagtgtaagtacgtgcacaaaaccactgccagataaccagaggggcctgggaagggagaagaattagtgtatttttttcaaatagtacagtaatttgcctcataagcataggagcattgggaatgagagggaactgtgcccagtatactgttttttttcttcctccaataaaagtggtgtagtgccgaaagtgctaaaatatttagtgcggtattgctctgtgaattcaagttcaacagacttcactttggtcatgtttattaaaccaccagtgacatttaaaaatatatttttagcagtcgtaatgttagtcaccaagggaaggtggtggaatgtctatgtttttgattttactgtgagttaaaaaggcacatttctaccttctattgtttttaaattcaagaatagggaattagttcctggtgttgtttacgagtgtattctcgtgtcaacatacagggatttagacatttaactctctgtgccttgataagaatatcatttagagtgtagatacttttgcctttttaaaaaagccattattttatgagacttagtactcacactgcaaataactagtcagctcagttttaactttataggtttattgagtttcctttgtgtgatccatgtagatgcctcaaaatgtttcttcttcttcttttttttaatcttataagatatttttctaagtatttccagaaacatttgagagtgcccatcattttcaggtctgcagaaccatagcttccacgcacctgaacgagcacagaatgaactgacggtggaagacattatgagctgtgtccaacgttttaaccaaagcgtatcgtaccaacgatctgtgaaaatgcactggaagcttctggtcccggtttcctttgtggtctatgtgggtcttgtcctcattgtaactccgtatagatggtataggtattttaatcctggaagctgttgccttattaatgattatcttaaaatttcctccattggggcagcgtgggccaaattaaaacaaacaaaaccgcaactcctccacagaaacacaaacacagttattccatgaagtttagtatttggttgacatagtgctcttcaaattcatcccattaccctaaaagtaataactttgatgcttgctttaactttagtcccatctctgccactttgatgctatttgggttatgatggggcaagatggcagaggtattgggtttttttgtttttttccattcctctctacttctgtttcctagctttttctttctggagtttaagtacagtgatggttggcttgagtacctttttaaatctagcccagtataaacattagcctgcttaatatttagacatttataggtagaattctgagcactcaactcatgtttggcattttaaagtaaaaacaagtgtgacttcgaggaccaaagaaattgtcagctatacatttatctttatgaactcatttatattcctttttaatgactcgttgttctaacatttcctagaagtgttcttataaaggtctaatgtatccacaggctgttgtcttattagtaaatgcaaagtaatgactttgtctgttttactctagtctttagtacttcaaaattaccttttcatatccatgatcttgagtccatttgggggatttttaagaatttgatgtatttcaatacactgttcaaaattaaattgtttaattttatgtatgagtatgtatgttcctgaaggtggtcctatttaaattattaaactattgtaactttg

SEQ ID NO: 8288 - DNA, 2901 bp, Homo sapiens
  source 1..2901: mol_type = unassigned DNA
ccggctcggagtgtgatctaagcaggttgcgtaccttcctcaggtgactccggccacagcccattgtccgcggccaccggcggagtttagccgcagacctcgaagcgccccggggtccttcccgaacggcagcggctgcggcgggtccatggagaagggccctgtgcgggcaccggcggagaagccgcggggcgccaggtgcagcaatgggttccccgagcgggatccgccgcggcccgggcccagcaggccggcggagaagcccccgcggcccgaggccaagagcgcgcagcccgcggacggctggaagggcgagcggccccgcagcgaggaggataacgagctgaacctccctaacctggcagccgcctactcgtccatcctgagctcgctgggcgagaacccccagcggcaagggctgctcaagacgccctggagggcggcctcggccatgcagttcttcaccaagggctaccaggagaccatctcagatgtcctaaacgatgctatatttgatgaagatcatgatgagatggtgattgtgaaggacatagacatgttttccatgtgtgagcatcacttggttccatttgttggaaaggtccatattggttatcttcctaacaagcaagtccttggcctcagcaaacttgcgaggattgtagaaatctatagtagaagactacaagttcaggagcgccttacaaaacaaattgctgtagcaatcacggaagccttgcggcctgctggagtcggggtagtggttgaagcaacacacatgtgtatggtaatgcgaggtgtacagaaaatgaacagcaaaactgtgaccagcacaatgttgggtgtgttccgggaggatccaaagactcgggaagagttcctgactctcattaggagctgagcttcattcagtgtgtgtgcgttggttgccgatcgtactgccagtagcattgtctgtctgtccggtcttgtttgtacattccattttcaattgttacagatgtgaactttattccttgtcactaattatatttaaaattatttctaggaagtcaaataaatataataaagggttgagccctctactttcttcttgccacctttttgtggcaatattaaagtgaactgctaatagtgtaagtacgtgcacaaaaccactgccagataaccagaggggcctgggaagggagaagaattagtgtatttttttcaaatagtacagtaatttgcctcataagcataggagcattgggaatgagagggaactgtgcccagtatactgttttttttcttcctccaataaaagtggtgtagtgccgaaagtgctaaaatatttagtgcggtattgctctgtgaattcaagttcaacagacttcactttggtcatgtttattaaaccaccagtgacatttaaaaatatatttttagcagtcgtaatgttagtcaccaagggaaggtggtggaatgtctatgtttttgattttactgtgagttaaaaaggcacatttctaccttctattgtttttaaattcaagaatagggaattagttcctggtgttgtttacgagtgtattctcgtgtcaacatacagggatttagacatttaactctctgtgccttgataagaatatcatttagagtgtagatacttttgcctttttaaaaaagccattattttatgagacttagtactcacactgcaaataactagtcagctcagttttaactttataggtttattgagtttcctttgtgtgatccatgtagatgcctcaaaatgtttcttcttcttcttttttttaatcttataagatatttttctaagtatttccagaaacatttgagagtgcccatcattttcaggtctgcagaaccatagcttccacgcacctgaacgagcacagaatgaactgacggtggaagacattatgagctgtgtccaacgttttaaccaaagcgtatcgtaccaacgatctgtgaaaatgcactggaagcttctggtcccggtttcctttgtggtctatgtgggtcttgtcctcattgtaactccgtatagatggtataggtattttaatcctggaagctgttgccttattaatgattatcttaaaatttcctccattggggcagcgtgggccaaattaaaacaaacaaaaccgcaactcctccacagaaacacaaacacagttattccatgaagtttagtatttggttgacatagtgctcttcaaattcatcccattaccctaaaagtaataactttgatgcttgctttaactttagtcccatctctgccactttgatgctatttgggttatgatggggcaagatggcagaggtattgggtttttttgtttttttccattcctctctacttctgtttcctagctttttctttctggagtttaagtacagtgatggttggcttgagtacctttttaaatctagcccagtataaacattagcctgcttaatatttagacatttataggtagaattctgagcactcaactcatgtttggcattttaaagtaaaaacaagtgtgacttcgaggaccaaagaaattgtcagctatacatttatctttatgaactcatttatattcctttttaatgactcgttgttctaacatttcctagaagtgttcttataaaggtctaatgtatccacaggctgttgtcttattagtaaatgcaaagtaatgactttgtctgttttactctagtctttagtacttcaaaattaccttttcatatccatgatcttgagtccatttgggggatttttaagaatttgatgtatttcaatacactgttcaaaattaaattgtttaattttatgtatgagtatgtatgttcctgaaggtggtcctatttaaattattaaactattgtaacttt

SEQ ID NO: 8289 - DNA, 1805 bp, Homo sapiens
  source 1..1805: mol_type = unassigned DNA
cgctcccggctcggagtgtgatctaagcaggttgcgtaccttcctcaggtgactccggccacagcccattgtccgcggccaccggcggagtttagccgcagacctcgaagcgccccggggtccttcccgaacggcagcggctgcggcgggtccatggagaagggccctgtgcgggcaccggcggagaagccgcggggcgccaggtgcagcaatgggttccccgagcgggatccgccgcggcccgggcccagcaggccggcggagaagcccccgcggcccgaggccaagagcgcgcagcccgcggacggctggaagggcgagcggccccgcagcgaggaggataacgagctgaacctccctaacctggcagccgcctactcgtccatcctgagctcgctgggcgagaacccccagcggcaagggctgctcaagacgccctggagggcggcctcggccatgcagttcttcaccaagggctaccaggagaccatctcagatgtcctaaacgatgctatatttgatgaagatcatgatgagatggtgattgtgaaggacatagacatgttttccatgtgtgagcatcacttggttccatttgttggaaaggtccatattggttatcttcctaacaagcaagtccttggcctcagcaaacttgcgaggattgtagaaatctatagtagaagactacaagttcaggagcgccttacaaaacaaattgctgtagcaatcacggaagccttgcggcctgctggagtcggggtagtggttgaagcaacgtctgcagaaccatagcttccacgcacctgaacgagcacagaatgaactgacggtggaagacattatgagctgtgtccaacgttttaaccaaagcgtatcgtaccaacgatctgtgaaaatgcactggaagcttctggtcccggtttcctttgtggtctatgtgggtcttgtcctcattgtaactccgtatagatggtataggtattttaatcctggaagctgttgccttattaatgattatcttaaaatttcctccattggggcagcgtgggccaaattaaaacaaacaaaaccgcaactcctccacagaaacacaaacacagttattccatgaagtttagtatttggttgacatagtgctcttcaaattcatcccattaccctaaaagtaataactttgatgcttgctttaactttagtcccatctctgccactttgatgctatttgggttatgatggggcaagatggcagaggtattgggtttttttgtttttttccattcctctctacttctgtttcctagctttttctttctggagtttaagtacagtgatggttggcttgagtacctttttaaatctagcccagtataaacattagcctgcttaatatttagacatttataggtagaattctgagcactcaactcatgtttggcattttaaagtaaaaacaagtgtgacttcgaggaccaaagaaattgtcagctatacatttatctttatgaactcatttatattcctttttaatgactcgttgttctaacatttcctagaagtgttcttataaaggtctaatgtatccacaggctgttgtcttattagtaaatgcaaagtaatgactttgtctgttttactctagtctttagtacttcaaaattaccttttcatatccatgatcttgagtccatttgggggatttttaagaatttgatgtatttcaatacactgttcaaaattaaattgtttaattttatgtatgagtatgtatgttcctgaaggtggtcctatttaaattattaaac

SEQ ID NO: 8290 - DNA, 351 bp, Homo sapiens
  source 1..351: mol_type = unassigned DNA
ccgcctactcgtccatcctgagctcgctgggcgagaacccccagcggcaagggctgctcaagacgccctggagggcggcctcggccatgcagttcttcaccaagggctaccaggagaccatctcagatgtcctaaacgatgctatatttgatgaagatcatgatgagatggtgattgtgaaggacatagacatgttttccatgtgtgagcatcacttggttccatttgttggaaaggtccatattggttatcttcctaacaagcaagtccttggcctcagcaaacttgcgaggtctgcagaaccatagcttccacgcacctgaacgagcacagaatgaactgacggtggaa

SEQ ID NO: 8291 - DNA, 2923 bp, Homo sapiens
  source 1..2923: mol_type = unassigned DNA
cctgtggccgctcccggctcggagtgtgatctaagcaggttgcgtaccttcctcaggtgactccggccacagcccattgtccgcggccaccggcggagtttagccgcagacctcgaagcgccccggggtccttcccgaacggcagcggctgcggcgggtccatggagaagggccctgtgcgggcaccggcggagaagccgcggggcgccaggtgcagcaatgggttccccgagcgggatccgccgcggcccgggcccagcaggccggcggagaagcccccgcggcccgaggccaagagcgcgcagcccgcggacggctggaagggcgagcggccccgcagcgaggaggataacgagctgaacctccctaacctggcagccgcctactcgtccatcctgagctcgctgggcgagaacccccagcggcaagggctgctcaagacgccctggagggcggcctcggccatgcagttcttcaccaagggctaccaggagaccatctcagatgtcctaaacgatgctatatttgatgaagatcatgatgagatggtgattgtgaaggacatagacatgttttccatgtgtgagcatcacttggttccatttgttggaaaggtccatattggttatcttcctaacaagcaagtccttggcctcagcaaacttgcgaggattgtagaaatctatagtagaagactacaagttcaggagcgccttacaaaacaaattgctgtagcaatcacggaagccttgcggcctgctggagtcggggtagtggttgaagcaacacacatgtgtatggtaatgcgaggtgtacagaaaatgaacagcaaaactgtgaccagcacaatgttgggtgtgttccgggaggatccaaagactcgggaagagttcctgactctcattaggagctgagcttcattcagtgtgtgtgcgttggttgccgatcgtactgccagtagcattgtctgtctgtccggtcttgtttgtacattccattttcaattgttacagatgtgaactttattccttgtcactaattatatttaaaattatttctaggaagtcaaataaatataataaagggttgagccctctactttcttcttgccacctttttgtggcaatattaaagtgaactgctaatagtgtaagtacgtgcacaaaaccactgccagataaccagaggggcctgggaagggagaagaattagtgtatttttttcaaatagtacagtaatttgcctcataagcataggagcattgggaatgagagggaactgtgcccagtatactgttttttttcttcctccaataaaagtggtgtagtgccgaaagtgctaaaatatttagtgcggtattgctctgtgaattcaagttcaacagacttcactttggtcatgtttattaaaccaccagtgacatttaaaaatatatttttagcagtcgtaatgttagtcaccaagggaaggtggtggaatgtctatgtttttgattttactgtgagttaaaaaggcacatttctaccttctattgtttttaaattcaagaatagggaattagttcctggtgttgtttacgagtgtattctcgtgtcaacatacagggatttagacatttaactctctgtgccttgataagaatatcatttagagtgtagatacttttgcctttttaaaaaagccattattttatgagacttagtactcacactgcaaataactagtcagctcagttttaactttataggtttattgagtttcctttgtgtgatccatgtagatgcctcaaaatgtttcttcttcttcttttttttaatcttataagatatttttctaagtatttccagaaacatttgagagtgcccatcattttcaggtctgcagaaccatagcttccacgcacctgaacgagcacagaatgaactgacggtggaagacattatgagctgtgtccaacgttttaaccaaagcgtatcgtaccaacgatctgtgaaaatgcactggaagcttctggtcccggtttcctttgtggtctatgtgggtcttgtcctcattgtaactccgtatagatggtataggtattttaatcctggaagctgttgccttattaatgattatcttaaaatttcctccattggggcagcgtgggccaaattaaaacaaacaaaaccgcaactcctccacagaaacacaaacacagttattccatgaagtttagtatttggttgacatagtgctcttcaaattcatcccattaccctaaaagtaataactttgatgcttgctttaactttagtcccatctctgccactttgatgctatttgggttatgatggggcaagatggcagaggtattgggtttttttgtttttttccattcctctctacttctgtttcctagctttttctttctggagtttaagtacagtgatggttggcttgagtacctttttaaatctagcccagtataaacattagcctgcttaatatttagacatttataggtagaattctgagcactcaactcatgtttggcattttaaagtaaaaacaagtgtgacttcgaggaccaaagaaattgtcagctatacatttatctttatgaactcatttatattcctttttaatgactcgttgttctaacatttcctagaagtgttcttataaaggtctaatgtatccacaggctgttgtcttattagtaaatgcaaagtaatgactttgtctgttttactctagtctttagtacttcaaaattaccttttcatatccatgatcttgagtccatttgggggatttttaagaatttgatgtatttcaatacactgttcaaaattaaattgtttaattttatgtatgagtatgtatgttcctgaaggtggtcctatttaaattattaaactattgtaactttgttcttgtg

SEQ ID NO: 8292 - DNA, 1977 bp, Homo sapiens
  source 1..1977: mol_type = unassigned DNA
cctgtggccgctcccggctcggagtgtgatctaagcaggttgcgtaccttcctcaggtgactccggccacagcccattgtccgcggccaccggcggagtttagccgcagacctcgaagcgccccggggtccttcccgaacggcagcggctgcggcgggtccatggagaagggccctgtgcgggcaccggcggagaagccgcggggcgccaggtgcagcaatgggttccccgagcgggatccgccgcggcccgggcccagcaggccggcggagaagcccccgcggcccgaggccaagagcgcgcagcccgcggacggctggaagggcgagcggccccgcagcgaggaggataacgagctgaacctccctaacctggcagccgcctactcgtccatcctgagctcgctgggcgagaacccccagcggcaagggctgctcaagacgccctggagggcggcctcggccatgcagttcttcaccaagggctaccaggagaccatctcagatgtcctaaacgatgctatatttgatgaagatcatgatgagatggtgattgtgaaggacatagacatgttttccatgtgtgagcatcacttggttccatttgttggaaaggtccatattggttatcttcctaacaagcaagtccttggcctcagcaaacttgcgaggattgtagaaatctatagtagaagactacaagttcaggagcgccttacaaaacaaattgctgtagcaatcacggaagccttgcggcctgctggagtcggggtagtggttgaagcaacacacatgtgtatggtaatgcgaggtgtacagaaaatgaacagcaaaactgtgaccagcacaatgttgggtgtgttccgggaggatccaaagactcgggaagagttcctgactctcattaggagctgagcttcattcagtgtgtgtctgcagaaccatagcttccacgcacctgaacgagcacagaatgaactgacggtggaagacattatgagctgtgtccaacgttttaaccaaagcgtatcgtaccaacgatctgtgaaaatgcactggaagcttctggtcccggtttcctttgtggtctatgtgggtcttgtcctcattgtaactccgtatagatggtataggtattttaatcctggaagctgttgccttattaatgattatcttaaaatttcctccattggggcagcgtgggccaaattaaaacaaacaaaaccgcaactcctccacagaaacacaaacacagttattccatgaagtttagtatttggttgacatagtgctcttcaaattcatcccattaccctaaaagtaataactttgatgcttgctttaactttagtcccatctctgccactttgatgctatttgggttatgatggggcaagatggcagaggtattgggtttttttgtttttttccattcctctctacttctgtttcctagctttttctttctggagtttaagtacagtgatggttggcttgagtacctttttaaatctagcccagtataaacattagcctgcttaatatttagacatttataggtagaattctgagcactcaactcatgtttggcattttaaagtaaaaacaagtgtgacttcgaggaccaaagaaattgtcagctatacatttatctttatgaactcatttatattcctttttaatgactcgttgttctaacatttcctagaagtgttcttataaaggtctaatgtatccacaggctgttgtcttattagtaaatgcaaagtaatgactttgtctgttttactctagtctttagtacttcaaaattaccttttcatatccatgatcttgagtccatttgggggatttttaagaatttgatgtatttcaatacactgttcaaaattaaattgtttaattttatgtatgagtatgtatgttcctgaaggtggtcctatttaaattattaaactattgtaactttgttcttgtg

SEQ ID NO: 8293 - DNA, 1641 bp, Homo sapiens
  source 1..1641: mol_type = unassigned DNA
gggatgccaagagcagggatgggagcgagcctgcgtccgggcactggtccccatccgtgagtcccctcggtgctccctgcccgccgtggccatcctctcacatcactcacaaccccaaggcgcggcatggttgacacccccacgttaggacggagaccctgggcttagttagagggggcagtactaaccagtccctggcggaaacgctttggctgggtgaggtgagcgggatcgcccccatttctccagagaggggtcccggctcagcgagggaaagaggccgccgctggggggacggctggccggggcccctccctggagaacgagaggccgccgctggagggggatggactgtcggagcgacactcagcgaccgccctacctcctcccgccccgcagcgacacgggcgaccgcaagcagatctacaacatcctgagcacgctggggctgcgaccctcgaccaccgactgcgacatcgtgcgccgcgcctgcgagagcgtgtctacgcgcgctgcgcacatgtgctcggcggggctggcgggcgtcatcaaccgcatgcgcgagagccgcagcgaggacgtaatgcgcatcactgtgggcgtggatggctccgtgtacaagctgcaccccagcttcaaggagcggttccatgccagcgtgcgcaggctgacgcccagctgcgagatcaccttcatcgagtcggaggagggcagtggccggggcgcggccctggtctcggcggtggcctgtaagaaggcctgtatgctgggccagtgagagcagtggccgcaagcgcagggaggatgccacagccccacagcacccaggctccatggggaagtgctccccacacgtgctcgcagcctggcggggcaggaggcctggccttgtcaggacccaggccgcctgccataccgctggggaacagagcgggcctcttccctcagtttttcggtgggacagccccagggccctaacgggggtgcggcaggagcaggaacagagactctggaagccccccacctttctcgctggaatcaatttcccagaagggagttgctcactcaggactttgatgcatttccacactgtcagagctgttggcctcgcctgggcccaggctctgggaaggggtgccctctggatcctgctgtggcctcacttccctgggaactcatcctgtgtggggaggcagctccaacagcttgaccagacctagacctgggccaaaagggcagccaggggctgctcatcacccagtcctggccattttcttgcctgaggctcaagaggcccagggagcaatgggagggggctccatggaggaggtgtcccaagctttgaatacccccagagaccttttctctcccataccatcactgagtggcttgtgattctgggatggaccctcgcagcaggtgcaagagacagagcccccaagcctctgccccaaggggcccacaaaggggagaagggccagccctacatcttcagctcccatagcgctggctcaggaagaaaccccaagcagcattcagcacaccccaagggacaaccccatcatatgacatgccaccctctccatgcccaacctaagattgtgtgggttttttaattaaaaatgttaaaagttttaaaca

SEQ ID NO: 8294 - DNA, 1311 bp, Homo sapiens
  source 1..1311: mol_type = unassigned DNA
ggcggggtccggacggggatgccaagagcagggatgggagcgagcctgcgtccgggcactggtccccatcccgacacgggcgaccgcaagcagatctacaacatcctgagcacgctggggctgcgaccctcgaccaccgactgcgacatcgtgcgccgcgcctgcgagagcgtgtctacgcgcgctgcgcacatgtgctcggcggggctggcgggcgtcatcaaccgcatgcgcgagagccgcagcgaggacgtaatgcgcatcactgtgggcgtggatggctccgtgtacaagctgcaccccagcttcaaggagcggttccatgccagcgtgcgcaggctgacgcccagctgcgagatcaccttcatcgagtcggaggagggcagtggccggggcgcggccctggtctcggcggtggcctgtaagaaggcctgtatgctgggccagtgagagcagtggccgcaagcgcagggaggatgccacagccccacagcacccaggctccatggggaagtgctccccacacgtgctcgcagcctggcggggcaggaggcctggccttgtcaggacccaggccgcctgccataccgctggggaacagagcgggcctcttccctcagtttttcggtgggacagccccagggccctaacgggggtgcggcaggagcaggaacagagactctggaagccccccacctttctcgctggaatcaatttcccagaagggagttgctcactcaggactttgatgcatttccacactgtcagagctgttggcctcgcctgggcccaggctctgggaaggggtgccctctggatcctgctgtggcctcacttccctgggaactcatcctgtgtggggaggcagctccaacagcttgaccagacctagacctgggccaaaagggcagccaggggctgctcatcacccagtcctggccattttcttgcctgaggctcaagaggcccagggagcaatgggagggggctccatggaggaggtgtcccaagctttgaatacccccagagaccttttctctcccataccatcactgagtggcttgtgattctgggatggaccctcgcagcaggtgcaagagacagagcccccaagcctctgccccaaggggcccacaaaggggagaagggccagccctacatcttcagctcccatagcgctggctcaggaagaaaccccaagcagcattcagcacaccccaagggacaaccccatcatatgacatgccaccctctccatgcccaacctaagattgtgtgggttttttaattaaaaatgttaaaagttttaaa

SEQ ID NO: 8295 - DNA, 2729 bp, Homo sapiens
  source 1..2729: mol_type = unassigned DNA
gagcaggaaatgccgagcggcgcctgagccccagggaagcaggctaggatgtgagagacacagtcacctgcagcctaattactcaaaagctgtccccaggtcacagaagggagaggacatttcccactgaatctgtctgaaggacactaagccccacagctcaacacaaccaggagagaaagcgctgaggacgccacccaagcgcccagcaatggccctgcctggagaacatccaggctcagtgaggaagggtccagaagggaatgcttgccgactcgttggagaacaatgaaaaggaggaaactgtgactgaacctcaaaccccaaaccagcccgaggagaaccacattctcccagggacccagggcgggccgtgacccctgcggcggagaagccttggatatttccacttcagaagcctactggggaaggctgaggggtcccagctccccacgctggctgctgtgcagatgctggacgacagagccaggatggaggccgccaagaaggagaaggtagagcagatcctggcagagttccagctgcaggaggaggacctgaagaaggtgatgagacggatgcagaaggagatggaccgcggcctgaggctggagacccatgaagaggccagtgtgaagatgctgcccacctacgtgcgctccaccccagaaggctcagaagtcggggacttcctctccctggacctgggtggcactaacttcagggtgatgctggtgaaggtgggagaaggtgaggaggggcagtggagcgtgaagaccaaacaccagatgtactccatccccgaggacgccatgaccggcactgctgagatgctcttcgactacatctctgagtgcatctccgacttcctggacaagcatcagatgaaacacaagaagctgcccctgggcttcaccttctcctttcctgtgaggcacgaagacatcgataagggcatccttctcaactggaccaagggcttcaaggcctcaggagcagaagggaacaatgtcgtggggcttctgcgagacgctatcaaacggagaggggactttgaaatggatgtggtggcaatggtgaatgacacggtggccacgatgatctcctgctactacgaagaccatcagtgcgaggtcggcatgatcgtgggcacgggctgcaatgcctgctacatggaggagatgcagaatgtggagctggtggagggggacgagggccgcatgtgcgtcaataccgagtggggcgccttcggggactccggcgagctggacgagttcctgctggagtatgaccgcctggtggacgagagctctgcaaaccccggtcagcagctgtatgagaagctcataggtggcaagtacatgggcgagctggtgcggcttgtgctgctcaggctcgtggacgaaaacctgctcttccacggggaggcctccgagcagctgcgcacacgcggagccttcgagacgcgcttcgtgtcgcaggtggagagcgacacgggcgaccgcaagcagatctacaacatcctgagcacgctggggctgcgaccctcgaccaccgactgcgacatcgtgcgccgcgcctgcgagagcgtgtctacgcgcgctgcgcacatgtgctcggcggggctggcgggcgtcatcaaccgcatgcgcgagagccgcagcgaggacgtaatgcgcatcactgtgggcgtggatggctccgtgtacaagctgcaccccagcttcaaggagcggttccatgccagcgtgcgcaggctgacgcccagctgcgagatcaccttcatcgagtcggaggagggcagtggccggggcgcggccctggtctcggcggtggcctgtaagaaggcctgtatgctgggccagtgagagcagtggccgcaagcgcagggaggatgccacagccccacagcacccaggctccatggggaagtgctccccacacgtgctcgcagcctggcggggcaggaggcctggccttgtcaggacccaggccgcctgccataccgctggggaacagagcgggcctcttccctcagtttttcggtgggacagccccagggccctaacgggggtgcggcaggagcaggaacagagactctggaagccccccacctttctcgctggaatcaatttcccagaagggagttgctcactcaggactttgatgcatttccacactgtcagagctgttggcctcgcctgggcccaggctctgggaaggggtgccctctggatcctgctgtggcctcacttccctgggaactcatcctgtgtggggaggcagctccaacagcttgaccagacctagacctgggccaaaagggcagccaggggctgctcatcacccagtcctggccattttcttgcctgaggctcaagaggcccagggagcaatgggagggggctccatggaggaggtgtcccaagctttgaatacccccagagaccttttctctcccataccatcactgagtggcttgtgattctgggatggaccctcgcagcaggtgcaagagacagagcccccaagcctctgccccaaggggcccacaaaggggagaagggccagccctacatcttcagctcccatagcgctggctcaggaagaaaccccaagcagcattcagcacaccccaagggacaaccccatcatatgacatgccaccctctccatgcccaacctaagattgtgtgggttttttaattaaaaatgttaaaagttttaaa

SEQ ID NO: 8296 - DNA, 2539 bp, Homo sapiens
  source 1..2539: mol_type = unassigned DNA
aagccctgggctgccagcctcaggcagctctccatccaagcagccgttgctgccacaggcgggccttacgctccaaggctacagcatgtgctaggcctcagcaggcaggagcatctctgcctcccaaagcatctacctcttagcccctcggagagatggcgatggatgtcacaaggagccaggcccagacagccttgactctgccagactctcctctgaactcgggcctcacatggccaactgctacttggaacaaatcgccccttggctggcagatgtgttaacatgcccagaccaagatcccaactcccacaacccaactcccaggtagagcagatcctggcagagttccagctgcaggaggaggacctgaagaaggtgatgagacggatgcagaaggagatggaccgcggcctgaggctggagacccatgaagaggccagtgtgaagatgctgcccacctacgtgcgctccaccccagaaggctcagaagtcggggacttcctctccctggacctgggtggcactaacttcagggtgatgctggtgaaggtgggagaaggtgaggaggggcagtggagcgtgaagaccaaacaccagatgtactccatccccgaggacgccatgaccggcactgctgagatgctcttcgactacatctctgagtgcatctccgacttcctggacaagcatcagatgaaacacaagaagctgcccctgggcttcaccttctcctttcctgtgaggcacgaagacatcgataagggcatccttctcaactggaccaagggcttcaaggcctcaggagcagaagggaacaatgtcgtggggcttctgcgagacgctatcaaacggagaggggactttgaaatggatgtggtggcaatggtgaatgacacggtggccacgatgatctcctgctactacgaagaccatcagtgcgaggtcggcatgatcgtgggcacgggctgcaatgcctgctacatggaggagatgcagaatgtggagctggtggagggggacgagggccgcatgtgcgtcaataccgagtggggcgccttcggggactccggcgagctggacgagttcctgctggagtatgaccgcctggtggacgagagctctgcaaaccccggtcagcagctgtatgagaagctcataggtggcaagtacatgggcgagctggtgcggcttgtgctgctcaggctcgtggacgaaaacctgctcttccacggggaggcctccgagcagctgcgcacacgcggagccttcgagacgcgcttcgtgtcgcaggtggagagcgacacgggcgaccgcaagcagatctacaacatcctgagcacgctggggctgcgaccctcgaccaccgactgcgacatcgtgcgccgcgcctgcgagagcgtgtctacgcgcgctgcgcacatgtgctcggcggggctggcgggcgtcatcaaccgcatgcgcgagagccgcagcgaggacgtaatgcgcatcactgtgggcgtggatggctccgtgtacaagctgcaccccagcttcaaggagcggttccatgccagcgtgcgcaggctgacgcccagctgcgagatcaccttcatcgagtcggaggagggcagtggccggggcgcggccctggtctcggcggtggcctgtaagaaggcctgtatgctgggccagtgagagcagtggccgcaagcgcagggaggatgccacagccccacagcacccaggctccatggggaagtgctccccacacgtgctcgcagcctggcggggcaggaggcctggccttgtcaggacccaggccgcctgccataccgctggggaacagagcgggcctcttccctcagtttttcggtgggacagccccagggccctaacgggggtgcggcaggagcaggaacagagactctggaagccccccacctttctcgctggaatcaatttcccagaagggagttgctcactcaggactttgatgcatttccacactgtcagagctgttggcctcgcctgggcccaggctctgggaaggggtgccctctggatcctgctgtggcctcacttccctgggaactcatcctgtgtggggaggcagctccaacagcttgaccagacctagacctgggccaaaagggcagccaggggctgctcatcacccagtcctggccattttcttgcctgaggctcaagaggcccagggagcaatgggagggggctccatggaggaggtgtcccaagctttgaatacccccagagaccttttctctcccataccatcactgagtggcttgtgattctgggatggaccctcgcagcaggtgcaagagacagagcccccaagcctctgccccaaggggcccacaaaggggagaagggccagccctacatcttcagctcccatagcgctggctcaggaagaaaccccaagcagcattcagcacaccccaagggacaaccccatcatatgacatgccaccctctccatgcccaacctaagattgtgtgggttttttaattaaaaatgttaaaagtttta

SEQ ID NO: 8297 - DNA, 2421 bp, Homo sapiens
  source 1..2421: mol_type = unassigned DNA
agtgcagaagccctgggctgccagcctcaggcagctctccatccaagcagccgttgctgccacaggcgggccttacgctccaaggctacagcatgtgctaggcctcagcaggcaggagcatctctgcctcccaaagcatctacctcttagcccctcggagagatggcgatggatgtcacaaggagccaggcccagacagccttgactctggtagagcagatcctggcagagttccagctgcaggaggaggacctgaagaaggtgatgagacggatgcagaaggagatggaccgcggcctgaggctggagacccatgaagaggccagtgtgaagatgctgcccacctacgtgcgctccaccccagaaggctcagaagtcggggacttcctctccctggacctgggtggcactaacttcagggtgatgctggtgaaggtgggagaaggtgaggaggggcagtggagcgtgaagaccaaacaccagatgtactccatccccgaggacgccatgaccggcactgctgagatgctcttcgactacatctctgagtgcatctccgacttcctggacaagcatcagatgaaacacaagaagctgcccctgggcttcaccttctcctttcctgtgaggcacgaagacatcgataagggcatccttctcaactggaccaagggcttcaaggcctcaggagcagaagggaacaatgtcgtggggcttctgcgagacgctatcaaacggagaggggactttgaaatggatgtggtggcaatggtgaatgacacggtggccacgatgatctcctgctactacgaagaccatcagtgcgaggtcggcatgatcgtgggcacgggctgcaatgcctgctacatggaggagatgcagaatgtggagctggtggagggggacgagggccgcatgtgcgtcaataccgagtggggcgccttcggggactccggcgagctggacgagttcctgctggagtatgaccgcctggtggacgagagctctgcaaaccccggtcagcagctgtatgagaagctcataggtggcaagtacatgggcgagctggtgcggcttgtgctgctcaggctcgtggacgaaaacctgctcttccacggggaggcctccgagcagctgcgcacacgcggagccttcgagacgcgcttcgtgtcgcaggtggagagcgacacgggcgaccgcaagcagatctacaacatcctgagcacgctggggctgcgaccctcgaccaccgactgcgacatcgtgcgccgcgcctgcgagagcgtgtctacgcgcgctgcgcacatgtgctcggcggggctggcgggcgtcatcaaccgcatgcgcgagagccgcagcgaggacgtaatgcgcatcactgtgggcgtggatggctccgtgtacaagctgcaccccagcttcaaggagcggttccatgccagcgtgcgcaggctgacgcccagctgcgagatcaccttcatcgagtcggaggagggcagtggccggggcgcggccctggtctcggcggtggcctgtaagaaggcctgtatgctgggccagtgagagcagtggccgcaagcgcagggaggatgccacagccccacagcacccaggctccatggggaagtgctccccacacgtgctcgcagcctggcggggcaggaggcctggccttgtcaggacccaggccgcctgccataccgctggggaacagagcgggcctcttccctcagtttttcggtgggacagccccagggccctaacgggggtgcggcaggagcaggaacagagactctggaagccccccacctttctcgctggaatcaatttcccagaagggagttgctcactcaggactttgatgcatttccacactgtcagagctgttggcctcgcctgggcccaggctctgggaaggggtgccctctggatcctgctgtggcctcacttccctgggaactcatcctgtgtggggaggcagctccaacagcttgaccagacctagacctgggccaaaagggcagccaggggctgctcatcacccagtcctggccattttcttgcctgaggctcaagaggcccagggagcaatgggagggggctccatggaggaggtgtcccaagctttgaatacccccagagaccttttctctcccataccatcactgagtggcttgtgattctgggatggaccctcgcagcaggtgcaagagacagagcccccaagcctctgccccaaggggcccacaaaggggagaagggccagccctacatcttcagctcccatagcgctggctcaggaagaaaccccaagcagcattcagcacaccccaagggacaaccccatcatatgacatgccaccctctccatgcccaacctaagattgtgtgggttttttaattaaaaatgttaaaagtttt

SEQ ID NO: 8298 - DNA, 1385 bp, Homo sapiens
  source 1..1385: mol_type = unassigned DNA
ggggtcccagctccccacgctggctgctgtgcagatgctggacgacagagccaggatggaggccgccaagaaggagaaggtagagcagatcctggcagagttccagctgcaggaggaggacctgaagaaggtgatgagacggatgcagaaggagatggaccgcggcctgaggctggagacccatgaagaggccagtgtgaagatgctgcccacctacgtgcgctccaccccagaaggctcagaagtcggggacttcctctccctggacctgggtggcactaacttcagggtgatgctggtgaaggtgggagaaggtgaggaggggcagtggagcgtgaagaccaaacaccagatgtactccatccccgaggacgccatgaccggcactgctgagatgatgaaacacaagaagctgcccctgggcttcaccttctcctttcctgtgaggcacgaagacatcgataagggcatccttctcaactggaccaagggcttcaaggcctcaggagcagaagggaacaatgtcgtggggcttctgcgagacgctatcaaacggagaggggactttgaaatggatgtggtggcaatggtgaatgacacggtggccacgatgatctcctgctactacgaagaccatcagtgcgaggtcggcatgatcgtgggcacgggctgcaatgcctgctacatggaggagatgcagaatgtggagctggtggagggggacgagggccgcatgtgcgtcaataccgagtggggcgccttcggggactccggcgagctggacgagttcctgctggagtatgaccgcctggtggacgagagctctgcaaaccccggtcagcagctgtatgagaagctcataggtggcaagtacatgggcgagctggtgcggcttgtgctgctcaggctcgtggacgaaaacctgctcttccacggggaggcctccgagcagctgcgcacacgcggagccttcgagacgcgcttcgtgtcgcaggtggagagcgacacgggcgaccgcaagcagatctacaacatcctgagcacgctggggctgcgaccctcgaccaccgactgcgacatcgtgcgccgcgcctgcgagagcgtgtctacgcgcgctgcgcacatgtgctcggcggggctggcgggcgtcatcaaccgcatgcgcgagagccgcagcgaggacgtaatgcgcatcactgtgggcgtggatggctccgtgtacaagctgcaccccagcttcaaggagcggttccatgccagcgtgcgcaggctgacgcccagctgcgagatcaccttcatcgagtcggaggagggcagtggccggggcgcggccctggtctcggcggtggcctgtaagaaggcctgtatgctgggccagtgagagc

SEQ ID NO: 8299 - DNA, 404 bp, Homo sapiens
  source 1..404: mol_type = unassigned DNA
tttatttaaattaaatacggaaggtcatagattaagcaagaaagtgccagcaacatggtgcgtgcctctgactgggcactaaccctccaagtcttagttttcccaaccataactggccaatgaacagcagctctggatgcagctaaaggaagactgaagctgtatgagaagctcataggtggcaagtacatgggcgagctggtgcggcttgtgctgctcaggctcgtggacgaaaacctgctcttccacggggaggcctccgagcagctgcgcacacgcggagccttcgagacgcgcttcgtgtcgcaggtggagagcgacacgggcgaccgcaagcagatctacaacatcctgagcacgctggggctgcgaccctcgaccaccgactgcgacatcgtgcgccg

SEQ ID NO: 8300 - DNA, 553 bp, Homo sapiens
  source 1..553: mol_type = unassigned DNA
tgaacccttctttttgcttgcgttgttgaaagaaggcaagtctatggataggaatgagtgaggcacagctccctgaggatgccatatcttgcccgtttcttgtgtattaagtgacatcacgtgttaccaaactaaaccggctgcatttgcctgcgcacaacataaaaccaaacacccaagcattggatttttgtagcaagaaagatgtattgccaagcagccttgcaaggggacagaagacgggctcaaatctgtctcccaatacttgcttcgcagcagtagatttaagggagagattttggaagtggagtttcgggctggacggtgattggctgaaacgaagaagtgtttagaaaatctcttggtcatgagctgttgcttcttcatgctgcttcaagggtcacatgcagattcaggaggtggtataaaacaagctgtgggaatttgggctgtgacatcaaagggccgctcctcgggctagtagagcagatcctggcagagttccagctgcaggaggaggacctgaagaaggtgatgagacggatgcagaagg

SEQ ID NO: 8301 - DNA, 2260 bp, Homo sapiens
  source 1..2260: mol_type = unassigned DNA
atgcccagaccaagatcccaactcccacaacccaactcccaggtagagcagatcctggcagagttccagctgcaggaggaggacctgaagaaggtgatgagacggatgcagaaggagatggaccgcggcctgaggctggagacccatgaagaggccagtgtgaagatgctgcccacctacgtgcgctccaccccagaaggctcagaagtcggggacttcctctccctggacctgggtggcactaacttcagggtgatgctggtgaaggtgggagaaggtgaggaggggcagtggagcgtgaagaccaaacaccagatgtactccatccccgaggacgccatgaccggcactgctgagatgctcttcgactacatctctgagtgcatctccgacttcctggacaagcatcagatgaaacacaagaagctgcccctgggcttcaccttctcctttcctgtgaggcacgaagacatcgataagggcatccttctcaactggaccaagggcttcaaggcctcaggagcagaagggaacaatgtcgtggggcttctgcgagacgctatcaaacggagaggggactttgaaatggatgtggtggcaatggtgaatgacacggtggccacgatgatctcctgctactacgaagaccatcagtgcgaggtcggcatgatcgtgggcacgggctgcaatgcctgctacatggaggagatgcagaatgtggagctggtggagggggacgagggccgcatgtgcgtcaataccgagtggggcgccttcggggactccggcgagctggacgagttcctgctggagtatgaccgcctggtggacgagagctctgcaaaccccggtcagcagctgtatgagaagctcataggtggcaagtacatgggcgagctggtgcggcttgtgctgctcaggctcgtggacgaaaacctgctcttccacggggaggcctccgagcagctgcgcacacgcggagccttcgagacgcgcttcgtgtcgcaggtggagagcgacacgggcgaccgcaagcagatctacaacatcctgagcacgctggggctgcgaccctcgaccaccgactgcgacatcgtgcgccgcgcctgcgagagcgtgtctacgcgcgctgcgcacatgtgctcggcggggctggcgggcgtcatcaaccgcatgcgcgagagccgcagcgaggacgtaatgcgcatcactgtgggcgtggatggctccgtgtacaagctgcaccccagcttcaaggagcggttccatgccagcgtgcgcaggctgacgcccagctgcgagatcaccttcatcgagtcggaggagggcagtggccggggcgcggccctggtctcggcggtggcctgtaagaaggcctgtatgctgggccagtgagagcagtggccgcaagcgcagggaggatgccacagccccacagcacccaggctccatggggaagtgctccccacacgtgctcgcagcctggcggggcaggaggcctggccttgtcaggacccaggccgcctgccataccgctggggaacagagcgggcctcttccctcagtttttcggtgggacagccccagggccctaacgggggtgcggcaggagcaggaacagagactctggaagccccccacctttctcgctggaatcaatttcccagaagggagttgctcactcaggactttgatgcatttccacactgtcagagctgttggcctcgcctgggcccaggctctgggaaggggtgccctctggatcctgctgtggcctcacttccctgggaactcatcctgtgtggggaggcagctccaacagcttgaccagacctagacctgggccaaaagggcagccaggggctgctcatcacccagtcctggccattttcttgcctgaggctcaagaggcccagggagcaatgggagggggctccatggaggaggtgtcccaagctttgaatacccccagagaccttttctctcccataccatcactgagtggcttgtgattctgggatggaccctcgcagcaggtgcaagagacagagcccccaagcctctgccccaaggggcccacaaaggggagaagggccagccctacatcttcagctcccatagcgctggctcaggaagaaaccccaagcagcattcagcacaccccaagggacaaccccatcatatgacatgccaccctctccatgcccaacctaagattgtgtgggttttttaattaaaaatgttaaaagttttaaacatg

SEQ ID NO: 8302 - DNA, 1771 bp, Homo sapiens
  source 1..1771: mol_type = unassigned DNA
agcctgtgtccgcccggcagccgcccgcagctgcagagagtcccgctgcgtctccgccgcgtgcgccctcctcgaccagcagacccgcgctgcgctccgccgctgacatgtgtgccgctcagatgccgcccctggcgcacatcttccgagggacgttcgtccactccacctggacctgccccatggaggtgctgcgggatcacctcctcggcgtgagcgacagcggcaaatgtttttagaagaagcatctcaacaggaaaaactggccaaagaatggtgcttcaagccgtgtgaaataagagaactgagccaccatgagttcttcatgcctgggctggttgatacacacatccatgcctctcagtattcctttgctggaagtagcatagacctgccactcttggagtggctgaccaagtacacatttcctgcagaacacagattccagaacatcgactttgcagaagaagtatataccagagttgtcaggagaacactaaagaatggaacaaccacagcttgttactttgcaacaattcacactgactcatctctgctccttgccgacattacagataaatttggacagcgggcatttgtgggcaaagtttgcatggatttgaatgacacttttccagaatacaaggagaccactgaggaatcgatcaaggaaactgagagatttgtgtcagaaatgctccaaaagaacagccatataagtgaaaatcgtgatgaagttgaagctgtgaaaaacttataccccagttataaaaactacacatctgtgtatgataaaaacaatcttttgacaaataagacagtgatggcacacggctgctacctctctgcagaagaactgaacgtattccatgaacgaggagcatccatcgcacactgtcccaattctaatttatcgctcagcagtggatttctaaatgtgctagaagtcctgaaacatgaagtcaagatagggctgggtacagacgtggctggtggctattcatattccatgcttgatgcaatcagaagagcagtgatggtttccaatatccttttaattaataaggtaaatgagaaaagcctcaccctcaaagaagtcttcagactagctactcttggaggaagccaagccctggggctggatggtgagattggaaactttgaagtgggcaaggaatttgatgccatcctgatcaaccccaaagcatccgactctcccattgacctgttttatggggacttttttggtgatatttctgaggctgttatccagaagttcctctatctaggagatgatcgaaatattgaagaggtttatgtgggcggaaagcaggtggttccgttttccagctcagtgaaagaaacaattcacttaccagcctcctcaccccatcctccaccatttccttaatgttccatggtattttcaacggaatacactttgaaagttctcagaataactgtagaatgtgctggaaatggaacattctcagataaggaggaactggccagatcaaactaagctgtgttcccatccctcctgaaacaggatcttatggtgctttagcccaggacgtcaagtatcccctaggtatgaaacccagagtggagcatgctttgaaggtccctcagctacatgcagactagactgcatgtagctgactctaactgccctgggaaactatcctgagctttgacagacctgccatgaatcttaagcttttattgtcccttgctgcctatctgtgaggaataaagttgcttcacttac

SEQ ID NO: 8303 - DNA, 5340 bp, Homo sapiens
  source 1..5340: mol_type = unassigned DNA
cggcagccgcccgcagctgcagagagtcccgctgcgtctccgccgcgtgcgccctcctcgaccagcagacccgcgctgcgctccgccgctgacatgtgtgccgctcagatgccgcccctggcgcacatcttccgagggacgttcgtccactccacctggacctgccccatggaggtgctgcgggatcacctcctcggcgtgagcgacagcggcaaaatagtgtttttagaagaagcatctcaacaggaaaaactggccaaagaatggtgcttcaagccgtgtgaaataagagaactgagccaccatgagttcttcatgcctgggctggttgatacacacatccatgcctctcagtattcctttgctggaagtagcatagacctgccactcttggagtggctgaccaagtacacatttcctgcagaacacagattccagaacatcgactttgcagaagaagtatataccagagttgtcaggagaacactaaagaatggaacaaccacagcttgttactttgcaacaattcacactgactcatctctgctccttgccgacattacagataaatttggacagcgggcatttgtgggcaaagtttgcatggatttgaatgacacttttccagaatacaaggagaccactgaggaatcgatcaaggaaactgagagatttgtgtcagaaatgctccaaaagaactattctagagtgaagcccatagtgacaccacgtttttccctctcctgctctgagactttgatgggtgaactgggcaacattgctaaaacccgtgatttgcacattcagagccatataagtgaaaatcgtgatgaagttgaagctgtgaaaaacttataccccagttataaaaactacacatctgtgtatgataaaaacaatcttttgacaaataagacagtgatggcacacggctgctacctctctgcagaagaactgaacgtattccatgaacgaggagcatccatcgcacactgtcccaattctaatttatcgctcagcagtggatttctaaatgtgctagaagtcctgaaacatgaagtcaagatagggctgggtacagacgtggctggtggctattcatattccatgcttgatgcaatcagaagagcagtgatggtttccaatatccttttaattaataaggtaaatgagaaaagcctcaccctcaaagaagtcttcagactagctactcttggaggaagccaagccctggggctggatggtgagattggaaactttgaagtgggcaaggaatttgatgccatcctgatcaaccccaaagcatccgactctcccattgacctgttttatggggacttttttggtgatatttctgaggctgttatccagaagttcctctatctaggagatgatcgaaatattgaagaggtttatgtgggcggaaagcaggtggttccgttttccagctcagtgtaagaccctcgggcgtctacaaagttctcctgggattagcgtggttctgcatctcccttgtgcccaggtggagttagaaagtcaaaaaatagtaccttgttcttgggatgactatccctttctgtgtctagttacagtattcacttgacaaatagttcgaaggaagttgcactaattctcaactctggttgagagggttcataaatttcatgaaaatatctccctttggagctgctcagacttactttaagctcaaacagaagggaatgctattactggtggtgttcctacggtaagacttaagcaaagcctttttcatatttgaaaatgtggaaagaaaagatgttcctaaaaggttagatattttgagctaataattgcaaaaattagaagactgaaaatggacccatgagagtatatttttatgagggagcaaaagttagactgagaacaaacgttagaaaatcacttcagattgtgtttgaaaattatatactgagcatactaatttaaaaagagaacttgttgaaatttaaaacgtgtttctaggttgaccttgtgttttagaaatttgcacttaatggaatttgcatttcagagatgtgttagtgttgtgctttgccttctttggcgatgaatgtcagaaattgaatgccacatgctttcataatatagttttgtgcttcaaagtgtttgacagaagttgggtattaaagatttaaagtctcttaggaatattattcatgtaactccatggcataaatagttgtatttttgtgtactttaaaatcaacttataactgtgagatgttattgcttccattttattagaagagaaacaaattccatgctttatggaatttatgtagactggagtcttcgtgaactggggcaaatgctggcatccaggagccgccaatactaacaggacaggttccattgccatggcctattccacccaaacaatatgttgtagtttctggaaattccatactcagatatcagtctgctagaactttaaaatgaaggacaaatcctgttaaagaaatattgttaaaaatctttaaaccctgtgtattgaaagcactctattttctaattttatccagttttctgtttaactccttataatgtttaggatattaaaattttaggataatgaagagtacataatgtcctacttaatatttatgttaataggacttaattcttactagacatctaggaacattacaaagcaaagactatttttatgcttccataacctagaattaaaaccaaattatgaccttatgataaatctttaagtattggtgtgaatgttatttaaattctatatttttcttatttaattacaaatactataaatgagcaaggaaaaggaatagactttcttaatatattataacactcattcctagagcttaggggtgactctttaatattaccttatagtagaaactttatgtaatatagctaactccgtatttacagaacaaaaaaacacagttccccctcctgtagtataaattttattttcacatacttagctaatttagcagtaattggcccagttttttccctaatagaaatacttttagatttgattatgtatacatgacacctaaagagggaacaaaagttagttttatttttttaataaacaacagagtttgttttgtgagataagtatcttagtaaacccaatttccagtcttagtctgtatttccaatatttctaattcctgagccacgtcaaagatgccttgccaaatttctccccatttctctacggggctagcaaaaatcttcagctttatcactcaacccctgccaaaggaacttgattacatggtgtctaaccaaatgagcaggcttaggaatttagatgagatgtgtaagattcacttacaggcagtagctgcttctagcatttgcaagatcctacacttttaccttctttaagggtgtacattttgatgttgaacatcagttttcatgtagacttaggactcatgtgcagtaaatataaataagtgtagcatcagaagcagtaggaatggccgtatacaaccatcctgttaaacatttaaatttagctctgatagtgtgttaagacctgaatatctttcctagtaaaaataggatgtgttgaaatatttatatgtactttgatctctccacatcacttataacttatgtgttttatttctccaagtgcggtgttcctgaatgttatgtatgcttttttttctgtaccacaggcattatctatacctggggccagattttctgcactttgaaatgttgcctttgcctaatgtaggttgactttctgaattgtggagaggcacttttccaagccaatcttatttgtcactttttgttttaatatcttgctctctgacaggaaagaaacaattcacttaccagcctcctcaccccatcctccaccatttccttaatgttccatggtattttcaacggaatacactttgaaaggtaaaaacaattcaaaagtatcgattatcataaattcacaaaatatttttgcaaccagaacacaaaagcaggctagtcagctaaggtaaatttcattttcaaacgagagggaaacatgggaagtaaaagattaggatgtgaaaggttgtcctaaacagaccaaggagactgttccctaatttattctcttggctggttctctcattgaattatcagaccccaagaggagatattggaacaggctcccttcatgccaagggtctttctaagttaatactgtgagcattgagcccccattaaaactcttttttacttcagaaagaattttacaggttaaagggaaagaaatggtgggaaactctccccgtaatgcttagccaactttaaagtgtacccttcaatatccccattggcaactgcagctgagatcttagagaggaaatataaccggtgtgagatctagcaatgcattttgaatcttcactccctaccaggctcttcctatttttaatctcttcacctcagaactagacatatggagagctttaaaggcaagctggaaggcacattgtatcaattctaccttgtgctatacgtaggagagatccaaaatttggatgcttctggagactcttagacatcttttcattgttgtccatttttaaagttgatgattgctggaaacattcacacgcttaaaagcaatggtgtgagttattaatgggtaaactaagaagtgttataggcaatgacttgaaatggtttttaaattgtatggattgttaagaattgttgaaaaaaaattttttttttttggacagcttcaaggagatgttagcaatttcagatatactagccagtttaggtatgactttggaagtgcagaaacagaaggatactgttagaaaatcctaacattggtctccgtgcatgtgttcacacctggtctcactgcctttccttcccacagacctgagtgtgaaagactgagagttgaggagttactttgtggatcttgtccaaatttagtgaaatgtggaagtcaaccagaccaatgatggaattaaatgtaaattccaagagggctttcacagtccacagggttcaaatgacttgggtaacagaagttattcttagcttacctgttatgtgacagtgatttacctgtccatttccaacccaaaagcctgtcagaaagcattctttagagaaaaccactttacatttgttgttaaactcctgatcgctactcttaagaatatacatgtatgtattcataggaacattttttctcaatatttgtatgattcgcttactgttattgtgctgagtgagctcctgtgtgcttcagacaaaaataaatgagactttgtgtttacgtta

SEQ ID NO: 8304 - DNA, 2019 bp, Homo sapiens
  source 1..2019: mol_type = unassigned DNA
gcccgcagctgcagagagtcccgctgcgtctccgccgcgtgcgccctcctcgaccagcagacccgcgctgcgctccgccgctgacatgtgtgccgctcagatgccgcccctggcgcacatcttccgagggacgttcgtccactccacctggacctgccccatggaggtgctgcgggatcacctcctcggcgtgagcgacagcggcaaaatagtgtttttagaagaagcatctcaacaggaaaaactggccaaagaatggtgcttcaagccgtgtgaaataagagaactgagccaccatgagttcttcatgcctgggctggttgatacacacatccatgcctctcagtattcctttgctggaagtagcatagacctgccactcttggagtggctgaccaagtacacatttcctgcagaacacagattccagaacatcgactttgcagaagaagtatataccagagttgtcaggagaacactaaagaatggaacaaccacagcttgttactttgcaacaattcacactgactcatctctgctccttgccgacattacagataaatttggacagcgggcatttgtgggcaaagtttgcatggatttgaatgacacttttccagaatacaaggagaccactgaggaatcgatcaaggaaactgagagatttgtgtcagaaatgctccaaaagaactattctagagtgaagcccatagtgacaccacgtttttccctctcctgctctgagactttgatgggtgaactgggcaacattgctaaaacccgtgatttgcacattcagagccatataagtgaaaatcgtgatgaagttgaagctgtgaaaaacttataccccagttataaaaactacacatctgtgtatgataaaaacaatcttttgacaaataagacagtgatggcacacggctgctacctctctgcagaagaactgaacgtattccatgaacgaggagcatccatcgcacactgtcccaattctaatttatcgctcagcagtggatttctaaatgtgctagaagtcctgaaacatgaagtcaagatagggctgggtacagacgtggctggtggctattcatattccatgcttgatgcaatcagaagagcagtgatggtttccaatatccttttaattaataaggtaaatgagaaaagcctcaccctcaaagaagtcttcagactagctactcttggaggaagccaagccctggggctggatggtgagattggaaactttgaagtgggcaaggaatttgatgccatcctgatcaaccccaaagcatccgactctcccattgacctgttttatggggacttttttggtgatatttctgaggctgttatccagaagttcctctatctaggagatgatcgaaatattgaagaggtttatgtgggcggaaagcaggtggttccgttttccagctcagtgtaagaccctcgggcgtctacaaagttctcctgggattagcgtggttctgcatctcccttgtgcccaggaaagaaacaattcacttaccagcctcctcaccccatcctccaccatttccttaatgttccatggtattttcaacggaatacactttgaaagacctgagtgtgaaagactgagagttgaggagttactttgtggatcttgtccaaatttagtgaaatgtggaagtcaaccagaccaatgatggaattaaatgtaaattccaagagggctttcacagtccacagggttcaaatgacttgggtaacagaagttattcttagcttacctgttatgtgacagtgatttacctgtccatttccaacccaaaagcctgtcagaaagcattctttagagaaaaccactttacatttgttgttaaactcctgatcgctactcttaagaatatacatgtatgtattcataggaacattttttctcaatatttgtatgattcgcttactgttattgtgctgagtgagctcctgtgtgcttcagacaaaaataaatgagactttgtgtttacgtta

SEQ ID NO: 8305 - DNA, 2359 bp, Homo sapiens
  source 1..2359: mol_type = unassigned DNA
attgtactgtggctgggctgaactcaaaccacaagatacagtccttcccactcttccttcccctttttgaaggtggaggagccttaccttgtgtccactgccaccacaggtcccctggaagtcctgccagactactgcctatgttcccttaaagcccaaggattcttagtcaacttgtgaattctgcctggcctgggataaactcttcagagcagtgggcttccctttggcccagggcagatccataaatgctgtgtaagagccaagttctggaactggggactccaggagcctgcttgatgttttattcttctgtggccgaactggtacctaaagttgtttttagaagaagcatctcaacaggaaaaactggccaaagaatggtgcttcaagccgtgtgaaataagagaactgagccaccagattagaagaaggcttggaagcagttgaagtagaggctgagatgggatgagagaatggtggaaacggttggaggatggagaggagggtaaacataacttgagttcttcatgcctgggctggttgatacacacatccatgcctctcagtattcctttgctggaagtagcatagacctgccactcttggagtggctgaccaagtacacatttcctgcagaacacagattccagaacatcgactttgcagaagaagtatataccagagttgtcaggagaacactaaagaatggaacaaccacagcttgttactttgcaacaattcacactgactcatctctgctccttgccgacattacagataaatttggacagcgggcatttgtgggcaaagtttgcatggatttgaatgacacttttccagaatacaaggagaccactgaggaatcgatcaaggaaactgagagatttgtgtcagaaatgctccaaaagaactattctagagtgaagcccatagtgacaccacgtttttccctctcctgctctgagactttgatgggtgaactgggcaacattgctaaaacccgtgatttgcacattcagagccatataagtgaaaatcgtgatgaagttgaagctgtgaaaaacttataccccagttataaaaactacacatctgtgtatgataaaaacaatcttttgacaaataagacagtgatggcacacggctgctacctctctgcagaagaactgaacgtattccatgaacgaggagcatccatcgcacactgtcccaattctaatttatcgtaagtagacaatgattgtttggtagattacgaatgattgggttgcagattagcagccaaatgcctttgtttcctctgtcattcctccaggatctcccctctattctgtgtttggcaggacccagatagatagacatttactcgtgctgttgaggagtaaaagagaacacgtaagaggacatttatctcagaggacacgtgaagagcacagcatcttctgaaatctctgagtttgtacaaaaaaaggacaatagggaatacaacataaaaaatttacagtgaaagtactgaaagaacccatatgtcagccaggaaatccagaagagggtagtcactcccattactgtttgtgctgtagtgtgagaaggaaacacagcaataccaaagcaaatgcactatgatgtatgttaccctgttggacctgacggaatgccagcccacacaggcaagcccaggaggaccttgtcctattataattccccagaatacagaggtgttatttattaactggttcttaaccttttgaaaggtgatggatccgtaaatgaataaaatgaaagttattgcctgggcgcagtggctcacatctgtaatcctagcactttgggaagcagaggcaggcagatcacttgaggtcaggagttcaagaccaccctgaccaacatggtgaaaccccatcagtattaaacatataaaaattagctgggcatggtggcaggcacctgtaatcccaaccactcaggaggctgaggcaagagaatcgtttgaacccgggaggcggaggttgcagtgagccaagattgcaccactgcactccagcctgggtgacagagtgagactctgtctcagaaaaataaataagttatagcctgtaatttcaggggaaaaaagcccatggatattacaagtgttgcatctaatttcagggaattcatagatctcatgatgccagtccatggatgctaggttaaaaacccatgcttgtggctgtaatctcagaaaacaacttcaggggtcgggcgtggtggctcacacctctaatcccagcactttgggaggccaaggtgggcggatcacgaggtcaggagatcgagaccatcccggctaacacggtgaaacccagtctctact

SEQ ID NO: 8306 - DNA, 694 bp, Homo sapiens
  source 1..694: mol_type = unassigned DNA
cagcttgttactttgcaacaattcacactgactcatctctgctccttgccgacattacagataaatttggacagcgggcatttgtgggcaaagtttgcatggatttgaatgacacttttccagaatacaaggagaccactgaggaatcgatcaaggaaactgagagactgtcactctgtcacccaggctggagtgcaatggcgcgatctcagctcactgaaacctccacctcctgtgttcaagagattctcctgcctcagcctcccgagtagctgggattacagatttgtgtcagaaatgctccaaaagaactattctagagtgaagcccatagtgacaccacgtttttccctctcctgctctgagactttgatgggtgaactgggcaacattgctaaaacccgtgatttgcacattcagagccatataagtgaaaatcgtgatgaagttgaagctgtgaaaaacttataccccagttataaaaactacacatctgtgtatgataaaaacaatcttttgacaaataagacagtgatggcacacggctgctacctctctgcagaagaactgaacgtattccatgaacgaggagcatccatcgcacactgtcccaattctaatttatcgctcagcagtggatttctaaatgtgctagaagtcctgaaacatgaagtcaagatagggctgggtacag

SEQ ID NO: 8307 - DNA, 888 bp, Homo sapiens
  source 1..888: mol_type = unassigned DNA
acggctgctacctctctgcagaagaactgaacgtattccatgaacgaggagcatccatcgcacactgtcccaattctaatttatcgctcagcagtggatttctaaatgtgctagaagtcctgaaacatgaagtcaagatagggctgggtacagacgtggctggtggctattcatattccatgcttgatgcaatcagaagagcagtgatggtttccaatatccttttaattaataaggtaaatgagaaaagcctcaccctcaaagaagtcttcagactagctactcttggaggaagccaagccctggggctggatggtgagattggaaactttgaagtgggcaaggaatttgatgccatcctgatcaaccccaaagcatccgactctcccattgacctgttttatggggacttttttggtgatatttctgaggctgttatccagaagttcctctatctaggagatgatcgaaatattgaagaggtttatgtgggcggaaagcaggtggttccgttttccagctcagtgtaagaccctcgggcgtctacaaagttctcctgggattagcgtggttctgcatctcccttgtgcccaggaaagaaacaattcacttaccagcctcctcaccccatcctccaccatttccttaatgttccatggtattttcaacggaatacactttgaaaggctgatcttgatatcctggtctcaagtgatcctcccacctcagcattctaaagtgctaggattacagacatgagctactgcacccagccaattggaggccttgccccagcaggtggggaaggaaatgccagccaagttcccaccacatgcagaaacctgagagggtgaaccctacccatcaacacctggagaccttttcctg

SEQ ID NO: 8308 - DNA, 990 bp, Homo sapiens
  source 1..990: mol_type = unassigned DNA
gaacgaggagcatccatcgcacactgtcccaattctaatttatcgctcagcagtggatttctaaatgtgctagaagtcctgaaacatgaagtcaagatagggctgggtacagacgtggctggtggctattcatattccatgcttgatgcaatcagaagagcagtgatggtttccaatatccttttaattaataaggtaaatgagaaaagcctcaccctcaaagaagtcttcagactagctactcttggaggaagccaagccctggggctggatggtgagattggaaactttgaagtgggcaaggaatttgatgccatcctgatcaaccccaaagcatccgactctcccattgacctgttttatggggacttttttggtgatatttctgaggctgttatccagaagttcctctatctaggagatgatcgaaatattgaagaggtttatgtgggcggaaagcaggtggttccgttttccagctcagtgaaagaaacaattcacttaccagcctcctcaccccatcctccaccatttccttaatgttccatggtattttcaacggaatacactttgaaagacctgagtgtgaaagactgagagttgaggagttactttgtggatcttgtccaaatttagtgaaatgtggaagtcaaccagaccaatgatggaattaaatgtaaattccaagagggctttcacagtccacagggttcaaatgacttgggtaacagaagttattcttagcttacctgttatgtgacagtgatttacctgtccatttccaacccaaaagcctgtcagaaagcattctttagagaaaaccactttacatttgttgttaaactcctgatcgctactcttaagaatatacatgtatgtattcataggaacattttttctcaatatttgtatgattcgcttactgttattgtgctgagtgagctcctgtgtgcttcagacaaaaataaatgagactttgtgtttacgtta

SEQ ID NO: 8309 - DNA, 2074 bp, Homo sapiens
  source 1..2074: mol_type = unassigned DNA; mol_type = unassigned DNA
agaaaaatcctattggcattgaggaggtagggagccagcccctgggcgcggcctgcagggtaccggcaaccgcccgggtaagcgggggcaggacaaggccggagcctgtgtccgcccggcagccgcccgcagctgcagagagtcccgctgcgtctccgccgcgtgcgccctcctcgaccagcagacccgcgctgcgctccgccgctgacatgtgtgccgctcagatgccgcccctggcgcacatcttccgagggacgttcgtccactccacctggacctgccccatggaggtgctgcgggatcacctcctcggcgtgagcgacagcggcaaaatagtgtttttagaagaagcatctcaacaggaaaaactggccaaagaatggtgcttcaagccgtgtgaaataagagaactgagccaccatgagttcttcatgcctgggctggttgatacacacatccatgcctctcagtattcctttgctggaagtagcatagacctgccactcttggagtggctgaccaagtacacatttcctgcagaacacagattccagaacatcgactttgcagaagaagtatataccagagttgtcaggagaacactaaagaatggaacaaccacagcttgttactttgcaacaattcacactgactcatctctgctccttgccgacattacagataaatttggacagcgggcatttgtgggcaaagtttgcatggatttgaatgacacttttccagaatacaaggagaccactgaggaatcgatcaaggaaactgagagatttgtgtcagaaatgctccaaaagaactattctagagtgaagcccatagtgacaccacgtttttccctctcctgctctgagactttgatgggtgaactgggcaacattgctaaaacccgtgatttgcacattcagagccatataagtgaaaatcgtgatgaagttgaagctgtgaaaaacttataccccagttataaaaactacacatctgtgtatgataaaaacaatcttttgacaaataagacagtgatggcacacggctgctacctctctgcagaagaactgaacgtattccatgaacgaggagcatccatcgcacactgtcccaattctaatttatcgctcagcagtggatttctaaatgtgctagaagtcctgaaacatgaagtcaagatagggctgggtacagacgtggctggtggctattcatattccatgcttgatgcaatcagaagagcagtgatggtttccaatatccttttaattaataaggtaaatgagaaaagcctcaccctcaaagaagtcttcagactagctactcttggaggaagccaagccctggggctggatggtgagattggaaactttgaagtgggcaaggaatttgatgccatcctgatcaaccccaaagcatccgactctcccattgacctgttttatggggacttttttggtgatatttctgaggctgttatccagaagttcctctatctaggagatgatcgaaatattgaagaggtttatgtgggcggaaagcaggtggttccgttttccagctcagtgaaagaaacaattcacttaccagcctcctcaccccatcctccaccatttccttaatgttccatggtattttcaacggaatacactttgaaagacctgagtgtgaaagactgagagttgaggagttactttgtggatcttgtccaaatttagtgaaatgtggaagtcaaccagaccaatgatggaattaaatgtaaattccaagagggctttcacagtccacagggttcaaatgacttgggtaacagaagttattcttagcttacctgttatgtgacagtgatttacctgtccatttccaacccaaaagcctgtcagaaagcattctttagagaaaaccactttacatttgttgttaaactcctgatcgctactcttaagaatatacatgtatgtattcataggaacattttttctcaatatttgtatgattcgcttactgttattgtgctgagtgagctcctgtgtgcttcagacaaaaataaatgagactttgtgtttacgtt

SEQ ID NO: 8310 - DNA, 5362 bp, Homo sapiens
  source 1..5362: mol_type = unassigned DNA; mol_type = unassigned DNA
attctcccgcctcagtctcctgagtagccgggactacaggcacccgctacaacgcccggctaattttttttgtatttccccttccttctttgctttcaaaatccaggcttaggggtacaaaaacctatattgtctgagacaggaagcactccgaagtttgaagaagagggcagcagcccaactcagaagaactggactccccagcactataaggagagagggtggtggttccaccagagatagtgtttttagaagaagcatctcaacaggaaaaactggccaaagaatggtgcttcaagccgtgtgaaataagagaactgagccaccatgagttcttcatgcctgggctggttgatacacacatccatgcctctcagtattcctttgctggaagtagcatagacctgccactcttggagtggctgaccaagtacacatttcctgcagaacacagattccagaacatcgactttgcagaagaagtatataccagagttgtcaggagaacactaaagaatggaacaaccacagcttgttactttgcaacaattcacactgactcatctctgctccttgccgacattacagataaatttggacagcgggcatttgtgggcaaagtttgcatggatttgaatgacacttttccagaatacaaggagaccactgaggaatcgatcaaggaaactgagagatttgtgtcagaaatgctccaaaagaactattctagagtgaagcccatagtgacaccacgtttttccctctcctgctctgagactttgatgggtgaactgggcaacattgctaaaacccgtgatttgcacattcagagccatataagtgaaaatcgtgatgaagttgaagctgtgaaaaacttataccccagttataaaaactacacatctgtgtatgataaaaacaatcttttgacaaataagacagtgatggcacacggctgctacctctctgcagaagaactgaacgtattccatgaacgaggagcatccatcgcacactgtcccaattctaatttatcgctcagcagtggatttctaaatgtgctagaagtcctgaaacatgaagtcaagatagggctgggtacagacgtggctggtggctattcatattccatgcttgatgcaatcagaagagcagtgatggtttccaatatccttttaattaataaggtaaatgagaaaagcctcaccctcaaagaagtcttcagactagctactcttggaggaagccaagccctggggctggatggtgagattggaaactttgaagtgggcaaggaatttgatgccatcctgatcaaccccaaagcatccgactctcccattgacctgttttatggggacttttttggtgatatttctgaggctgttatccagaagttcctctatctaggagatgatcgaaatattgaagaggtttatgtgggcggaaagcaggtggttccgttttccagctcagtgtaagaccctcgggcgtctacaaagttctcctgggattagcgtggttctgcatctcccttgtgcccaggtggagttagaaagtcaaaaaatagtaccttgttcttgggatgactatccctttctgtgtctagttacagtattcacttgacaaatagttcgaaggaagttgcactaattctcaactctggttgagagggttcataaatttcatgaaaatatctccctttggagctgctcagacttactttaagctcaaacagaagggaatgctattactggtggtgttcctacggtaagacttaagcaaagcctttttcatatttgaaaatgtggaaagaaaagatgttcctaaaaggttagatattttgagctaataattgcaaaaattagaagactgaaaatggacccatgagagtatatttttatgagggagcaaaagttagactgagaacaaacgttagaaaatcacttcagattgtgtttgaaaattatatactgagcatactaatttaaaaagagaacttgttgaaatttaaaacgtgtttctaggttgaccttgtgttttagaaatttgcacttaatggaatttgcatttcagagatgtgttagtgttgtgctttgccttctttggcgatgaatgtcagaaattgaatgccacatgctttcataatatagttttgtgcttcaaagtgtttgacagaagttgggtattaaagatttaaagtctcttaggaatattattcatgtaactccatggcataaatagttgtatttttgtgtactttaaaatcaacttataactgtgagatgttattgcttccattttattagaagagaaacaaattccatgctttatggaatttatgtagactggagtcttcgtgaactggggcaaatgctggcatccaggagccgccaatactaacaggacaggttccattgccatggcctattccacccaaacaatatgttgtagtttctggaaattccatactcagatatcagtctgctagaactttaaaatgaaggacaaatcctgttaaagaaatattgttaaaaatctttaaaccctgtgtattgaaagcactctattttctaattttatccagttttctgtttaactccttataatgtttaggatattaaaattttaggataatgaagagtacataatgtcctacttaatatttatgttaataggacttaattcttactagacatctaggaacattacaaagcaaagactatttttatgcttccataacctagaattaaaaccaaattatgaccttatgataaatctttaagtattggtgtgaatgttatttaaattctatatttttcttatttaattacaaatactataaatgagcaaggaaaaggaatagactttcttaatatattataacactcattcctagagcttaggggtgactctttaatattaccttatagtagaaactttatgtaatatagctaactccgtatttacagaacaaaaaaacacagttccccctcctgtagtataaattttattttcacatacttagctaatttagcagtaattggcccagttttttccctaatagaaatacttttagatttgattatgtatacatgacacctaaagagggaacaaaagttagttttatttttttaataaacaacagagtttgttttgtgagataagtatcttagtaaacccaatttccagtcttagtctgtatttccaatatttctaattcctgagccacgtcaaagatgccttgccaaatttctccccatttctctacggggctagcaaaaatcttcagctttatcactcaacccctgccaaaggaacttgattacatggtgtctaaccaaatgagcaggcttaggaatttagatgagatgtgtaagattcacttacaggcagtagctgcttctagcatttgcaagatcctacacttttaccttctttaagggtgtacattttgatgttgaacatcagttttcatgtagacttaggactcatgtgcagtaaatataaataagtgtagcatcagaagcagtaggaatggccgtatacaaccatcctgttaaacatttaaatttagctctgatagtgtgttaagacctgaatatctttcctagtaaaaataggatgtgttgaaatatttatatgtactttgatctctccacatcacttataacttatgtgttttatttctccaagtgcggtgttcctgaatgttatgtatgcttttttttctgtaccacaggcattatctatacctggggccagattttctgcactttgaaatgttgcctttgcctaatgtaggttgactttctgaattgtggagaggcacttttccaagccaatcttatttgtcactttttgttttaatatcttgctctctgacaggaaagaaacaattcacttaccagcctcctcaccccatcctccaccatttccttaatgttccatggtattttcaacggaatacactttgaaaggtaaaaacaattcaaaagtatcgattatcataaattcacaaaatatttttgcaaccagaacacaaaagcaggctagtcagctaaggtaaatttcattttcaaacgagagggaaacatgggaagtaaaagattaggatgtgaaaggttgtcctaaacagaccaaggagactgttccctaatttattctcttggctggttctctcattgaattatcagaccccaagaggagatattggaacaggctcccttcatgccaagggtctttctaagttaatactgtgagcattgagcccccattaaaactcttttttacttcagaaagaattttacaggttaaagggaaagaaatggtgggaaactctccccgtaatgcttagccaactttaaagtgtacccttcaatatccccattggcaactgcagctgagatcttagagaggaaatataaccggtgtgagatctagcaatgcattttgaatcttcactccctaccaggctcttcctatttttaatctcttcacctcagaactagacatatggagagctttaaaggcaagctggaaggcacattgtatcaattctaccttgtgctatacgtaggagagatccaaaatttggatgcttctggagactcttagacatcttttcattgttgtccatttttaaagttgatgattgctggaaacattcacacgcttaaaagcaatggtgtgagttattaatgggtaaactaagaagtgttataggcaatgacttgaaatggtttttaaattgtatggattgttaagaattgttgaaaaaaaattttttttttttggacagcttcaaggagatgttagcaatttcagatatactagccagtttaggtatgactttggaagtgcagaaacagaaggatactgttagaaaatcctaacattggtctccgtgcatgtgttcacacctggtctcactgcctttccttcccacagacctgagtgtgaaagactgagagttgaggagttactttgtggatcttgtccaaatttagtgaaatgtggaagtcaaccagaccaatgatggaattaaatgtaaattccaagagggctttcacagtccacagggttcaaatgacttgggtaacagaagttattcttagcttacctgttatgtgacagtgatttacctgtccatttccaacccaaaagcctgtcagaaagcattctttagagaaaaccactttacatttgttgttaaactcctgatcgctactcttaagaatatacatgtatgtattcataggaacattttttctcaatatttgtatgattcgcttactgttattgtgctgagtgagctcctgtgtgcttcagacaaaaataaatgagactttgtgtttacgtt

SEQ ID NO: 8311 - DNA, 2458 bp, Homo sapiens
  source 1..2458: mol_type = unassigned DNA; mol_type = unassigned DNA
gccgactcgggctcggctcggctctgcgctgctccggacggctgtgaccgctggccgggggctcgggccgccggtacccacggaccgcgcgcccgggtgcctgctccgctaagcccctcgccccgcgcggacctcggtatccagcgccctgctgcccgggctctccccgcgcgccctactgccgcgaggtcagtccgcagcctccggtgcgccagcgctcgccttcctcctcctggacttcggccctttgccgccctcaccacgccatggctcatgtccccgctcggaccagcccgggacccgggccccagctgctgctgctgctgctgccgttgtttctgctgttgctccgggatgtggccggcagccacagggcccccgcctggtccgcactgcccgcggccgccgacggcctgcagggggacagggatctccagcggcaccctggggacgcggccgccacgttgggccccagcgcccaggacatggtcgctgtccacatgcacaggctctatgagaagtacagccggcagggcgcgcggccgggagggggcaacacggtccgcagcttcagggccaggctggaagtggtcgaccagaaggccgtgtatttcttcaacctgacttccatgcaagactcggaaatgatccttacggccactttccacttctactcagagccgcctcggtggcctcgagcgctcgaggtgctatgcaagccgcgggccaagaacgcttcaggccgcccgctgcccctgggcccgcccacacgccagcacctgctcttccgcagcctctcgcagaacacggccacacaggggctactccgcggggccatggccctggcgcccccaccgcgcggcctgtggcaggccaaggacatctcccccatcgtcaaggcggcccgccgggatggcgagctgctcctctccgcccagctggattctgaggagagggacccgggggtgccccggcccagcccctatgcgccctacatcctagtctatgccaacgatctggccatctcggagcccaacagcgtggcagtgacgctgcagagatacgaccccttccctgccggagaccccgagccccgcgcagcccccaacaactcagcggacccccgcgtgcgccgagccgcgcaggccactgggcccctccaggacaacgagctgccggggctggatgagaggccgccgcgcgcccacgcacagcacttccacaagcaccagctgtggcccagccccttccgggcgctgaaaccccggccagggcgcaaagaccgcaggaagaagggccaggaggtgttcatggccgcctcgcaggtgctggactttgacgagaagacgatgcagaaagcccggaggaagcagtgggatgagccgagggtgtgctcccggaggtacctgaaggtggacttcgcagacatcggctggaatgaatggataatctcaccgaaatcttttgatgcctactactgcgcgggagcatgtgagttccccatgcctaagatcgttcgtccatccaaccatgccaccatccagagcattgtcagggctgtgggcatcatccctggcatcccagagccctgctgtgttcccgataagatgaactcccttggggtcctcttcctggatgagaatcggaatgtggttctgaaggtgtaccccaacatgtccgtggacacctgtgcctgccggtgagaccactccagggtggaaagaagccacgcccagcagagctgccttctcggagccttctgcaaccaggacttgtggtgcagctgcagacacagagcacagctcatgggcaacatcactggggcccagagagagctgtccgccagtgcatcattagggggtctttcattgctagtgactagccccttaaatgccagcctgagtacctgaaggaatctgggaattagccctggcctgaaagtggcccatcattcatacccactgttctgaaggcttgaaaacaaaacatatccacaacattggcttgatgtgatcatcatctcataactgagcaagaagactatgcaaatcttagggcgctcgctccctgcacacggaaagaactctgtttaaatgctcagttcagaacactttgggccacatagtgattttggaaaacaggataatcgtggtgtaaatgagtgtttcctttcaaagtccactgcagagcttttatccatatggtatgcacatgtagccaatattggtttctttttcttaatatatatattttattttaaaacaacaaaaagggagggcgttgacaccattccccacagagatagtcatgctgagtgtgggttgtttaaacatgcatattgaaataacacatatagtaacgtgggaatactaaaaaataaccaagattttatatttttgtaaattatactttctatactgtagattgtgtatgttatgtgtttttatggaaagctaat

SEQ ID NO: 8312 - DNA, 8657 bp, Homo sapiens
  source 1..8657: mol_type = unassigned DNA; mol_type = unassigned DNA
tccccgccccccagtcctccctcccctcccctccagcatggtgctcgcggccccgctgctgctgggcttcctgctcctcgccctggagctgcggccccggggggaggcggccgagggccccgcggcggcggcggcggcggcggcggcggcggcagcggcgggggtcgggggggagcgctccagccggccagccccgtccgtggcgcccgagccggacggctgccccgtgtgcgtttggcggcagcacagccgcgagctgcgcctagagagcatcaagtcgcagatcttgagcaaactgcggctcaaggaggcgcccaacatcagccgcgaggtggtgaagcagctgctgcccaaggcgccgccgctgcagcagatcctggacctacacgacttccagggcgacgcgctgcagcccgaggacttcctggaggaggacgagtaccacgccaccaccgagaccgtcattagcatggcccaggagacggacccagcagtacagacagatggcagccctctctgctgccattttcacttcagccccaaggtgatgttcacaaaggtactgaaggcccagctgtgggtgtacctacggcctgtaccccgcccagccacagtctacctgcagatcttgcgactaaaacccctaactggggaagggaccgcagggggagggggcggaggccggcgtcacatccgtatccgctcactgaagattgagctgcactcacgctcaggccattggcagagcatcgacttcaagcaagtgctacacagctggttccgccagccacagagcaactggggcatcgagatcaacgcctttgatcccagtggcacagacctggctgtcacctccctggggccgggagccgaggggctgcatccattcatggagcttcgagtcctagagaacacaaaacgttcccggcggaacctgggtctggactgcgacgagcactcaagcgagtcccgctgctgccgatatcccctcacagtggactttgaggctttcggctgggactggatcatcgcacctaagcgctacaaggccaactactgctccggccagtgcgagtacatgttcatgcaaaaatatccgcatacccatttggtgcagcaggccaatccaagaggctctgctgggccctgttgtacccccaccaagatgtccccaatcaacatgctctacttcaatgacaagcagcagattatctacggcaagatccctggcatggtggtggatcgctgtggctgctcttaaggtgggggatagaggatgcctcccccacagaccctaccccaagacccctagccctgcccccatccccccaagccctagagctccctccactcttcccgcgaacatcacaccgttccccgaccaagccgtgtgcaatacaacagagggaggcaggtgggaattgagggtgaggggtttgggggaaaggggaagcaggggcatagtcagggtggggagtgtttgaagtttgcagatgagaaggtttgacaaaaagacagagagatgtagagacagtgatagagacagaggaacaaaaagagcagcagtgagaaggcaaagagagaggcagaagagacagacgaggcagagacaaaacactgagaaagagactgaaatggagtaataaatgaaagccccacaccaagcctcctttcttccactggcaaggtgaggggcttggtatagtttggggagatcccctgactattcagtaggagaagaaatcaaaaatccattcttttctccttctctccctccaacagtggccaggggaaggggaagtgagggcaggggcaaaaagatttgggaatttttatttatttatttattgtgacttttcatttttttggtatttggctttactggaataggagggcccctgcccactgtgccccgtttatcccttattccccaaaccctgctctccccaacacctactcacttaagcacttgtataaagcctccagggttgggaatgggagtaaagggcaagagggcggacacatgaagtttagtttctaacccatcatcaccctaactcaaccttttctgagccaaatggcttgaattgaagccagttgtcatggaaatagtaagaggttagggtttaagagctggggatgcgggggtgggagagagaaccctcaacatccaggatctatataatgagagctactttaaaccctcaggtccaccctcatgatgctgagttatttagccagagggtgcagcctgcttatgcccaaattccctcagccaagagagagaccaaagagcctctggaatggccctgctcccagcctctatcttcaggtcaattagagagagtatagagaccccagagtcccctgggtctggaaagcgttaggagaggtcaagaaaggagcagtaaggaggctgaaggttacagggcatttgaatccaaatcactgctctgggctagggaatagagccagcagaccaaggtgggaaggattctggaagggggacattttagtctcctaaccccaaagctcagggtggaagaggggagaacaaggaagcagagtgtataattattttttccttttatttttggaatctaacagtacctggcagcagggaggggaaagtacagtggggaaaagcatctgacaaggccagttagaacagaggatgggaaggatggagactcccgggcttggaaggctaggaagcaggcagagactggttgccatttcaagtcactagctaggcccattcattcctcccacaaccctgacccattctcctctggactcactgtgcctcagtttcttcccctcaatggaatgagaaatgacagcacccgccacagccaagagatgaattctgagcacttaccacgggcactttatggacataaaatacctctcgctgtgggacagataaccagggcaccagagtagtggtgaagagatgtgaggcttaagaggagtcacaggcttcagagtacaagttcccctctgcctcccagctggacagtgcctagaagccaaggagttgagaatctcctgatccacaccctatccttacttcaccaccaggcctcttggctccaggcaagagcttagaggatgtcaggagaggtgggggtaagaatcttcagcaaaactgtcactctaagtagagccagcagttacgggtctgataaaaacagtactgaactaaagtaaagcccaagctggtgagcaaaactggatggctcattcttcccaagagcatgactctcccccttggccagttggtggaaggggcaaaggtatgtgaccacccttgagaaggtgatgttggtgagctttaacatcttattcctattcttatagtgagaaagtgaaacaagatctttcagtagaggaatgggcagggctgttaggctcttcagcttgccttcacccatatagcagctatgctaaccccaagcctctctggccctgttcttcatccttccttctgccccaatcctgaaggacaagacacacccggccatcaacaccactcacatttccttggtggaaggaaaggaacagagaagtgaagaacagatacctccctccaaggtcaaatgcctcgtgatcttggcagagtagggattgggcaataagcatcaggtatcttccctctacagattctagagagctggggcattaaatatgggggacacttagaatacagctccttaaataccaccaaataaagacctttgtgtgtgtgtggtgggtggggggggggcaggggtctttctcttatgaacataaatctgtgagctgaagtctcattcccctgttcctccctacccccaaagaggcacagagtgaagggacttggggggcacagctcagcaacccagtgggagttagcaccccctcccaccttatgatgtgtgtggacctggccagtgcccctctgaacatatcattattagtgtaattatcatttattttgtgtatttgtcacattgtgtgcatgacagcctttgttaagggtgtctgaggagtatggagctgacaggggcattggaatgccaggaaagaacttcttcaactgagatcaaggcttcctggagggaaccactgcaaaaaggccatcaggcagttttcaagttatgtgacagagggcaaagacggccatagggtgctctgagttttgggatggtcacatgacacaatccagcacttgaacctgaaaaaaaaaataaaagcggtcaaagagtttagaattcagtgctgagctcttctccctaatcaagtgccacatttacaccttggagaaccggaggtgaagaggatctgagacaggaaacctcgtgttcaatgactaagaagatggggtcctggagcaagacagaaaacactaagggcatggtggtataaggtttgggacatgcaggccaaggaaggatggaaagaggacaggaaactgggggtacctagaacaacccctctctgaaaagcttgagccaaaacagtcccaaagacaacaagacccctctcccagcctccacagaatggaagatctaaaggttctcttgagatgatccagctagtatggaagatctaaaggttctcttgagatgatccagctagtgtcctattctcctgcagtccctgttcctaggtttcctcaacgaagtttgacaaaaatctaaaccaacatagccaacgaacttgccttgttacacaagagtggctaaaatagcatctcaaatattctttcagttcactgtaaaaatttttcccatgtacctagagcacaattccccaggaatatgagttgggaatggcaaaagaatattgcctgactcacatttttcaaaaataaggaaagctggctgggcgcagtggcttacatctgtaatcccagcactttggggggccgaggcgggcggatcatgcaaggtccggagttcgagaccatgctggccaacattgtgaaacctcatctctactaaaatacccaaaattagccgggcgtggtggcgtgcgcctgtaatcccagctacatggaaggctgaggcagaagaatcgcttgaacccaggtggcggaggttgcagtgagctgagatcgcaccactgcactctagcatggtgacagagtgagactcccatctccaaaaaaaaaaaaaaaaaaaaaaaaaggaaagcaggacccagtggtgtgctcctgtagttccagctattcaggaggctgtggcaggaggaccacttgaggccagagggtcaaggctgcagtgtgctataattgggcctgtaaatagccactgtactccaagctgagcaacacagtaagacactgtctctaaaaataattaaagtaaaataaaaataaggaaagctcctgtgacatcaacctgatccagaattggggacagcgctactgcgggttcaatgtactgccatgttttccctgtcttatcagttctatcagcacactgaccccactcgagaccaactacaagactaaggctggaagtggttgagtagcagaagtgttatgtattctatcttcccaagggaaccatatccacatctacccctaactttggcctgagctgaaaatgggttttctctccctgtggctcatttgtttcctatattgagagaacacccaaaaaaagactactcaagatgactttttacaagtcttttctttatcctaaaacatcctccaaccgaaggcatgggaagctatcctatactctgaccttgcctatattttaaatggcaggggccccaagctaagaatcagcaggcagtggcatctacagcttctggtctgtagtggcgtagaagcaggaaaatcaatgctccaaagcaacaatgtccagctttcctgccagtgagctgggcttgagggagtgaatgggactctttctgccttttctttttctcaaaatacgactgcattaactgggtgtatgcacacacaaacatgttcaaactagggcactcatacctagctagaacctactcagggaaagaaatatgtatttccacagtaccctgatcacccagtaaaagctaatatttattgaataattactatgcaaattatggtaagcaaattgtagtgtgaatacatgatatgagaatatcacttaattcacacagcaaccttcacaatggggttccttttggtacagtctgaaaagagaatgattatctgcgcagggtctcagagctagtgtggtagaataagaaattaaacctaagtagttgctaaacaatattacattctaatctatcctattgaaagtgatccgggaggtagaaacctaaatacaggaataacataagggaaagagataacaagaaagttagggacaccttggactcaaagaatctggaaagatgtgaaacctgtaattttaaatccctttggaagggaaaaacaagaaaagtctagatatggcaagagaaggggaggttaaattttggggggattccaataatcagaaataagtggcattgccagaggccctcatataagagaacagcaaaaaagttatcctcccttaagttcctccctcactcctcatatcagacacagcaagagaactcagctcaacaccaagaagtcctgcccttattcacaccttccttcctatagccctcatcctcacagaagcttctagcctctatcttcagcagttcttaagaggtggggtggggggctgggcagtttagagtgagagtggaaaaaaagaataatcctagagaaccataaaaaagtacagatttacagctgaggaagctagttctccccacagcttttatagactccctcattaagagcttccaggtatgcagagaatgtcacagcttcaggaattggaatcagttaaccacatctggatgctggatcaactatagtagggaaacggggagaggaaggaagggtactaagatctcaggtaaacaattacaagcctcaatgtctgttccatctccaaacggaattactattttaaaactgaattgggaaaaaggcatcctgaactattcatgctcaaagagtatgtggagaatgactataatgagataggaaggggaggacttcatctggcttggaggttagagacttctgaccaacataggaacagctgctgaaatgggatgaaagaggttaataagaaaaaaaaaaaaatcctcacaaattggaaaacactgttcaaagatctaggggaagtaagatgagtgaggagaataattaggcttcaagaagagaatcctggcaagtaaggctgaatatctttctggaaggttatagaggataaagagacgaagaaaacttccaaaagatccactgttccacttcataatcagcatctgctctattccctcatgtatttttctctttttaaaaccatattcaggaagaaaccattagtgaatctataatctctcaagttacaaatcagatctattctgttttcagatgaaggcagagtagagagaggaaaagctagccccaagatcagagcctgaggtaaagaaaaggaaggcagacagaaaagagggaaaagggaaggtcattccaattttaaggtttatttggttgaagaggtgtcaaaaatttaaccagcattcccttttgttcacttctccaaagtctcagaatggggcaaacttcacaacaaatgggcagcagtttttggatctgctctccaaggcacaatttttctaaattatctaaactttaggtccctgctttcctcaccaaccagagactttggagaaataaagagatatcttgacattagaaaggtgatcaaactattaccatttcattaagcacaaaaccaggcaggttttagtagaaataaggataaaggattacaccacagcaacatgggacctgatcatagtaccaaagtcttcaggtaaggtgtcaggctcctaagtcttattaccaaaaatagctcaaacaaaaaccgagcttatataaagattaagaggagaaattctgcaataacatatccaaaaagattaagcaggtttcagatctacatgaacttgaagcctccagttccactgcttatgttcccaatgatttagctaacaatgcgtaacagctctgacatcctctgtcatgctttgattctgcatacaaaatttcttctgtctctgagggatatccagcccatctcccttcctgaactgactgaccaacatagtatcgtatcacatcacccttgaaatcagggcccttttcctttaatgtgggaccctggactccattttatccaagaaaaagtctgcattattagctaataacagaaggctactaatcactgcccttgtatttatatcctttgcaacacctaaaacctcccatgttctgttttatttcagtgggtcactacaagctgctggagcaaagacttggtgggtgggtaacttaacctcttcacagaggataaaaaatgcttgtgagtatgacagaagggaataaacaggcttaaagggtaaactcagtccttttccttgtcttctcttctaagggataaaggtattatggccaattctctataatatttgcccctgaagctccccttatctggtctaatctagctccaataaatcaaaggagcacctaataaaacacattgttctctttt

SEQ ID NO: 8313 - DNA, 1258 bp, Homo sapiens
  source 1..1258: mol_type = unassigned DNA; mol_type = unassigned DNA
ccgcggcggcggcggcggcggcggcggcggcggcagcggcgggggtcgggggggagcgctccagccggccagccccgtccgtggcgcccgagccggacggctgccccgtgtgcgtttggcggcagcacagccgcgagctgcgcctagagagcatcaagtcgcagatcttgagcaaactgcggctcaaggaggcgcccaacatcagccgcgaggtggtgaagcagctgctgcccaaggcgccgccgctgcagcagatcctggacctacacgacttccagggcgacgcgctgcagcccgaggacttcctggaggaggacgagtaccacgccaccaccgagaccgtcattagcatggcccaggagacggacccagcagtacagacagatggcagccctctctgctgccattttcacttcagccccaaggtgatgttcacaaaggtactgaaggcccagctgtgggtgtacctacggcctgtaccccgcccagccacagtctacctgcagatcttgcgactaaaacccctaactggggaagggaccgcagggggagggggcggaggccggcgtcacatccgtatccgctcactgaagattgagctgcactcacgctcaggccattggcagagcatcgacttcaagcaagtgctacacagctggttccgccagccacagagcaactggggcatcgagatcaacgcctttgatcccagtggcacagacctggctgtcacctccctggggccgggagccgaggggctgcatccattcatggagcttcgagtcctagagaacacaaaacgttcccggcggaacctgggtctggactgcgacgagcactcaagcgagtcccgctgctgccgatatcccctcacagtggactttgaggctttcggctgggactggatcatcgcacctaagcgctacaaggccaactactgctccggccagtgcgagtacatgttcatgcaaaaatatccgcatacccatttggtgcagcaggccaatccaagaggctctgctgggccctgttgtacccccaccaagatgtccccaatcaacatgctctacttcaatgacaagcagcagattatctacggcaagatccctggcatggtggtggatcgctgtggctgctcttaagtgggtcactacaagctgctggagcaaagacttggtgggtgggtaacttaacctcttcacagaggataaaaaatgcttgtgagtatgacagaagggaataaacaggcttaaagggt

SEQ ID NO: 8314 - DNA, 2502 bp, Homo sapiens
  source 1..2502: mol_type = unassigned DNA; mol_type = unassigned DNA
aaagggtgaatcatgtttaagaaggtcaacaggattgagcacaagaggaataagacagaaaaaccaaaaaagcttaatccatggattccacgcatcttcaaccacaaatgctttgtcaccttccttactggctgctatagttgcctctggaaattcagacaatgggaaaaaactaaagttggattttgttgctgcacttggaaagagcaattattttgccgtgcctggtaatttcatttgtcttgtctctgatgttgctgttcctgtggatagaaacatccagtgaatactttaactttgactgggtcacttttctaggaacaggatactggtttttctggtctatttttattctgagtttagctaggatcctgactgcctactcttcattgctgttgttacttggatttttgttgctttgggaaaggattgaactatacctgcacttgtgtcataagatcctgattctgctagtgattcttctgtgtgtcattttaatgttcattatatgcaaattctggaaagaaaggtggctggtagctgggctgtcaatgcagatctttgctccctacgtgcacctggtcagcataactgtgatggttatccttttctggcctgtggccttctacgtggcatgtttggaaagagaagttagaatgagaagatacaggatgacacattctgagaaaaaaagactcaagcaatgtaatgtaatcacaaggttaagaggtctacaagtgcctgttggattaccctttcttcttatccttttaggtctctatttgatgccactggggatttattctccctgcattcaggagaaggagaatttggggcccaagccaaccatctttggacatagaggtgcacccatgttggggcctgagaataccatgatgtcctttgagaaagctgttgaacatggagcccatggattggagactgatatacacttaagttatgatcatgtgcctttcctcatgcatgactttgacctgaaaagaacaaccaatattggggaagttcagccagaatctgcctgcgagaaccctgccttcttcaactgggatttcctatcgactctgaatgcaggcaaatggtttgtaaaaccagagctcaggccattttacaatatgaaacctctatcagaggcagataaagaaagagcaagaaatcagtcaattccaacactagctgatttattgacacttgcagagaaggaaagaaaatttgtgatatttgatcttcatcgccctccaccaaaacatcctctcagacacacatttgtccgccaagtagtaagcgtgatccttgcctctaaaatcgagcaacatctgattttttggttgccagctcatgataggcaatacgtcaggtccgtggctcctggttttcagcatgtgggccgtttagtatccattgaaacccttgctaaaaacaatatcagtataataaatgttgactacaagaagttgttccctaatgggttaagagattataaagcagctaacatccatatcaacgtatacaccgtcaatgagccttggcttttctcactggcctggtgctccaggattaactcagtgaccacagacaacattgggctcctgagtcagcttgatcaccctcacttcttcatgacaccaaagttctatgtgttcatgtggctccttgcagatatcatttctgtgctttttattgttgccatattttgttttcactggcggagagagactgaaaaagaaaaattgtttgaaacctccagcactcgcacagatactcagagtggaaatttgcacatagccatgaaacctcctgtccgagttgtggaaggtccttggactctagcagccctctacccggctctacccaagagtggaaaggaacaccaaggccatttcaattttgcagcaccatccaagaaactactacctatcaagaatgctgtcacacctttgaagcctggcaagcatgagattcaaccaccgatgcccaccgtggtctttgaactcacccaagcacccaccaggcaggctacaagtgaggctacctttcaaactacattgcccaccctgaaggtggataagccaaccatgccctccatagaggtcccctatccttaaataagagacctctaagagatccccatggctgaatactccaaataatcctatgtcacaatatattccattgcatctgacatagccttctgtgtttccaaagaagaattagccacatctcccctgcttcttcctctctctgcctaagggtggtgatggtggggagtggttgataaaggcacacagaagggccacggaggctctcaggggaaccattgtgctctcgctatcaagaatgcatctcaaggggctaggcaaggggaaaactgctgtgtgtggtcttggaactggttgctgtcaggtttatctcatcctaacacctccataatattttctgctaaaggagtgactgtgcatataagtaaaggcaacctctcaggaa

SEQ ID NO: 8315 - DNA, 2533 bp, Homo sapiens
  source 1..2533: mol_type = unassigned DNA; mol_type = unassigned DNA
aaagggtgaatcatgtttaagaaggtcaacaggattgagcacaagaggaataagacagaaaaaccaaaaaagcttaatccatggattccacgcatcttcaaccacaaatgctttgtcaccttccttactggctgctatagttgcctctggaaattcagacaatgggaaaaaactaaagttggattttgttgctgcacttggaaagagcaattattttgccgtgcctggtaatttcatttgtcttgtctctgatgttgctgttcctgtggatagaaacatccagtgaatactttaactttgactgggtcacttttctaggaacaggatactggtttttctggtctatttttattctgagtttagctaggatcctgactgcctactcttcattgctgttgttacttggatttttgttgctttgggaaaggattgaactatacctgcacttgtgtcataagatcctgattctgctagtgattcttctgtgtgtcattttaatgttcattatatgcaaattctggaaagaaaggtggctggtagctgggctgtcaatgcagatctttgctccctacgtgcacctggtcagcataactgtgatggttatccttttctggcctgtggccttctacgtggcatgtttggaaagagaagttagaatgagaagatacaggatgacacattctgagaaaaaaagactcaagcaatgtaatgtaatcacaaggttaagaggtctacaagtgcctgttggattaccctttcttcttatccttttaggtctctatttgatgccactggggatttattctccctgcattcaggagaaggagaatttggggcccaagccaaccatctttggacatagaggtgcacccatgttggggcctgagaataccatgatgtcctttgagaaagctgttgaacatggagcccatggattggagactgatatacacttaagttatgatcatgtgcctttcctcatgcatgactttgacctgaaaagaacaaccaatattggggaagttcagccagaatctgcctgcgagaaccctgccttcttcaactgggatttcctatcgactctgaatgcaggcaaatggtttgtaaaaccagagctcaggccattttacaatatgaaacctctatcagaggcagataaagaaagagcaagaaatcagtcaattccaacactagctgatttattgacacttgcagagaaggaaagaaaatttgtgatatttgatcttcatcgccctccaccaaaacatcctctcagacacacatttgtccgccaagtagtaagcgtgatccttgcctctaaaatcgagcaacatctgattttttggttgccagctcatgataggcaatacgtcaggtccgtggctcctggttttcagcatgtgggccgtttagtatccattgaaacccttgctaaaaacaatatcagtataataaatgttgactacaagaagttgttccctaatgggttaagagattataaagcagctaacatccatatcaacgtatacaccgtcaatgagccttggcttttctcactggcctggtgctccaggattaactcagtgaccacagacaacattgggctcctgagtcagcttgatcaccctcacttcttcatgacaccaaagttctatgtgttcatgtggctccttgcagatatcatttctgtgctttttattgttgccatattttgttttcactggcggagagagactgaaaaagaaaaattgtttgaaacctccagcactcgcacagatactcagagtggaagtaagaatgaggaagatagatagatagatagatttgcacatagccatgaaacctcctgtccgagttgtggaaggtccttggactctagcagccctctacccggctctacccaagagtggaaaggaacaccaaggccatttcaattttgcagcaccatccaagaaactactacctatcaagaatgctgtcacacctttgaagcctggcaagcatgagattcaaccaccgatgcccaccgtggtctttgaactcacccaagcacccaccaggcaggctacaagtgaggctacctttcaaactacattgcccaccctgaaggtggataagccaaccatgccctccatagaggtcccctatccttaaataagagacctctaagagatccccatggctgaatactccaaataatcctatgtcacaatatattccattgcatctgacatagccttctgtgtttccaaagaagaattagccacatctcccctgcttcttcctctctctgcctaagggtggtgatggtggggagtggttgataaaggcacacagaagggccacggaggctctcaggggaaccattgtgctctcgctatcaagaatgcatctcaaggggctaggcaaggggaaaactgctgtgtgtggtcttggaactggttgctgtcaggtttatctcatcctaacacctccataatattttctgctaaaggagtgactgtgcatataagtaaaggcaacctctcaggaa

SEQ ID NO: 8316 - DNA, 518 bp, Homo sapiens
  source 1..518: mol_type = unassigned DNA; mol_type = unassigned DNA
ctccggtctgcagctcccagcgtgattgacgcagaagacgggtgatttctgcatttccaactgagatactcagagtggaagtaagaatgaggaagatagatagatagatagatttgcacatagccatgaaacctcctgtccgagttgtggaaggtccttggactctagcagccctctacccggctctacccaagagtggaaaggaacaccaaggccatttcaattttgcagcaccatccaagaaactactacctatcaagaatgctgtcacacctttgaagcctggcaagcatgagattcaaccaccgatgcccaccgtggtctttgaactcacccaagcacccaccaggcaggctacaagtgaggctacctttcaaactacattgcccaccctgaaggtggataagccaaccatgccctccatagaggtcccctatccttaaataagagacctctaagagatccccatggctgaatactccaaataatcctatgtcacaatatattccattgcatct

SEQ ID NO: 8317 - DNA, 546 bp, Homo sapiens
  source 1..546: mol_type = unassigned DNA; mol_type = unassigned DNA
ccttccagccaggcgtccatcttaagagacgctggtctcctcaggcgtgaagattggatttgggttgggactgggaagtctcgttacttggatttttgttgctttgggaaaggattgaactatacctgcacttgtgtcataagatcctgattctgctagtgattcttctgtgtgtcattttaatgttcattatatgcaaattctggaaagaaaggtggctggtagctgggctgtcaatgcagatctttgctccctacgtgcacctggtcagcataactgtgatggttatccttttctggcctgtggccttctacgtggcatgtttggaaagagaaggtatgtcacatagggcagaaccctgcctatttcttcagctctggctttagcttgcatactccactcaggaaaacagaagcttgggaactagccacccctatgcctcgttgaaattcatttagcttgttactcaggcatgctcctgtgctttcactcactaccctgttatagtggccaatggcctgtcatagtatttctgtggccaaacag

SEQ ID NO: 8318 - DNA, 574 bp, Homo sapiens
  source 1..574: mol_type = unassigned DNA; mol_type = unassigned DNA
cctcaggcgtgaagattggatttgggttgggactgggaagtctcgctaaagggtgaatcatgtttaagaaggtcaacaggattgagcacaagaggaataagacagaaaaaccaaaaaagcttaatccatggattccacgcatcttcaaccacaaatgctttgtcaccttccttactggctgctatagttgcctctggaaattcagacaatgggaaaaaactaaagttggattttgttgctgcacttgggtacagactgataaggagctggaccacattttctcagatgcggggagcataggctgactgctgggccccatgagggctctttatggtctccaggactggggatgctagggctccatttcttccataaaaagcaattattttgccgtgcctggtaatttcatttgtcttgtctctgatgttgctgttcctgtggatagaaacatccagtgaatactttaactttgactgttacttggatttttgttgctttgggaaaggattgaactatacctgcacttgtgtcataagatcctgattctgctagtgattcttctgtgtgtcatttt

SEQ ID NO: 8319 - DNA, 560 bp, Homo sapiens
  source 1..560: mol_type = unassigned DNA; mol_type = unassigned DNA
ttaagagacgctggtctcctcaggcgtgaagattggatttgggttgggactgggaagtctcgctaaagggtgaatcatgtttaagaaggtcaacaggattgagcacaagaggaataagacagaaaaaccaaaaaagcttaatccatggattccacgcatcttcaaccacaaatgctttgtcaccttccttactggctgctatagttgcctctggaaattcagacaatgggaaaaaactaaagttggattttgttgctgcacttgggtacagactgataaggagctggaccacattttctcagatgcggggagcataggctgactgctgggccccatgagggctctttatggtctccaggactggggatgctagggctccatttcttccataaaagtattgcaccaatgttaaacttactgaaacatgtacttgctttcttcattttctttccttcacttcatttttcacttttattctttacttttccttactacctcttttatgtttattcattaattcacttttgcatttattcattcagtgaatcttgaagaaaaag

SEQ ID NO: 8320 - DNA, 4150 bp, Homo sapiens
  source 1..4150: mol_type = unassigned DNA; mol_type = unassigned DNA
tcacagctctggaaaggtccctggagaggatgtggaaagatccccagtaggtagcagagccaggattcgactgaagaccgtgattcaagtgaggctcttaaccctgggccagctgtctgccatttggactgcaaaacccagaggccagatacccctaagaggccagctgttgcacctctgcaaggcggggttccacctcctctcgggtcccggcacctaggccagactcatcgaatgaatgaaagactctgttgtatcccctgtacccaccatggctatcacaagccacagtcccatgaagacagagaacccaaggccactttctcagaggaggacggtgatctgtctctgggcctctagggtgggattcatccttctcagtcagatttcaggagcgatggtggttgcgtttttgggtgtcagtgctattgctataacttaatgatgcaaggtagggaagtcccacagacactgaacatgcagtgatgctgctgagtgtgttgattagcaccaaagcaactgtggaactcagagataataacatttttaattgtattagggtttggggaatcagttttattgcaagtcgtttccattaataggtattgtgatgagatgctcctggaaaccatccttaactcactgtgtgcagggccacctcccacgatggccacaagggggagctgcgcgccgggggcagccgggagaaggggcctgagtgccgagggcggggttctcaggggttcggaggcgcagctgggcctcccagagactgcgcagcctctctgacaccagcgtgctgtctgtccgagaaagcgcacacccccttaccccctgagatgggcagaaggtgttcgtttctggttctgccccttcaaagctccgtgacccagccagctgttcctctccccgaacctcgcttcccgtgtgtgagatgaggatgctcgtgcctccgcggaaccaacctggggaccacgcgaagcgcccccacaggcccaggctgatgggctggaatgaaaagcctccaaagggaaacttcatcccaggcgagactcagcattccccgccggcgagtgaaggtccctgggtagggagcggagatgctggccaccgccccaccctcatcgtctagaaatgccactgtccctgctcggcatcagagggccctggccgctgctgcctctgggaaaggttgcctcgggagaaagggggtgaaggccctgccagcagctagaacggctccagggaggcagggcggccggcagtgctgtgggagaaggacaggcctttggagggagatgggagacgagtctggagaaactagggggacggaggtggcggctttgactgacccttccagagactgggatctgcgggaggctttggaggagagccacaacctgggcttcggggaggcacgcctgggggtgtggaggggggtgggtggagtgagatccacggctaggggcgaggggctgggggccgaggagccgaaaacctctgccgagcttcacgtggttaaagatttcaggtcttacctgtcaccagagatctctgtcccgtagaggtgccacctcatcctccatgagagctgtgctttgctttcttctggaggctgcaaggaggatggcccccatcacggcggacctagatgctgggagtccgggagagggcaggccgtggagatggggcaggtggcgatgtgtttcaccacccactcccgcctgaagtgccactgtgagcccagcccagggtgccaggctgggctgcactccaggctcctgcagcagacccagttcctcagcctccttcccctgaggcctgggcatggcctggacaaatcgggctggtggtcatcctggcttccacggtggtggccatgtcggccgtggcccagctgtgggaggacgagtgggaggtgctgctgatctccctgcagggcacagcgccattcctgcatgtgggggctgtggcagcagtcaccatgctctcctggatcgtggcaggacagttcgcccgcgcagagcggacctcctcccaggtgaccattctctgtaccttcttcaccgtggtgtttgccctctacctggcccctctcaccatctcctctccctgcatcatggagaagaaagacctcggccccaagcctgctctcattggccaccgcggggcccccatgctggctccagagcacacgctcatgtccttccggaaggccctcgagcagaagctgtacgggctccaggctgacattaccatcagcctggacggcgtgcccttcctcatgcatgacaccaccctgcggcgcaccaccaacgtggaggaggagttcccggagctggcccgcaggcctgcctccatgcttaactggaccaccctgcagagactcaacgctggccagtggttcctgaagactgaccccttctggacagccagctccctgtcaccctccgaccacagagaggcccagaaccagtccatctgcagcctggcagagctcctggagctggccaagggcaatgccacactgctgctcaacctgcgtgacccgccccgggagcacccctaccgcagcagttttatcaacgtgactctggaggccgtgctgcactccggcttcccccagcaccaggtcatgtggctgcctagcaggcagaggcccctggtgcggaaggtggctcccggcttccaacagacatcaggctccaaggaggcagtcgccagcctgcggagaggccacatccagcggctgaacctgcgctacactcaggtgtcccgccaggagctcagggactacgcgtcctggaacctgagtgtgaacctctacacagtcaacgcaccgtggctcttctccctgctgtggtgtgcgggggtcccatccgtcacctctgacaactcccacgccctgtcccaggtgccttcccccctctggatcatgcccccggacgagtactgtctcatgtgggtcactgccgacctggtctccttcaccctcatcgtgggcatcttcgtgctccagaagtggcgcctgggtggcatacggagctacaaccctgagcagatcatgctgagtgctgcggtgcgccggaccagccgggacgtcagcatcatgaaggagaagcttattttctcagagatcagcgatggtgtagaggtctccgatgtgctctccgtatgttcagacaacagttatgacacatatgccaacagcaccgccacccctgtgggcccccgagggggtggcagccacaccaagaccctcatagagcggagtgggcgttagctgaagacatgtctgtcccacctgtacctgacacagaagctggggagcctaggagagctggtggaagtgtgtctgaactcggagtgctctgggagcgggctccacagcctccttgtgggctccagccccttgtcagccgcagcctctcttgagggggactccctgtctcctgaggcccagctgggccaggactccatcctttcagatgcccctgcaggcctggggctccttctgggaagtatggggcctagggcttggtccccctcttctgaggccctctcctgtatcccgacctggaagctttgatgggtcatgggccatgccataccccctgtggcaatggagtgtgtggatgctcacctgtgccatctgtcctcctgtctgtgccaggaggcacctgagttctctgctgttatcctgccccaagggcctgggccgagcctctacctgaagcaactctgctcttcctgtcagtctcaaagcacaaggaggttcagcccaggaggaagccagctgcaatgtggagacacgtcctcctccccaacccacctcatgccaccgccaaccccctgccccaggagcgggcctgagccacgtcctctaggagcagctggagatggccaaaagagtgagctcaggactactggatcccatgcccaggtgtccagcagacctcaaggcagaagggtcacctaacccaggagtccacagactgatgtgacctcaggttcccacatcagtggccacagggcagggcccacctggtagaagtgttctggatatggccagggtgggtgtgtggctaagtgggcctgaacagagggaacctagggcccttggccaatgtgattaaagctgccatcttga

SEQ ID NO: 8321 - DNA, 3211 bp, Homo sapiens
  source 1..3211: mol_type = unassigned DNA; mol_type = unassigned DNA
ctttgtgtgtcctgctcacattgtctccagggcctcggacagggcctggtacagaacatatgactgagtttctggagtcccacaggccagcgttggagtcctgacacctcagtatagctgtgcacctctgggcaaatagtttctctgctctgagccccaggacaagctgggggcctccatgggcgcctgagggccaggcgccagggccgtgggcacgagtatggtgagacaccagcccctgcagtactacgagccacagctgtgcctctcctgcctcacgggcatctacggctgccgttggaagcgctaccagcgctcccatgatgataccacaccgtgggagcgcctctggttcctgctcctcaccttcacctttggcctcacgctcacctggctttacttctggtgggaagtccacaatgactatgatgaattcaactggtacctctacaaccgcatgggctactggagcgactggcccgtacccatccttgtgaccacagctgctgccttcgcatacatcgctggcctcctggtcctggcactatgtcacattgccgtggggcagcagatgaacctgcactggctgcacaaggcctcctctgggcttccactatcccctctgtgagggagtttcttctcctggctgcaaagctggcatttgaaagaactgcaccagctggcaccccgggtggggctggcacatgctgtggtcaccttctggggccatgcctggctctcagcaggctgccctgagcacactgcactgctcttctgtcctcgcctgactcccctgcctcagtggcagcagcccccagcccaggacctgcacagaggaggcgtctgtcagcgacccaacctgagccccagagaggagcactgggtaccacacagccccaagatcgggctggtggtcatcctggcttccacggtggtggccatgtcggccgtggcccagctgtgggaggacgagtgggaggtgctgctgatctccctgcagggcacagcgccattcctgcatgtgggggctgtggcagcagtcaccatgctctcctggatcgtggcaggacagttcgcccgcgcagagcggacctcctcccaggtgaccattctctgtaccttcttcaccgtggtgtttgccctctacctggcccctctcaccatctcctctccctgcatcatggagaagaaagacctcggccccaagcctgctctcattggccaccgcggggcccccatgctggctccagagcacacgctcatgtccttccggaaggccctcgagcagaagctgtacgggctccaggctgacattaccatcagcctggacggcgtgcccttcctcatgcatgacaccaccctgcggcgcaccaccaacgtggaggaggagttcccggagctggcccgcaggcctgcctccatgcttaactggaccaccctgcagagactcaacgctggccagtggttcctgaagactgaccccttctggacagccagctccctgtcaccctccgaccacagagaggcccagaaccagtccatctgcagcctggcagagctcctggagctggccaagggcaatgccacactgctgctcaacctgcgtgacccgccccgggagcacccctaccgcagcagttttatcaacgtgactctggaggccgtgctgcactccggcttcccccagcaccaggtcatgtggctgcctagcaggcagaggcccctggtgcggaaggtggctcccggcttccaacagacatcaggctccaaggaggcagtcgccagcctgcggagaggccacatccagcggctgaacctgcgctacactcaggtgtcccgccaggagctcagggactacgcgtcctggaacctgagtgtgaacctctacacagtcaacgcaccgtggctcttctccctgctgtggtgtgcgggggtcccatccgtcacctctgacaactcccacgccctgtcccaggtgccttcccccctctggatcatgcccccggacgagtactgtctcatgtgggtcactgccgacctggtctccttcaccctcatcgtgggcatcttcgtgctccagaagtggcgcctgggtggcatacggagctacaaccctgagcagatcatgctgagtgctgcggtgcgccggaccagccgggacgtcagcatcatgaaggagaagcttattttctcagagatcagcgatggtgtagaggtctccgatgtgctctccgtatgttcagacaacagttatgacacatatgccaacagcaccgccacccctgtgggcccccgagggggtggcagccacaccaagaccctcatagagcggagtgggcgttagctgaagacatgtctgtcccacctgtacctgacacagaagctggggagcctaggagagctggtggaagtgtgtctgaactcggagtgctctgggagcgggctccacagcctccttgtgggctccagccccttgtcagccgcagcctctcttgagggggactccctgtctcctgaggcccagctgggccaggactccatcctttcagatgcccctgcaggcctggggctccttctgggaagtatggggcctagggcttggtccccctcttctgaggccctctcctgtatcccgacctggaagctttgatgggtcatgggccatgccataccccctgtggcaatggagtgtgtggatgctcacctgtgccatctgtcctcctgtctgtgccaggaggcacctgagttctctgctgttatcctgccccaagggcctgggccgagcctctacctgaagcaactctgctcttcctgtcagtctcaaagcacaaggaggttcagcccaggaggaagccagctgcaatgtggagacacgtcctcctccccaacccacctcatgccaccgccaaccccctgccccaggagcgggcctgagccacgtcctctaggagcagctggagatggccaaaagagtgagctcaggactactggatcccatgcccaggtgtccagcagacctcaaggcagaagggtcacctaacccaggagtccacagactgatgtgacctcaggttcccacatcagtggccacagggcagggcccacctggtagaagtgttctggatatggccagggtgggtgtgtggctaagtgggcctgaacagagggaacctagggcccttggccaatgtgattaaagctgccatcttga

SEQ ID NO: 8322 - DNA, 2441 bp, Homo sapiens
  source 1..2441: mol_type = unassigned DNA; mol_type = unassigned DNA
tggacaagacacctccaggagcccagctcacagccaccggtaccttcttccaggacaagctgggggcctccatgggcgcctgagggccaggcgccagggccgtgggcacgagtatggtgagacaccagcccctgcagtactacgagccacagctgtgcctctcctgcctcacgggcatctacggctgccgttggaagcgctaccagcgctcccatgatgataccacaccgggcacagcgccattcctgcatgtgggggctgtggcagcagtcaccatgctctcctggatcgtggcaggacagttcgcccgcgcagagcggacctcctcccaggtgaccattctctgtaccttcttcaccgtggtgtttgccctctacctggcccctctcaccatctcctctccctgcatcatggagaagaaagacctcggccccaagcctgctctcattggccaccgcggggcccccatgctggctccagagcacacgctcatgtccttccggaaggccctcgagcagaagctgtacgggctccaggctgacattaccatcagcctggacggcgtgcccttcctcatgcatgacaccaccctgcggcgcaccaccaacgtggaggaggagttcccggagctggcccgcaggcctgcctccatgcttaactggaccaccctgcagagactcaacgctggccagtggttcctgaagactgaccccttctggacagccagctccctgtcaccctccgaccacagagaggcccagaaccagtccatctgcagcctggcagagctcctggagctggccaagggcaatgccacactgctgctcaacctgcgtgacccgccccgggagcacccctaccgcagcagttttatcaacgtgactctggaggccgtgctgcactccggcttcccccagcaccaggtcatgtggctgcctagcaggcagaggcccctggtgcggaaggtggctcccggcttccaacagacatcaggctccaaggaggcagtcgccagcctgcggagaggccacatccagcggctgaacctgcgctacactcaggtgtcccgccaggagctcagggactacgcgtcctggaacctgagtgtgaacctctacacagtcaacgcaccgtggctcttctccctgctgtggtgtgcgggggtcccatccgtcacctctgacaactcccacgccctgtcccaggtgccttcccccctctggatcatgcccccggacgagtactgtctcatgtgggtcactgccgacctggtctccttcaccctcatcgtgggcatcttcgtgctccagaagtggcgcctgggtggcatacggagctacaaccctgagcagatcatgctgagtgctgcggtgcgccggaccagccgggacgtcagcatcatgaaggagaagcttattttctcagagatcagcgatggtgtagaggtctccgatgtgctctccgtatgttcagacaacagttatgacacatatgccaacagcaccgccacccctgtgggcccccgagggggtggcagccacaccaagaccctcatagagcggagtgggcgttagctgaagacatgtctgtcccacctgtacctgacacagaagctggggagcctaggagagctggtggaagtgtgtctgaactcggagtgctctgggagcgggctccacagcctccttgtgggctccagccccttgtcagccgcagcctctcttgagggggactccctgtctcctgaggcccagctgggccaggactccatcctttcagatgcccctgcaggcctggggctccttctgggaagtatggggcctagggcttggtccccctcttctgaggccctctcctgtatcccgacctggaagctttgatgggtcatgggccatgccataccccctgtggcaatggagtgtgtggatgctcacctgtgccatctgtcctcctgtctgtgccaggaggcacctgagttctctgctgttatcctgccccaagggcctgggccgagcctctacctgaagcaactctgctcttcctgtcagtctcaaagcacaaggaggttcagcccaggaggaagccagctgcaatgtggagacacgtcctcctccccaacccacctcatgccaccgccaaccccctgccccaggagcgggcctgagccacgtcctctaggagcagctggagatggccaaaagagtgagctcaggactactggatcccatgcccaggtgtccagcagacctcaaggcagaagggtcacctaacccaggagtccacagactgatgtgacctcaggttcccacatcagtggccacagggcagggcccacctggtagaagtgttctggatatggccagggtgggtgtgtggctaagtgggcctgaacagagggaacctagggcccttggccaatgtgattaaagctgccatcttga

SEQ ID NO: 8323 - DNA, 3222 bp, Homo sapiens
  source 1..3222: mol_type = unassigned DNA; mol_type = unassigned DNA
ggctgctttagaagaacaagctggtttggcagctacctcagagaagcaggaccctgggcagcgtgaaagggcctctgcccccagggtggctgggctttggatcctggatccgtgggtcctggaggggcaggagtggttcaggaaacagctctcccagtgaagtgatatcactgcctctgtggacaagacacctccaggagcccagctcacagccaccggtaccttcttccagggctgctgttatagtttctgcatggaaagcacttggaacaatgcctggctgttcccctctttggccctctcagggccctaggagcctttgtgtgtcctgctcacattgtctccagggcctcggacagggcctggtacagaacatatgactgagtttctggagtcccacaggccagcgttggagtcctgacacctcagtatagctgtgcacctctgggcaaatagtttctctgctctgagccccaggacaagctgggggcctccatgggcgcctgagggccaggcgccagggccgtgggcacgagtatggtgagacaccagcccctgcagtactacgagccacagctgtgcctctcctgcctcacgggcatctacggctgccgttggaagcgctaccagcgctcccatgatgataccacaccgtgggagcgcctctggttcctgctcctcaccttcacctttggcctcacgctcacctggctttacttctggtgggaagtccacaatgactatgatgaattcaactggtacctctacaaccgcatgggctactggagcgactggcccgtacccatccttgtgaccacagctgctgccttcgcatacatcgctggcctcctggtcctggcactatgtcacattgccgtggggcagcagatgaacctgcactggctgcacaagatcgggctggtggtcatcctggcttccacggtggtggccatgtcggccgtggcccagctgtgggaggacgagtgggaggtgctgctgatctccctgcagggcacagcgccattcctgcatgtgggggctgtggcagcagtcaccatgctctcctggatcgtggcaggacagttcgcccgcgcagagcggacctcctcccaggtgaccattctctgtaccttcttcaccgtggtgtttgccctctacctggcccctctcaccatctcctctccctgcatcatggagaagaaagacctcggccccaagcctgctctcattggccaccgcggggcccccatgctggctccagagcacacgctcatgtccttccggaaggccctcgagcagaagctgtacgggctccaggctgacattaccatcagcctggacggcgtgcccttcctcatgcatgacaccaccctgcggcgcaccaccaacgtggaggaggagttcccggagctggcccgcaggcctgcctccatgcttaactggaccaccctgcagagactcaacgctggccagtggttcctgaagactgaccccttctggacagccagctccctgtcaccctccgaccacagagaggcccagaaccagtccatctgcagcctggcagagctcctggagctggccaagggcaatgccacactgctgctcaacctgcgtgacccgccccgggagcacccctaccgcagcagttttatcaacgtgactctggaggccgtgctgcactccggcttcccccagcaccaggtcatgtggctgcctagcaggcagaggcccctggtgcggaaggtggctcccggcttccaacagacatcaggctccaaggaggcagtcgccagcctgcggagaggccacatccagcggctgaacctgcgctacactcaggtgtcccgccaggagctcagggactacgcgtcctggaacctgagtgtgaacctctacacagtcaacgcaccgtggctcttctccctgctgtggtgtgcgggggtcccatccgtcacctctgacaactcccacgccctgtcccaggtgccttcccccctctggatcatgcccccggacgagtactgtctcatgtgggtcactgccgacctggtctccttcaccctcatcgtgggcatcttcgtgctccagaagtggcgcctgggtggcatacggagctacaaccctgagcagatcatgctgagtgctgcggtgcgccggaccagccgggacgtcagcatcatgaaggagaagcttattttctcagagatcagcgatggtgtagaggtctccgatgtgctctccgtatgttcagacaacagttatgacacatatgccaacagcaccgccacccctgtgggcccccgagggggtggcagccacaccaagaccctcatagagcggagtgggcgttagctgaagacatgtctgtcccacctgtacctgacacagaagctggggagcctaggagagctggtggaagtgtgtctgaactcggagtgctctgggagcgggctccacagcctccttgtgggctccagccccttgtcagccgcagcctctcttgagggggactccctgtctcctgaggcccagctgggccaggactccatcctttcagatgcccctgcaggcctggggctccttctgggaagtatggggcctagggcttggtccccctcttctgaggccctctcctgtatcccgacctggaagctttgatgggtcatgggccatgccataccccctgtggcaatggagtgtgtggatgctcacctgtgccatctgtcctcctgtctgtgccaggaggcacctgagttctctgctgttatcctgccccaagggcctgggccgagcctctacctgaagcaactctgctcttcctgtcagtctcaaagcacaaggaggttcagcccaggaggaagccagctgcaatgtggagacacgtcctcctccccaacccacctcatgccaccgccaaccccctgccccaggagcgggcctgagccacgtcctctaggagcagctggagatggccaaaagagtgagctcaggactactggatcccatgcccaggtgtccagcagacctcaaggcagaagggtcacctaacccaggagtccacagactgatgtgacctcaggttcccacatcagtggccacagggcagggcccacctggtagaagtgttctggatatggccagggtgggtgtgtggctaagtgggcctgaacagagggaacctagggcccttggccaatgtgattaaagctgccatcttga

SEQ ID NO: 8324 - DNA, 3523 bp, Homo sapiens
  source 1..3523: mol_type = unassigned DNA; mol_type = unassigned DNA
cggggatgacagcggaggtggcagcggcgcggcgctgagcgagcggcgagggagcaggggaagaggaggaagtggagccgcggccgggagctcgggagtcggccgccgcgccgaggttcgccccgttttgcagagagagccgagtcgggacctggaaagacttccccgcggggctccggccgccgcgcctccccgccggcgcctgccctgccctgcccgtcccagccccgcggttcggggcgtgcggccgggacgcgcggagccccggccctgacccgctgcgccgggacgggacgctcctaacgccgccgtaccggtccgtggttgcagggtcgctccgcgcctttccgtcagtgagggtcggaaccccagctccagggctagcgcagtgtggccccaggccctcgcctccggtgcacgggaccccggacccccccagcctctggcttcacgagaccccaaccttcagttggaacagcttggaacagcgcgagcgcccgggaagccctggccgggtcgtgcgctcggtgaggggtcctaggcgggcaggacagtcggaccgaaccgccgggctggtgccgcgagcccaggctgtcaccttcgtcccgcctcaggtgaggggttcagcgcctgccccgaagataacacaggggtccccttctgtcccggcggcctgcgagagccaaggctgcagctctcccagtgaagtgatatcactgcctctgtggacaagacacctccaggagcccagctcacagccaccggtaccttcttccaggacaagctgggggcctccatgggcgcctgagggccaggcgccagggccgtgggcacgagtatggtgagacaccagcccctgcagtactacgagccacagctgtgcctctcctgcctcacgggcatctacggctgccgttggaagcgctaccagcgctcccatgatgataccacaccgtgggagcgcctctggttcctgctcctcaccttcacctttggcctcacgctcacctggctttacttctggtgggaagtccacaatgactatgatgaattcaactggtacctctacaaccgcatgggctactggagcgactggcccgtacccatccttgtgaccacagctgctgccttcgcatacatcgctggcctcctggtcctggcactatgtcacattgccgtggggcagcagatgaacctgcactggctgcacaagatcgggctggtggtcatcctggcttccacggtggtggccatgtcggccgtggcccagctgtgggaggacgagtgggaggtgctgctgatctccctgcagggcacagcgccattcctgcatgtgggggctgtggcagcagtcaccatgctctcctggatcgtggcaggacagttcgcccgcgcagagcggacctcctcccaggtgaccattctctgtaccttcttcaccgtggtgtttgccctctacctggcccctctcaccatctcctctccctgcatcatggagaagaaagacctcggccccaagcctgctctcattggccaccgcggggcccccatgctggctccagagcacacgctcatgtccttccggaaggccctcgagcagaagctgtacgggctccaggctgacattaccatcagcctggacggcgtgcccttcctcatgcatgacaccaccctgcggcgcaccaccaacgtggaggaggagttcccggagctggcccgcaggcctgcctccatgcttaactggaccaccctgcagagactcaacgctggccagtggttcctgaagactgaccccttctggacagccagctccctgtcaccctccgaccacagagaggcccagaaccagtccatctgcagcctggcagagctcctggagctggccaagggcaatgccacactgctgctcaacctgcgtgacccgccccgggagcacccctaccgcagcagttttatcaacgtgactctggaggccgtgctgcactccggcttcccccagcaccaggtcatgtggctgcctagcaggcagaggcccctggtgcggaaggtggctcccggcttccaacagacatcaggctccaaggaggcagtcgccagcctgcggagaggccacatccagcggctgaacctgcgctacactcaggtgtcccgccaggagctcagggactacgcgtcctggaacctgagtgtgaacctctacacagtcaacgcaccgtggctcttctccctgctgtggtgtgcgggggtcccatccgtcacctctgacaactcccacgccctgtcccaggtgccttcccccctctggatcatgcccccggacgagtactgtctcatgtgggtcactgccgacctggtctccttcaccctcatcgtgggcatcttcgtgctccagaagtggcgcctgggtggcatacggagctacaaccctgagcagatcatgctgagtgctgcggtgcgccggaccagccgggacgtcagcatcatgaaggagaagcttattttctcagagatcagcgatggtgtagaggtctccgatgtgctctccgtatgttcagacaacagttatgacacatatgccaacagcaccgccacccctgtgggcccccgagggggtggcagccacaccaagaccctcatagagcggagtgggcgttagctgaagacatgtctgtcccacctgtacctgacacagaagctggggagcctaggagagctggtggaagtgtgtctgaactcggagtgctctgggagcgggctccacagcctccttgtgggctccagccccttgtcagccgcagcctctcttgagggggactccctgtctcctgaggcccagctgggccaggactccatcctttcagatgcccctgcaggcctggggctccttctgggaagtatggggcctagggcttggtccccctcttctgaggccctctcctgtatcccgacctggaagctttgatgggtcatgggccatgccataccccctgtggcaatggagtgtgtggatgctcacctgtgccatctgtcctcctgtctgtgccaggaggcacctgagttctctgctgttatcctgccccaagggcctgggccgagcctctacctgaagcaactctgctcttcctgtcagtctcaaagcacaaggaggttcagcccaggaggaagccagctgcaatgtggagacacgtcctcctccccaacccacctcatgccaccgccaaccccctgccccaggagcgggcctgagccacgtcctctaggagcagctggagatggccaaaagagtgagctcaggactactggatcccatgcccaggtgtccagcagacctcaaggcagaagggtcacctaacccaggagtccacagactgatgtgacctcaggttcccacatcagtggccacagggcagggcccacctggtagaagtgttctggatatggccagggtgggtgtgtggctaagtgggcctgaacagagggaacctagggcccttggccaatgtgattaaagctgccatcttga

SEQ ID NO: 8325 - DNA, 2424 bp, Homo sapiens
  source 1..2424: mol_type = unassigned DNA; mol_type = unassigned DNA
cggccgtggcccagctgtgggaggacgagtgggaggtgctgctgatctccctgcagggcacagcgccattcctgcatgtgggggctgtggcagcagtcaccatgctctcctggatcgtggcaggacagttcgcccgcgcagagcggacctcctcccaggtgaccattctctgtaccttcttcaccgtggtgtttgccctctacctggcccctctcaccatctcctctccctgcatcatggagaagaaagacctcggccccaagcctgctctcattggccaccgcggggcccccatggcatcaggagaaccctccaggagagctgggaggcagctcagagcccactgtgacagtgagtacggctgaaccgacgtgagttggagaaagacgaagggatcaaagtcagcgccgcattctgccaccagtgcactccatagccctgcaggagagcttcgctggctccagagcacacgctcatgtccttccggaaggccctcgagcagaagctgtacgggctccaggctgacattaccatcagcctggacggcgtgcccttcctcatgcatgacaccaccctgcggcgcaccaccaacgtggaggaggagttcccggagctggcccgcaggcctgcctccatgcttaactggaccaccctgcagagactcaacgctggccagtggttcctgaagactgaccccttctggacagccagctccctgtcaccctccgaccacagagaggcccagaaccagtccatctgcagcctggcagagctcctggagctggccaagggcaatgccacactgctgctcaacctgcgtgacccgccccgggagcacccctaccgcagcagttttatcaacgtgactctggaggccgtgctgcactccggcttcccccagcaccaggtcatgtggctgcctagcaggcagaggcccctggtgcggaaggtggctcccggcttccaacagacatcaggctccaaggaggcagtcgccagcctgcggagaggccacatccagcggctgaacctgcgctacactcaggtgtcccgccaggagctcagggactacgcgtcctggaacctgagtgtgaacctctacacagtcaacgcaccgtggctcttctccctgctgtggtgtgcgggggtcccatccgtcacctctgacaactcccacgccctgtcccaggtgccttcccccctctggatcatgcccccggacgagtactgtctcatgtgggtcactgccgacctggtctccttcaccctcatcgtgggcatcttcgtgctccagaagtggcgcctgggtggcatacggagctacaaccctgagcagatcatgctgagtgctgcggtgcgccggaccagccgggacgtcagcatcatgaaggagaagcttattttctcagagatcagcgatggtgtagaggtctccgatgtgctctccgtatgttcagacaacagttatgacacatatgccaacagcaccgccacccctgtgggcccccgagggggtggcagccacaccaagaccctcatagagcggagtgggcgttagctgaagacatgtctgtcccacctgtacctgacacagaagctggggagcctaggagagctggtggaagtgtgtctgaactcggagtgctctgggagcgggctccacagcctccttgtgggctccagccccttgtcagccgcagcctctcttgagggggactccctgtctcctgaggcccagctgggccaggactccatcctttcagatgcccctgcaggcctggggctccttctgggaagtatggggcctagggcttggtccccctcttctgaggccctctcctgtatcccgacctggaagctttgatgggtcatgggccatgccataccccctgtggcaatggagtgtgtggatgctcacctgtgccatctgtcctcctgtctgtgccaggaggcacctgagttctctgctgttatcctgccccaagggcctgggccgagcctctacctgaagcaactctgctcttcctgtcagtctcaaagcacaaggaggttcagcccaggaggaagccagctgcaatgtggagacacgtcctcctccccaacccacctcatgccaccgccaaccccctgccccaggagcgggcctgagccacgtcctctaggagcagctggagatggccaaaagagtgagctcaggactactggatcccatgcccaggtgtccagcagacctcaaggcagaagggtcacctaacccaggagtccacagactgatgtgacctcaggttcccacatcagtggccacagggcagggcccacctggtagaagtgttctggatatggccagggtgggtgtgtggctaagtgggcctgaacagagggaacctagggcccttggccaatgtgattaaagctgccatcttg

SEQ ID NO: 8326 - DNA, 2633 bp, Homo sapiens
  source 1..2633: mol_type = unassigned DNA; mol_type = unassigned DNA
ctttacattctatctctaacacccatccctgctttgctccccgcaacacacagccttttcctcattcccctcagaggaccccacagtggctgagcttcctgttctggatatgcctggccgagagaccctggcctgacactgtccttctgggtttcaacatgaatttccaggatgggacctagagcttagggacccacgtctccctccgtctagtgccttagcccctcctgggtcaggcagcttcaccaatcagcttctaggaggagatgctgtccctggctatgggacattccttgagtcattcctgtgtccgcccagttgaccaacatccacatacactggttgctgatgctgtctgcagcaggagttgggccttctcacatggagccccagggtgctggggaggccaccccatggtgattcagtggctggcacagacacgctgggtctgctcagacacagccagggcagtgtcattgtctcctggggatcaggagaggcctggtggaggaaggtaccctgggggacaaggccgggggaggatactctttccctgtgggccttattcttccattcattcactcaacaagtacaggtcaggctcccgggacacggcaggcactgatggtactggggcacagcgatgaacagagagagatttgctcactgccctcaatgattcatagggcagccagcctcgccagggtgtccgtgccaccccccgcctcctgctttccccttgtctgcctgctctgttcatccatccatccgcctgtccatctgtctgtccacttctgctgcgctgaccccatctagtaactcacagttggtttcttgtggagtcttggctctctccatcccccaagcagggttcagtccctgaggcagttgggttcttgttcccaagttgatcaccccctcctcctggtggggacaggggtgagagtccagtgatccttctgcctagatcccaggaaaggtctaagttcagaggccagggactggggctagttcagaggaatgacaatagtgaagacagtggcctgggctgggcacagaaacctgagtcctttccacttagtgcctggtcccttcatgccctgtgcatgctccacctcccagcccactcttgagtaattttacccccaccttgcacctgtctcagccatcagagggattcatgctctgacctccctccgcattaggactgccaggacagagcagcagttggccccactccaagtcactctaacccccttgccttgggaacctgtgcagaccagctctgggcaaagccccctaccacctggccccacccccctgctttccttccctccctctcaaggggtctccccaatggcttcacttagtctggtcatgatggtggagctataagagacatcagctgggactccctgagattggtgtgtgccccagcttaggtcaacagagtcgtgcctactaagctcctcctgctcccaaatctgtcccattcaaagagagccaggtgcattactggggacacctgagacagaactaaccaaccctagtcctgggccagggctgctgactggcggctctggaggtaagagggaggccagggagccctggccgagagtcagtaggctctgattcaagccccaactctgccctctctgggcctatttccccattgtacagtgggacaagagtcctgctggtctcttgggccacatccagagaggctctggaagtaggcagggtctctgctccaagggagggctgaggagagacctgatgcccacggggccatctctgcaggtggcgcctgggtggcatacggagctacaaccctgagcagatcatgctgagtgctgcggtgcgccggaccagccgggacgtcagcatcatgaaggagaagcttattttctcagcagagatcagcgatggtgtagaggtctccgatgtgctctccgtatgttcagacaacagttatgacacatatgccaacagcaccgccacccctgtgggcccccgagggggtggcagccacaccaagaccctcatagagcggagtgggcgttagctgaagacatgtctgtcccacctgtacctgacacagaagctggggagcctaggagagctggtggaagtgtgtctgaactcggagtgctctgggagcgggctccacagcctccttgtgggctccagccccttgtcagccgcagcctctcttgagggggactccctgtctcctgaggcccagctgggccaggactccatcctttcagatgcccctgcaggcctggggctccttctgggaagtatggggcctagggcttggtccccctcttctgaggccctctcctgtatcccgacctggaagctttgatgggtcatgggccatgccataccccctgtggcaatggagtgtgtggatgctcacctgtgccatctgtcctcctgtctgtgccaggaggcacctgagttctctgctgttatcctgccccaagggcctgggccgagcctctacctgaagcaactctgctcttcctgtcagtctcaaagcacaaggaggttcagcccaggaggaagccagctgcaatgtggagacacgtcctcctccccaacccacctcatgccaccgccaaccc

SEQ ID NO: 8327 - DNA, 527 bp, Homo sapiens
  source 1..527: mol_type = unassigned DNA; mol_type = unassigned DNA
gcagtcgccagcctgcggagaggccacatccagcggctgaacctgcgctacactcaggtgtcccgccaggagctcagggactacgcgtcctggaacctgagtgtgaacctctacacagtcaacgcaccgtggctcttctccctgctgtggtgtgcgggggtcccatccgtcacctctgacaactcccacgccctgtcccaggtgccttcccccctctggatcatgcccccggacgagtactgtctcatgtgggtcactgccgacctggtctccttcaccctcatcgtgggcatcttcgtgctccagaactatcacttgatcaggtggcgcctgggtggcatacggagctacaaccctgagcagatcatgctgagtgctgcggtgcgccggaccagccgggacgtcagcatcatgaaggagaagcttattttctcagagatcagcgatggtgtagaggtctccgatgtgctctccgtatgttcagacaacagttatgacacatatgccaacagcaccgccacccctgt

SEQ ID NO: 8328 - DNA, 449 bp, Homo sapiens
  source 1..449: mol_type = unassigned DNA; mol_type = unassigned DNA
ctgaccccagcagactctggcagcccaggggtctccacgcttggttgccagaagggtatgtgggggcccccaaagggctgatgatgcagccatgtgtgtgtccctgtccctgccagactgaccccttctggacagccagctccctgtcaccctccgaccacagagaggcccagaaccagtccatctgcagcctggcagagctcctggagctggccaagggcaatgccacactgctgctcaacctgcgtgacccgccccgggagcacccctaccgcagcagttttatcaacgtgactctggaggccgtgctgcactccggcttcccccagcaccaggtcatgtggctgcctagcaggcagaggcccctggtgcggaaggtggctcccggcttccaacagacatcaggctccaaggaggcagtcgccagcctgcggagaggccacatccag

SEQ ID NO: 8329 - DNA, 1000 bp, Homo sapiens
  source 1..1000: mol_type = unassigned DNA; mol_type = unassigned DNA
gtacctctacaaccgcatgggctactggagcgactggcccgtacccatccttgtgaccacagctgctgccttcgcatacatcgctggcctcctggtcctggcactatgtcacattgccgtggggcagcagatgaacctgcactggctgcacaagggcacagcgccattcctgcatgtgggggctgtggcagcagtcaccatgctctcctggatcgtggcaggacagttcgcccgcgcagagcggacctcctcccaggtgaccattctctgtaccttcttcaccgtggtgtttgccctctacctggcccctctcaccatctcctctccctgcatcatggagaagaaagacctcggccccaagcctgctctcattggccaccgcggggcccccatgctggctccagagcacacgctcatgtccttccggaaggccctcgagcagaagctgtacgggctccaggctgacattaccatcagcctggacggcgtgcccttcctcatgcatgacaccaccctgcggcgcaccaccaacgtggaggaggagttcccggagctggcccgcaggcctgcctccatgcttaactggaccaccctgcagagactcaacgctggccagtggttcctgaaggtctggctgcacctgatcccaatcttaggcatggaaaacaccagcagggactgcaaggagtgagaggtgcaagggtggccatcagcttcgagacccccactctcagagctttcgcgacctccacccaagctgcttagtggcctcctaggctcctgccactgctgccagactcatggttgtcactgcttgttctgggtccatttccctcactagaaaaggttgacagggatgagagcagtgaatagaattcttaactctgtaaaactctagagaggggttggctctctgatctgaaatgctctagaaggagaaatgctgtgggtctgggagcgattccaagcaagccgtcctccgtcctcttggtaagcaggg

SEQ ID NO: 8330 - DNA, 603 bp, Homo sapiens
  source 1..603: mol_type = unassigned DNA; mol_type = unassigned DNA
cggccgtggcccagctgtgggaggacgagtgggaggtgctgctgatctccctgcagggcacagcgccattcctgcatgtgggggctgtggcagcagtcaccatgctctcctggatcgtggcaggacagttcgcccgcgcagagcggacctcctcccaggtgaccattctctgtaccttcttcaccgtggtgtttgccctctacctggcccctctcaccatctcctctccctgcatcatggagaagaaagacctcggccccaagcctgctctcattggccaccgcggggcccccatgctggctccagagcacacgctcatgtccttccggaaggccctcgagcagaagctgtacgggctccaggctgacattaccatcagcctggacggcgtgcccttcctcatgcatgacaccaccctgcggcgcaccaccaacgtggaggaggagttcccggagctggcccgcaggcctgcctccatgcttaactggaccaccctgcagagactcaacgctggccagtggttcctgaaggtctggctgcacctgatcccaatcttaggcatggaaaacaccagcagggactgcaaggagtgagaggtgcaag

SEQ ID NO: 8331 - DNA, 724 bp, Homo sapiens
  source 1..724: mol_type = unassigned DNA; mol_type = unassigned DNA
ccagcgttggagtcctgacacctcagtatagctgtgcacctctgggcaaatagtttctctgctctgagccccaggacaagctgggggcctccatgggcgcctgagggccaggcgccagggccgtgggcacgagtatggtgagacaccagcccctgcagtactacgagccacagctgtgcctctcctgcctcacgggcatctacggctgccgttggaagcgctaccagcgctcccatgatgataccacaccgtgggagcgcctctggttcctgctcctcaccttcacctttggcctcacgctcacctggctttacttctggtgggaagtccacaatgactatgatgaattcaactggtacctctacaaccgcatgggctactggagcgactggcccgtacccatccttgtgaccacagctgctgccttcgcatacatcgctggcctcctggtcctggcactatgtcacattgccgtggggcagcagatgaacctgcactggctgcacaaggtaagggccgcctcggccggggctgggagagagcaagggaagctggaggcagcagcagcagaggaagggcctggccaccatgtccctcccctggatcaccgttagaattgttctcatagctaaggctgagcactcactatgcgccaagcacttttctcacaacctcacccgtcttcattcacttaacccttacagcaaccttgtgatgtaggtac

SEQ ID NO: 8332 - DNA, 825 bp, Homo sapiens
  source 1..825: mol_type = unassigned DNA; mol_type = unassigned DNA
ttggaacagcgcgagcgcccgggaagccctggccgggtcgtgcgctcggtgaggggtcctaggcgggcaggacagtcggaccgaaccgccgggctggtgccgcgagcccaggctgtcaccttcgtcccgcctcaggtgaggggttcagcgcctgccccgaagataacacaggggtccccttctgtcccggcggcctgcgagagccaaggctgcagctctcccagtgaagtgatatcactgcctctgtggacaagacacctccaggagcccagctcacagccaccggtaccttcttccagggctgctgttatagtttctgcatggaaagcacttggaacaatgcctggctgttcccctctttggccctctcagggccctaggagcctttgtgtgtcctgctcacattgtctccagggcctcggacagggcctggtacagaacatatgactgagtttctggagtcccacaggccagcgttggagtcctgacacctcagtatagctgtgcacctctgggcaaatagtttctctgctctgagccccaggacaagctgggggcctccatgggcgcctgagggccaggcgccagggccgtgggcacgagtatggtgagacaccagcccctgcagtactacgagccacagctgtgcctctcctgcctcacgggcatctacggctgccgttggaagcgctaccagcgctcccatgatgataccacaccgtgggagcgcctctggttcctgctcctcaccttcacctttggcctcacgctcacctggctttacttctggtgggaagtccacaatgactatgatgaattcaactg

SEQ ID NO: 8333 - DNA, 1201 bp, Homo sapiens
  source 1..1201: mol_type = unassigned DNA; mol_type = unassigned DNA
gaggggtcctaggcgggcaggacagtcggaccgaaccgccgggctggtgccgcgagcccaggctgtcaccttcgtcccgcctcaggtgaggggttcagcgcctgccccgaagataacacaggggtccccttctgtcccggcggcctgcgagagccaaggctgcaggctggagtgcaatggcgcgatcttcactcactgcagcctccgcctcccaggttcaagcgattctcctgcctcagcctcccaagtagctgggattacagtcccccatttatgcttcctgttgggtgtacctctctgaaagccagcagcatggagcccattacattccacagagggcctcaggtaccccctctgggaggcctgcagcctgtcacagcatgctgagccaaagccacctgcccaggttcccaaatcttggaagcactggatcatggaaccatagaatctcggtgatatgaaatccagacttggaggaggcctaaggggtcacaatccaaaccttcatccagcccaggcagcccctctgcaggctccgtgaacactctggcaactggggagtcatctgtagccccctcagcttccactactaagccatctgctccagggcactgggggatcctgcaggggttttctgcttgaagagccacttcctgtttggggccgagcacttccttcagctctcccagtgaagtgatatcactgcctctgtggacaagacacctccaggagcccagctcacagccaccggtaccttcttccagttatacagatgctgcagctggcattgacgtggaaggtgatagaaacgtgaacaggcccgccctgtggggctgcaaccatggagagtctggactttagagtcaacagccccgggttcaaatcctccctcctccatgattagctgtttggccttgggtgaattacctaacctcttgggtgcgggtgcacacgtgtgtgtgtgtgtgtgtgtgtgtgtgtgtgtgtgtgtgtgtatttaatacactttttcaaaagcagttttaggtttacagtaaaattgattggaaagtacggagagtttccatataccctcctctgcctttctcctccccatagtctggcttattctttacatcttatattaatatggtacatttattacaactgatgaactaatattggttaattatgattgactaaagtccatgtttgcgctata

SEQ ID NO: 8334 - DNA, 239 bp, Homo sapiens
  source 1..239: mol_type = unassigned DNA; mol_type = unassigned DNA
caggggtccccttctgtcccggcggcctgcgagagccaaggctgcagtcccccatttatgcttcctgttgggtgtacctctctgaaagccagcagcatggagcccattacattccacagaggtcagttcccagggccccaaacaaggtagagagtggctctggagaagcaaaccaaagacacttcctcactctgtccatcaaaagcccgggagtccactgaatacactgtccttaggac

SEQ ID NO: 8335 - DNA, 366 bp, Homo sapiens
  source 1..366: mol_type = unassigned DNA
cgagcggcgagggagcaggggaagaggaggaagtggagccgcggccgggagctcgggagtcggccgccgcgccgagggtcgctccgcgcctttccgtcagtgagggtcggaaccccagctccagggctagcgcagtgtggccccaggccctcgcctccggtgcacgggaccccggacccccccagcctctggcttcacgagaccccaaccttcagttggaacagcttggaacagcgcgagcgcccgggaagccctggccgggtcgtgcgctcggtgaggggtcctaggcgggcaggacagtcggaccgaaccgccgggctggtgccgcgagcccaggctgtcaccttcgtcccgcctcaggtgagg

SEQ ID NO: 8336 - DNA, 3106 bp, Homo sapiens
  source 1..3106: mol_type = unassigned DNA; mol_type = unassigned DNA
tggtgcctgactcctcacccttcccctgcctcactgccctgtgcttcctcctgcaggacaagctgggggcctccatgggcgcctgagggccaggcgccagggccgtgggcacgagtatggtgagacaccagcccctgcagtactacgagccacagctgtgcctctcctgcctcacgggcatctacggctgccgttggaagcgctaccagcgctcccatgatgataccacaccgtgggagcgcctctggttcctgctcctcaccttcacctttggcctcacgctcacctggctttacttctggtgggaagtccacaatgactatgatgaattcaactggtacctctacaaccgcatgggctactggagcgactggcccgtacccatccttgtgaccacagctgctgccttcgcatacatcgctggcctcctggtcctggcactatgtcacattgccgtggggcagcagatgaacctgcactggctgcacaaggcctcctctgggcttccactatcccctctgtgagggagtttcttctcctggctgcaaagctggcatttgaaagaactgcaccagctggcaccccgggtggggctggcacatgctgtggtcaccttctggggccatgcctggctctcagcaggctgccctgagcacactgcactgctcttctgtcctcgcctgactcccctgcctcagtggcagcagcccccagcccaggacctgcacagaggaggcgtctgtcagcgacccaacctgagccccagagaggagcactgggtaccacacagccccaagatcgggctggtggtcatcctggcttccacggtggtggccatgtcggccgtggcccagctgtgggaggacgagtgggaggtgctgctgatctccctgcagggcacagcgccattcctgcatgtgggggctgtggcagcagtcaccatgctctcctggatcgtggcaggacagttcgcccgcgcagagcggacctcctcccaggtgaccattctctgtaccttcttcaccgtggtgtttgccctctacctggcccctctcaccatctcctctccctgcatcatggagaagaaagacctcggccccaagcctgctctcattggccaccgcggggcccccatgctggctccagagcacacgctcatgtccttccggaaggccctcgagcagaagctgtacgggctccaggctgacattaccatcagcctggacggcgtgcccttcctcatgcatgacaccaccctgcggcgcaccaccaacgtggaggaggagttcccggagctggcccgcaggcctgcctccatgcttaactggaccaccctgcagagactcaacgctggccagtggttcctgaagactgaccccttctggacagccagctccctgtcaccctccgaccacagagaggcccagaaccagtccatctgcagcctggcagagctcctggagctggccaagggcaatgccacactgctgctcaacctgcgtgacccgccccgggagcacccctaccgcagcagttttatcaacgtgactctggaggccgtgctgcactccggcttcccccagcaccaggtcatgtggctgcctagcaggcagaggcccctggtgcggaaggtggctcccggcttccaacagacatcaggctccaaggaggcagtcgccagcctgcggagaggccacatccagcggctgaacctgcgctacactcaggtgtcccgccaggagctcagggactacgcgtcctggaacctgagtgtgaacctctacacagtcaacgcaccgtggctcttctccctgctgtggtgtgcgggggtcccatccgtcacctctgacaactcccacgccctgtcccaggtgccttcccccctctggatcatgcccccggacgagtactgtctcatgtgggtcactgccgacctggtctccttcaccctcatcgtgggcatcttcgtgctccagaagtggcgcctgggtggcatacggagctacaaccctgagcagatcatgctgagtgctgcggtgcgccggaccagccgggacgtcagcatcatgaaggagaagcttattttctcagagatcagcgatggtgtagaggtctccgatgtgctctccgtatgttcagacaacagttatgacacatatgccaacagcaccgccacccctgtgggcccccgagggggtggcagccacaccaagaccctcatagagcggagtgggcgttagctgaagacatgtctgtcccacctgtacctgacacagaagctggggagcctaggagagctggtggaagtgtgtctgaactcggagtgctctgggagcgggctccacagcctccttgtgggctccagccccttgtcagccgcagcctctcttgagggggactccctgtctcctgaggcccagctgggccaggactccatcctttcagatgcccctgcaggcctggggctccttctgggaagtatggggcctagggcttggtccccctcttctgaggccctctcctgtatcccgacctggaagctttgatgggtcatgggccatgccataccccctgtggcaatggagtgtgtggatgctcacctgtgccatctgtcctcctgtctgtgccaggaggcacctgagttctctgctgttatcctgccccaagggcctgggccgagcctctacctgaagcaactctgctcttcctgtcagtctcaaagcacaaggaggttcagcccaggaggaagccagctgcaatgtggagacacgtcctcctccccaacccacctcatgccaccgccaaccccctgccccaggagcgggcctgagccacgtcctctaggagcagctggagatggccaaaagagtgagctcaggactactggatcccatgcccaggtgtccagcagacctcaaggcagaagggtcacctaacccaggagtccacagactgatgtgacctcaggttcccacatcagtggccacagggcagggcccacctggtagaagtgttctggatatggccagggtgggtgtgtggctaagtgggcctgaacagagggaacctagggcccttggccaatgtgattaaagctgccatcttg

SEQ ID NO: 8337 - DNA, 2103 bp, Homo sapiens
  source 1..2103: mol_type = unassigned DNA; mol_type = unassigned DNA
tggttataaaccgcccggccgcggcggctgcaggcggcgggcaaggacggcgggcacagcgcagcactccccgctcgttggcccgggtatcccagcgcggacccacgcgatacgctgacgccccgacgccgatccggccgagccaagactcaacgatgactctgaataatgtcaccatgcgccagggcactgtgggcatgcagccacagcagcagcgctggagcatcccagctgatggcaggcatctgatggtccagaaagagccccaccagtacagccaccgcaaccgccattctgctacccctgaggaccactgccgccgaagctggtcctctgactccacagactcagtcatctcctctgagtcagggaacacctactaccgagtggtgctcataggggagcagggggtgggcaagtccactctggccaacatctttgcaggtgtgcatgacagcatggacagcgactgcgaggtgctgggagaagatacatatgaacgaaccctgatggttgatggggaaagtgcaacgattatactcctggatatgtgggaaaataagggggaaaatgaatggctccatgaccactgcatgcaggtcggggacgcatacctgattgtctactcaatcacagaccgagcgagcttcgagaaggcatctgagctgcgaatccagctccgcagggcccggcagacagaggacattcccataattttggttggcaacaaaagtgacttagtgcggtgccgagaagtgtctgtatcagaagggagagcctgtgcagtggtgtttgactgcaagttcatcgagacctctgcagctgtccagcacaacgtgaaggagctgtttgagggcattgtgcgacaggtgcgccttcggcgggacagcaaggagaagaatgaacggcggctggcctaccagaaaaggaaggagagcatgcccaggaaagccaggcgcttctggggcaagatcgtggccaaaaacaacaagaatatggccttcaagctcaagtccaaatcctgccatgacctctctgtactctaggaacccagggtcacccagatgtccctttgatggccgttgttgaaggccattgggaccaataatctatattagattgaatacttaagttagatgtggtttcccccattgtagcagggagctagcgtattagccttgtgggcaacatgatgcatgggaaatgaaagatttttgtaaaaagtcagtatttatttccaggaaaagcctgaccttgctatttgaacacccaagactctttagaggatgtgtttggtgttcacatgtgtttcttctattttggatagtagagaagtaaagcttacaaagaatgcctagaacaagaacttttcatcattaaaaatttttcccagtgttctgatatgtgactttgaggccaatgagtcataaacaaatataagaaagctgtcaatgagtttcttcaaaggagggaaaactttctacgaatctaagatccatggagctagaattgtagaactaggctcatcagaatcgtgactattattgctccatcaaactgtgaaaagaaatgatgtggaccttgctggaaacaaaggcttagcaaacaatttttgttcaatgcccaccaagacatatagaattgggaactgatacatgtgtcccttataggctcaaaaattatatcttacaatttcttatttagggggaaattatttgaatcagattctatttagtcaaaccaccttttatgttttattatttttgaattcatggagccatcataaaaatatttttaaaatcagaattattgataccctgtagtgcaaaatgtcaatttttaatgtataatcagaagtctgaatttttataaaacatatagcataaaaacttccagtactttggttgacccttgtatgtcacagctctgctctatttattattattttgcaaaataaccattttaacatttgataaagcatatttatgaacatatttcttaataagaaaaatatccattttattaccattttctatctttttcaaaatatgcaagtttttacctatatgtcttataataaaagaaataaaatatttgaaaaaa

SEQ ID NO: 8338 - DNA, 2208 bp, Homo sapiens
  source 1..2208: mol_type = unassigned DNA; mol_type = unassigned DNA
ataaaccgcccggccgcggcggctgcaggcggcgggcaaggacggcgggcacagcgcagcactccccgctcgttggcccgggtatcccagcgcggacccacgcgatacgctgacgccccgacgccgatccggccgagccaagtaagggggacggcccgagacggagaagggagagagtgggagtttcccagcccgcagaactttcgaagttgagaaaagaacccctggaacgtgcgctcagcactgggattttctggactcaacgatgactctgaataatgtcaccatgcgccagggcactgtgggcatgcagccacagcagcagcgctggagcatcccagctgatggcaggcatctgatggtccagaaagagccccaccagtacagccaccgcaaccgccattctgctacccctgaggaccactgccgccgaagctggtcctctgactccacagactcagtcatctcctctgagtcagggaacacctactaccgagtggtgctcataggggagcagggggtgggcaagtccactctggccaacatctttgcaggtgtgcatgacagcatggacagcgactgcgaggtgctgggagaagatacatatgaacgaaccctgatggttgatggggaaagtgcaacgattatactcctggatatgtgggaaaataagggggaaaatgaatggctccatgaccactgcatgcaggtcggggacgcatacctgattgtctactcaatcacagaccgagcgagcttcgagaaggcatctgagctgcgaatccagctccgcagggcccggcagacagaggacattcccataattttggttggcaacaaaagtgacttagtgcggtgccgagaagtgtctgtatcagaagggagagcctgtgcagtggtgtttgactgcaagttcatcgagacctctgcagctgtccagcacaacgtgaaggagctgtttgagggcattgtgcgacaggtgcgccttcggcgggacagcaaggagaagaatgaacggcggctggcctaccagaaaaggaaggagagcatgcccaggaaagccaggcgcttctggggcaagatcgtggccaaaaacaacaagaatatggccttcaagctcaagtccaaatcctgccatgacctctctgtactctaggaacccagggtcacccagatgtccctttgatggccgttgttgaaggccattgggaccaataatctatattagattgaatacttaagttagatgtggtttcccccattgtagcagggagctagcgtattagccttgtgggcaacatgatgcatgggaaatgaaagatttttgtaaaaagtcagtatttatttccaggaaaagcctgaccttgctatttgaacacccaagactctttagaggatgtgtttggtgttcacatgtgtttcttctattttggatagtagagaagtaaagcttacaaagaatgcctagaacaagaacttttcatcattaaaaatttttcccagtgttctgatatgtgactttgaggccaatgagtcataaacaaatataagaaagctgtcaatgagtttcttcaaaggagggaaaactttctacgaatctaagatccatggagctagaattgtagaactaggctcatcagaatcgtgactattattgctccatcaaactgtgaaaagaaatgatgtggaccttgctggaaacaaaggcttagcaaacaatttttgttcaatgcccaccaagacatatagaattgggaactgatacatgtgtcccttataggctcaaaaattatatcttacaatttcttatttagggggaaattatttgaatcagattctatttagtcaaaccaccttttatgttttattatttttgaattcatggagccatcataaaaatatttttaaaatcagaattattgataccctgtagtgcaaaatgtcaatttttaatgtataatcagaagtctgaatttttataaaacatatagcataaaaacttccagtactttggttgacccttgtatgtcacagctctgctctatttattattattttgcaaaataaccattttaacatttgataaagcatatttatgaacatatttcttaataagaaaaatatccattttattaccattttctatctttttcaaaatatgcaagtttttacctatatgtcttataataaaagaaataaaatatttga

SEQ ID NO: 8339 - DNA, 838 bp, Homo sapiens
  source 1..838: mol_type = unassigned DNA; mol_type = unassigned DNA
ataaaccgcccggccgcggcggctgcaggcggcgggcaaggacggcgggcacagcgcagcactccccgctcgttggcccgggtatcccagcgcggacccacgcgatacgctgacgccccgacgccgatccggccgagccaagactcaacgatgactctgaataatgtcaccatgcgccagggcactgtgggcatgcagccacagcagcagcgctggagcatcccagctgatggcaggcatctgatggtccagaaagagccccaccagtacagccaccgcaaccgccattctgctacccctgaggaccactgccgccgaagctggtcctctgactccacagactcagtcatctcctctgagtcagggaacacctactaccgagtggtgctcataggggagcagggggtgggcaagtccactctggccaacatctttgcaggtgtgcatgacagcatggacagcgactgcgaggtgctgggaggtaggtgtcccagccccagtgggcttctttccaccaggggtggcccaggaagaaagagtgagggtgggtgacttatttacccacagagttgggagctgaagttaggcattttggacaattgatgggggagctgagtctctagaaaagcccaagcacaggctttcgggcaagaaaatgaaaatgcttgtagacaggaccaaaatctgttgatcctgggccagaaagggaattcttcagattccaattctaaatgggttggggaaggctgattagagagggcagagccagagggtcagcgccccacttgacttctgctgactctgacttgaacattcttcccggaactcagtatagaca

SEQ ID NO: 8340 - DNA, 740 bp, Homo sapiens
  source 1..740: mol_type = unassigned DNA; mol_type = unassigned DNA
aggcggcgggcaaggacggcgggcacagcgcagcactccccgctcgttggcccgggtatcccagcgcggacccacgcgatacgctgacgccccgacgccgatccggccgagccaagtaagggggacggcccgagacggagaagggagagagtgggagtttcccagcccgcagaactttcgaagttgagaaaagaacccctggaacgtgcgctcagcactgggattttctggactcaacgatgactctgaataatgtcaccatgcgccagggcactgtgggcatgcagccacagcagcagcgctggagcatcccagctgatggcaggcatctgatggtccagaaagagccccaccagtacagccaccgcaaccgccattctgctacccctgaggaccactgccgccgaagctggtcctctgactccacagactcagtcatctcctctgagtcagggaacacctactaccgagtggtgctcataggggagcagggggtgggcaagtccactctggccaacatctttgcaggtgtgcatgacagcatggacagcgactgcgaggtgctgggaggtaggtgtcccagccccagtgggcttctttccaccaggggtggcccaggaagaaagagtgagggtgggtgacttatttacccacagagttgggagctgaagttaggcattttggacaattgatgggggagctgagtctctagaaaagcccaagcacaggctttcgggcaa

SEQ ID NO: 8341 - DNA, 363 bp, Homo sapiens
  source 1..363: mol_type = unassigned DNA; mol_type = unassigned DNA
gttaaccgtatttgttttcccatgcaaatgatagtctgcctgaggagctggttactgacagtgtgggcagcatgactcaacgatgactctgaataatgtcaccatgcgccagggcactgtgggcatgcagccacagcagcagcgctggagcatcccagctgatggcaggcatctgatggtccagaaagagccccaccagtacagccaccgcaaccgccattctgctacccctgaggaccactgccgccgaagctggtcctctgactccacagactcagtcatctcctctgagtcagggaacacctactaccgagtggtgctcataggggagcagggggtgggcaagtccactctggccaacat

SEQ ID NO: 8342 - DNA, 1783 bp, Homo sapiens
  source 1..1783: mol_type = unassigned DNA; mol_type = unassigned DNA
agagccagagcaggatggagaggagacgcatcacctccgctgctcgccgctcctacgtctcctcaggggagatgatggtggggggcctggctcctggccgccgtctgggtcctggcacccgcctctccctggctcgaatgccccctccactcccgacccgggtggatttctccctggctggggcactcaatgctggcttcaaggagacccgggccagtgagcgggcagagatgatggagctcaatgaccgctttgccagctacatcgagaaggttcgcttcctggaacagcaaaacaaggcgctggctgctgagctgaaccagctgcgggccaaggagcccaccaagctggcagacgtctaccaggctgagctgcgagagctgcggctgcggctcgatcaactcaccgccaacagcgcccggctggaggttgagagggacaatctggcacaggacctggccactgtgaggcagaagctccaggatgaaaccaacctgaggctggaagccgagaacaacctggctgcctatagacaggaagcagatgaagccaccctggcccgtctggatctggagaggaagattgagtcgctggaggaggagatccggttcttgaggaagatccacgaggaggaggttcgggaactccaggagcagctggcccgacagcaggtccatgtggagcttgacgtggccaagccagacctcaccgcagccctgaaagagatccgcacgcagtatgaggcaatggcgtccagcaacatgcatgaagccgaagagtggtaccgctccaagtttgcagacctgacagacgctgctgcccgcaacgcggagctgctccgccaggccaagcacgaagccaacgactaccggcgccagttgcagtccttgacctgcgacctggagtctctgcgcggcacgaacgagtccctggagaggcagatgcgcgagcaggaggagcggcacgtgcgggaggcggccagttatcaggaggcgctggcgcggctggaggaagaggggcagagcctcaaggacgagatggcccgccacttgcaggagtaccaggacctgctcaatgtcaagctggccctggacatcgagatcgccacctacaggaagctgctagagggcgaggagaaccggatcaccattcccgtgcagaccttctccaacctgcagattcgagaaaccagcctggacaccaagtctgtgtcagaaggccacctcaagaggaacatcgtggtgaagaccgtggagatgcgggatggagagggtactaagcagctccgaaccagcacctcaggcgtgtggtccctggccttggtccgcagcttccttggcacagcccttgagccacaagacaccacatcgggcacggccttgagaacactggcgctcacccaagaatgggtcaaaggaaaccggaatgagaagggcgggccgaggtgctcgggcagggagatctctgcctcagtgctccaggccctgccctgccagcctggtggaaaagtctttcatcaacctgggggatgaaggaaacccaccctcctgcatatctggccatccgggaggctggctggacctgagctgatggcttgggactttcccaggcccaacctgcacaagaactgagtctctaggggaaaattcaacacctcaaatgatgtagtatttgatcatttgttgattacatgtccattcattggtttggggctataaacattcttgttaagagctgtggagatcagtgtttgtttaccataaagattttgctttttcccttt

SEQ ID NO: 8343 - DNA, 6538 bp, Homo sapiens
  source 1..6538: mol_type = unassigned DNA; mol_type = unassigned DNA
agggaaacggggcgctgcaggaataaagacgagccagcacagccagctcatgtgtaacggctttgtggagctgtcaaggcctggtctctgggagagaggcacagggaggccagacaaggaaggggtgacctggagggacagatccaggggctaaagtcctgataaggcaagagagtgccggccccctcttgccctatcaggacctccactgccacatagaggccatgattgacccttagacaaagggctggtgtccaatcccagcccccagccccagaactccagggaatgaatgggcagagagcaggaatgtgggacatctgtgttcaagggaaggactccaggagtctgctgggaatgaggcctagtaggaaatgaggtggcccttgagggtacagaacaggttcattcttcgccaaattcccagcaccttgcaggcacttacagctgagtgagataatgcctgggttatgaaatcaaaaagttggaaagcaggtcagaggtcatctggtacagcccttccttcccttttttttttttttttttgtgagacaaggtctctctctgttgcccaggctggagtggcgcaaacacagctcactgcagcctcaacctactgggctcaagcaatcctccagcctcagcctcccaaagtgctgggattacaagcatgagccaccccactcagccctttccttcctttttaattgatgcataataattgtaagtattcatcatggtccaaccaaccctttcttgacccaccttcctagagagagggtcctcttgcttcagcggtcagggccccagacccatggtctggctccaggtaccacctgcctcatgcaggagttggcgtgcccaggaagctctgcctctgggcacagtgacctcagtggggtgaggggagctctccccatagctgggctgcggcccaaccccaccccctcaggctatgccagggggtgttgccaggggcacccgggcatcgccagtctagcccactccttcataaagccctcgcatcccaggagcgagcagagccagagcaggatggagaggagacgcatcacctccgctgctcgccgctcctacgtctcctcaggggagatgatggtggggggcctggctcctggccgccgtctgggtcctggcacccgcctctccctggctcgaatgccccctccactcccgacccgggtggatttctccctggctggggcactcaatgctggcttcaaggagacccgggccagtgagcgggcagagatgatggagctcaatgaccgctttgccagctacatcgagaaggttcgcttcctggaacagcaaaacaaggcgctggctgctgagctgaaccagctgcgggccaaggagcccaccaagctggcagacgtctaccaggctgagctgcgagagctgcggctgcggctcgatcaactcaccgccaacagcgcccggctggaggttgagagggacaatctggcacaggacctggccactgtgaggcagaagctccaggatgaaaccaacctgaggctggaagccgagaacaacctggctgcctatagacaggaagcagatgaagccaccctggcccgtctggatctggagaggaagattgagtcgctggaggaggagatccggttcttgaggaagatccacgaggaggaggttcgggaactccaggagcagctggcccgacagcaggtccatgtggagcttgacgtggccaagccagacctcaccgcagccctgaaagagatccgcacgcagtatgaggcaatggcgtccagcaacatgcatgaagccgaagagtggtaccgctccaagtttgcagacctgacagacgctgctgcccgcaacgcggagctgctccgccaggccaagcacgaagccaacgactaccggcgccagttgcagtccttgacctgcgacctggagtctctgcgcggcacgaacgagtccctggagaggcagatgcgcgagcaggaggagcggcacgtgcgggaggcggccagttatcaggaggcgctggcgcggctggaggaagaggggcagagcctcaaggacgagatggcccgccacttgcaggagtaccaggacctgctcaatgtcaagctggccctggacatcgagatcgccacctacaggaagctgctagagggcgaggagaaccggatcaccattcccgtgcagaccttctccaacctgcagattcgagaaaccagcctggacaccaagtctgtgtcagaaggccacctcaagaggaacatcgtggtgaagaccgtggagatgcgggatggagaggtcattaaggagtccaagcaggagcacaaggatgtgatgtgaggcaggacccacctggtggcctctgccccgtctcatgaggggcccgagcagaagcaggatagttgctccgcctctgctggcacatttccccagacctgagctccccaccaccccagctgctcccctccctcctctgtccctaggtcagcttgctgccctaggctccgtcagtatcaggcctgccagacggcacccacccagcacccagcaactccaactaacaagaaactcacccccaaggggcagtctggaggggcatggccagcagcttgcgttagaatgaggaggaaggagagaaggggaggagggcggggggcacctactacatcgccctccacatccctgattcctgttgttatggaaactgttgccagagatggaggttctctcggagtatctgggaactgtgcctttgagtttcctcaggctgctggaggaaaactgagactcagacaggaaagggaaggccccacagacaaggtagccctggccagaggcttgttttgtcttttggtttttatgaggtgggatatccctatgctgcctaggctgaccttgaactcctgggctcaagcagtctacccacctcagcctcctgtgtagctgggattatagattggagccaccatgcccagctcagagggttgttctcctagactgaccctgatcagtctaagatgggtggggacgtcctgccacctggggcagtcacctgcccagatcccagaaggacctcctgagcgatgactcaagtgtctcagtccacctgagctgccatccagggatgccatctgtgggcacgctgtgggcaggtgggagcttgattctcagcacttgggggatctgttgtgtacgtggagagggatgaggtgctgggagggatagaggggggctgcctggcccccagctgtgggtacagagaggtcaagcccaggaggactgccccgtgcagactggaggggacgctggtagagatggaggaggaggcaattgggatggcgctaggcatacaagtaggggttgtgggtgaccagttgcacttggcctctggattgtgggaattaaggaagtgactcatcctcttgaagatgctgaaacaggagagaaaggggatgtatccatgggggcagggcatgactttgtcccatttctaaaggcctcttccttgctgtgtcataccaggccgccccagcctctgagcccctgggactgctgcttcttaaccccagtaagccactgccacacgtctgaccctctccaccccatagtgaccggctgcttttccctaagccaagggcctcttgcggtcccttcttactcacacacaaaatgtacccagtattctaggtagtgccctattttacaattgtaaaactgaggcacgagcaaagtgaagacactggctcatattcctgcagcctggaggccgggtgctcagggctgacacgtccaccccagtgcacccactctgctttgactgagcagactggtgagcagactggtgggatctgtgcccagagatgggactgggagggcccacttcagggttctcctctcccctctaaggccgaagaagggtccttccctctccccaagacttggtgtcctttccctccactccttcctgccacctgctgctgctgctgctgctaatcttcagggcactgctgctgcctttagtcgctgaggaaaaataaagacaaatgctgcgcccttccccagagtggactctgatctgttcatgagagggcgggactggggccaagatgtagcctttgacaagaccaactcatttcttattactgatcatctctggggcccatgccctcaccaaattccacccgcagccaaagaggacatacaccagctccctccactcttttcttccttcctctccctgctacctgcaactcaaccagcacaatcttcataggcaagaaagcaaagcagctcaaacatgattcaacactgatcagtgtttaccactggataaatctgagttcacactttccttctctgacctaaatgtgaagtcaggaaacacatgtgccctacttccatcctgagctcagtccccaatctcccaccagcctcaggcccctccacttctcagatcaggtcccagacctgcccatgaaaatggggagcaggctgtaacagatttgtccacatgttcctaccacctgtcccaacccagggtacccacccagagacatctggtatcatttaacaaacacattgaaggacaactggtcttcagagctgaagagagctcctagggggagaagctgggacaacagtgaaataagtagcagcagcaacgacagaagtgaatggtgacaaagactgctgtgatgagcaggtagcctatcagggtgagctccacagccgagcgagtctcaggatctgagaacgaggctgggtagtgcccatgagatgtcacacccagccggaagccagcaactagcacaccctgcctccagcaatagtagatgccccggtcatccagctgggtgaagcggatgtggagctggttgccgtggtcaatgaacaccctcatggacctgttgacacccttcaggtactgtgtgcggtagaggtgctggcggtctttgtcccaggccactgcatgctctggccgggccccaggacaggagatgatgagtccatggcccagtctctgctggtggaactgaatgggcacctggggcacccagggccggctgcccactttggacacatagttaatgatggccagcacgccctcccggatggtctttgtcttctcacagggtactaagcagctccgaaccagcacctcaggcgtgtggtccctggccttggtccgcagcttccttggcacagcccttgagccacaagacaccacatcgggcacggccttgaggtagcgtggggagaggtctgggctctgcaggtagcagaggccgatgcgccactgctccccacgcactccgcagcggtcacagggggtccattcccagaaggtggtgaagacatggaggtgcccatagtattcatctgcaaagggctcctggcccttgtcctggaaagtggccaccattccctcactgttctggatgtccacatcgtaggcgtaaaagtagtcccccttgcgggtgccgcagaagtacaggcctgagtcctcagactgagccctgaaaaccaacaagctgaacatgcggatgctgaagcgggtcagcatgtcgctgcccacacgtacctgggctgcctccgtcagcacccgcccatcaaagtccgtcagcactttggtgtggctgctacctaggtgcttttggtagaaccagactacagctggcacctcttcgggtttgcagtgacagggaagctcaaagctcatgtcggccaggtaggctgcattttcaaacatcaggaaagcagggcagggggtcctctgaaaaatgttttccttctccacaatttcaaaggcctggagcccccatgcccacaggagcacagtggtgagggccaggtgcatacctgaaggaggcaggggtcagaggggcagggcaaaaccagggcattaaaggctcatagggctcctagaaagctctgctaagcggaagcctctagatgaggaaaggattatgcagccaggaaaagcagcaacaatctgcagaggaagccgccaagtgcaaggcaatttattcccagtggatgtacaagatgcccttctaacattccagacctgatctcagggtggggggggaaagccattctagaacctggcctttactcccctttctagaacactggcgctcacccaagaatgggtcaaaggaaaccggaatgagaagggcgggccgaggtgctcgggcagggagatctctgcctcagtgctccaggccctgccctgccagcctggtggaaaagtctttcatcaacctgggggatgaaggaaacccaccctcctgcatatctggccatccgggaggctggctggacctgagctgatggcttgggactttcccaggcccaacctgcacaagaactgagtctctaggggaaaattcaacacctcaaatgatgtagtatttgatcatttgttgattacatgtccattcattggtttggggctataaacattcttgttaagagctgtggagatcagtgtttgtttaccataaagattttgctttttcccttt

SEQ ID NO: 8344 - DNA, 2139 bp, Homo sapiens
  source 1..2139: mol_type = unassigned DNA; mol_type = unassigned DNA
tcgagatcgccacctacaggaagctgctagagggcgaggagaaccggatcaccattcccgtgcagaccttctccaacctgcagattcgagaaaccagcctggacaccaagtctgtgtcagaaggccacctcaagaggaacatcgtggtgaagaccgtggagatgcgggatggagagggtacccacccagagacatctggtatcatttaacaaacacattgaaggacaactggtcttcagagctgaagagagctcctagggggagaagctgggacaacagtgaaataagtagcagcagcaacgacagaagtgaatggtgacaaagactgctgtgatgagcaggtagcctatcagggtgagctccacagccgagcgagtctcaggatctgagaacgaggctgggtagtgcccatgagatgtcacacccagccggaagccagcaactagcacaccctgcctccagcaatagtagatgccccggtcatccagctgggtgaagcggatgtggagctggttgccgtggtcaatgaacaccctcatggacctgttgacacccttcaggtactgtgtgcggtagaggtgctggcggtctttgtcccaggccactgcatgctctggccgggccccaggacaggagatgatgagtccatggcccagtctctgctggtggaactgaatgggcacctggggcacccagggccggctgcccactttggacacatagttaatgatggccagcacgccctcccggatggtctttgtcttctcacagggtactaagcagctccgaaccagcacctcaggcgtgtggtccctggccttggtccgcagcttccttggcacagcccttgagccacaagacaccacatcgggcacggccttgaggtagcgtggggagaggtctgggctctgcaggtagcagaggccgatgcgccactgctccccacgcactccgcagcggtcacagggggtccattcccagaaggtggtgaagacatggaggtgcccatagtattcatctgcaaagggctcctggcccttgtcctggaaagtggccaccattccctcactgttctggatgtccacatcgtaggcgtaaaagtagtcccccttgcgggtgccgcagaagtacaggcctgagtcctcagactgagccctgaaaaccaacaagctgaacatgcggatgctgaagcgggtcagcatgtcgctgcccacacgtacctgggctgcctccgtcagcacccgcccatcaaagtccgtcagcactttggtgtggctgctacctaggtgcttttggtagaaccagactacagctggcacctcttcgggtttgcagtgacagggaagctcaaagctcatgtcggccaggtaggctgcattttcaaacatcaggaaagcagggcagggggtcctctgaaaaatgttttccttctccacaatttcaaaggcctggagcccccatgcccacaggagcacagtggtgagggccaggtgcatacctgaaggaggcaggggtcagaggggcagggcaaaaccagggcattaaaggctcatagggctcctagaaagctctgctaagcggaagcctctagatgaggaaaggattatgcagccaggaaaagcagcaacaatctgcagaggaagccgccaagtgcaaggcaatttattcccagtggatgtacaagatgcccttctaacattccagacctgatctcagggtggggggggaaagccattctagaacctggcctttactcccctttctagaacactggcgctcacccaagaatgggtcaaaggaaaccggaatgagaagggcgggccgaggtgctcgggcagggagatctctgcctcagtgctccaggccctgccctgccagcctggtggaaaagtctttcatcaacctgggggatgaaggaaacccaccctcctgcatatctggccatccgggaggctggctggacctgagctgatggcttgggactttcccaggcccaacctgcacaagaactgagtctctaggggaaaattcaacacctcaaatgatgtagtatttgatcatttgttgattacatgtccattcattggtttggggctataaacattcttgttaagagctgtggagatcagtgtttgttta

SEQ ID NO: 8345 - DNA, 979 bp, Homo sapiens
  source 1..979: mol_type = unassigned DNA; mol_type = unassigned DNA
gcgctttgcccagcttgacagggaaaaccagcctggacaccaagtctgtgtcagaaggccacctcaagaggaacatcgtggtgaagaccgtggagatgcgggatggagagggtacccacccagagacatctggtatcatttaacaaacacattgaaggacaactggtcttcagagctgaagagagctcctagggggagaagctgggacaacagtgaaataagtagcagcagcaacgacagaagtgaatggtgacaaagactgctgtgatgagcaggtagcctatcagggtgagctccacagccgagcgagtctcaggatctgagaacgaggctgggtagtgcccatgagatgtcacacccagccggaagccagcaactagcacaccctgcctccagcaatagtagatgccccggtcatccagctgggtgaagcggatgtggagctggttgccgtggtcaatgaacaccctcatggacctgttgacacccttcagggtactaagcagctccgaaccagcacctcaggcgtgtggtccctggccttggtccgcagcttccttggcacagcccttgagccacaagacaccacatcgggcacggccttgagaacactggcgctcacccaagaatgggtcaaaggaaaccggaatgagaagggcgggccgaggtgctcgggcagggagatctctgcctcagtgctccaggccctgccctgccagcctggtggaaaagtctttcatcaacctgggggatgaaggaaacccaccctcctgcatatctggccatccgggaggctggctggacctgagctgatggcttgggactttcccaggcccaacctgcacaagaactgagtctctaggggaaaattcaacacctcaaatgatgtagtatttgatcatttgttgattacatgtccattcattggtttggggctataaacattcttgttaagagctgtggagatcagtgtttgttt

SEQ ID NO: 8346 - DNA, 1566 bp, Homo sapiens
  source 1..1566: mol_type = unassigned DNA; mol_type = unassigned DNA
gcgggatggagagggtacccacccagagacatctggtatcatttaacaaacacattgaaggacaactggtcttcagagctgaagagagctcctagggggagaagctgggacaacagtgaaataagtagcagcagcaacgacagaagtgaatggtgacaaagactgctgtgatgagcaggtagcctatcagggtgagctccacagccgagcgagtctcaggatctgagaacgaggctgggtagtgcccatgagatgtcacacccagccggaagccagcaactagcacaccctgcctccagcaatagtagatgccccggtcatccagctgggtgaagcggatgtggagctggttgccgtggtcaatgaacaccctcatggacctgttgacacccttcaggtactgtgtgcggtagaggtgctggcggtctttgtcccaggccactgcatgctctggccgggccccaggacaggagatgatgagtccatggcccagtctctgctggtggaactgaatgggcacctggggcacccagggccggctgcccactttggacacatagttaatgatggccagcacgccctcccggatggtctttgtcttctcacagggtactaagcagctccgaaccagcacctcaggcgtgtggtccctggccttggtccgcagcttccttggcacagcccttgagccacaagacaccacatcgggcacggccttgaggtagcgtggggagaggtctgggctctgcaggtagcagaggccgatgcgccactgctccccacgcactccgcagcggtcacagggggtccattcccagaaggtggtgaagacatggaggtgcccatagtattcatctgcaaagggctcctggcccttgtcctggaaagtggccaccattccctcactgttctggatgtccacatcgtaggcgtaaaagtagtcccccttgcgggtgccgcagaagtacaggcctgagtcctcagactgagccctgaaaaccaacaagctgaacatgcggatgctgaagcgggtcagcatgtcgctgcccacacgtacctgggctgcctccgtcagcacccgcccatcaaagtccgtcagcactttggtgtggctgctacctaggtgcttttggtagaaccagactacagctggcacctcttcgggtttgcagtgacagggaagctcaaagctcatgtcggccagaacactggcgctcacccaagaatgggtcaaaggaaaccggaatgagaagggcgggccgaggtgctcgggcagggagatctctgcctcagtgctccaggccctgccctgccagcctggtggaaaagtctttcatcaacctgggggatgaaggaaacccaccctcctgcatatctggccatccgggaggctggctggacctgagctgatggcttgggactttcccaggcccaacctgcacaagaactgagtctctaggggaaaattcaacacctcaaatgatgtagtatttgatcatttgttgattacatgtccattcattggtttggggctataaacattcttgttaagagctgtggagatca

SEQ ID NO: 8347 - DNA, 2641 bp, Homo sapiens
  source 1..2641: mol_type = unassigned DNA; mol_type = unassigned DNA
aatgtcaagctggccctggacatcgagatcgccacctacaggaagctgctagagggcgaggagaaccggatcaccattcccgtgcagaccttctccaacctgcagattcgaggtcagtacagcagggcctcgtgggaagggcactggagtcctgccccctcctccagggcctgtaggttgctccagactgggactgaggatcagggcaaagggatccagctctccctgggggccttcgtgacactgcagcgctcctagccagagcctatcataccagggtacttctaggtggggcttgcagctgcccctgtcctgctaggccctggtccctcttcccctccctgcaccccattcgacagcagaactgggtgagagcttgacatctgccctgtctgcagatccctgagcaagcactgcccttctgagtgttttctgtttttgtttttttaactgcttgtcactacagggggcaaaagcaccaaagacggggaaaatcacaaggtcacaagatatctcaaaagcctcacaatacgagttataccaatacaggctcaccagattgtaaatggaacgccgccggctcgcggttagctgcctgcctctcagacacggcgctttgcccagcttgacagggaaaaccagcctggacaccaagtctgtgtcagaaggccacctcaagaggaacatcgtggtgaagaccgtggagatgcgggatggagagggtacccacccagagacatctggtatcatttaacaaacacattgaaggacaactggtcttcagagctgaagagagctcctagggggagaagctgggacaacagtgaaataagtagcagcagcaacgacagaagtgaatggtgacaaagactgctgtgatgagcaggtagcctatcagggtgagctccacagccgagcgagtctcaggatctgagaacgaggctgggtagtgcccatgagatgtcacacccagccggaagccagcaactagcacaccctgcctccagcaatagtagatgccccggtcatccagctgggtgaagcggatgtggagctggttgccgtggtcaatgaacaccctcatggacctgttgacacccttcaggtactgtgtgcggtagaggtgctggcggtctttgtcccaggccactgcatgctctggccgggccccaggacaggagatgatgagtccatggcccagtctctgctggtggaactgaatgggcacctggggcacccagggccggctgcccactttggacacatagttaatgatggccagcacgccctcccggatggtctttgtcttctcacagggtactaagcagctccgaaccagcacctcaggcgtgtggtccctggccttggtccgcagcttccttggcacagcccttgagccacaagacaccacatcgggcacggccttgaggtagcgtggggagaggtctgggctctgcaggtagcagaggccgatgcgccactgctccccacgcactccgcagcggtcacagggggtccattcccagaaggtggtgaagacatggaggtgcccatagtattcatctgcaaagggctcctggcccttgtcctggaaagtggccaccattccctcactgttctggatgtccacatcgtaggcgtaaaagtagtcccccttgcgggtgccgcagaagtacaggcctgagtcctcagactgagccctgaaaaccaacaagctgaacatgcggatgctgaagcgggtcagcatgtcgctgcccacacgtacctgggctgcctccgtcagcacccgcccatcaaagtccgtcagcactttggtgtggctgctacctaggtgcttttggtagaaccagactacagctggcacctcttcgggtttgcagtgacagggaagctcaaagctcatgtcggccaggtaggctgcattttcaaacatcaggaaagcagggcagggggtcctctgaaaaatgttttccttctccacaatttcaaaggcctggagcccccatgcccacaggagcacagtggtgagggccaggtgcatacctgaaggaggcaggggtcagaggggcagggcaaaaccagggcattaaaggctcatagggctcctagaaagctctgctaagcggaagcctctagatgaggaaaggattatgcagccaggaaaagcagcaacaatctgcagaggaagccgccaagtgcaaggcaatttattcccagtggatgtacaagatgcccttctaacattccagacctgatctcagggtggggggggaaagccattctagaacctggcctttactcccctttctagaacactggcgctcacccaagaatgggtcaaaggaaaccggaatgagaagggcgggccgaggtgctcgggcagggagatctctgcctcagtgctccaggccctgccctgccagcctggtggaaaagtctttcatcaacctgggggatgaaggaaacccaccctcctgcatatctggccatccgggaggctggctggacctgagctgatggcttgggactttcccaggcccaacctgcacaagaactgagtctctaggggaaaattcaacacctcaaatgatgtagtatttgatcatttgttgattacatgtccattcattggtttggggct

SEQ ID NO: 8348 - DNA, 930 bp, Homo sapiens
  source 1..930: mol_type = unassigned DNA; mol_type = unassigned DNA
tctccaacctgcagattcgagaaaccagcctggacaccaagtctgtgtcagaaggccacctcaagaggaacatcgtggtgaagaccgtggagatgcgggatggagagggtacccacccagagacatctggtatcatttaacaaacacattgaaggacaactggtcttcagagctgaagagagctcctagggggagaagctgggacaacagtgaaataagtagcagcagcaacgacagaagtgaatggtgacaaagactgctgtgatgagcaggtagcctatcagggtgagctccacagccgagcgagtctcaggatctgagaacgaggctgggtagtgcccatgagatgtcacacccagccggaagccagcaactagcacaccctgcctccagcaatagtagatgccccggtcatccagctgggtgaagcggatgtggagctggttgccgtggtcaatgaacaccctcatggacctgttgacacccttcagggtactaagcagctccgaaccagcacctcaggcgtgtggtccctggccttggtccgcagcttccttggcacagcccttgagccacaagacaccacatcgggcacggccttgagaacactggcgctcacccaagaatgggtcaaaggaaaccggaatgagaagggcgggccgaggtgctcgggcagggagatctctgcctcagtgctccaggccctgccctgccagcctggtggaaaagtctttcatcaacctgggggatgaaggaaacccaccctcctgcatatctggccatccgggaggctggctggacctgagctgatggcttgggactttcccaggcccaacctgcacaagaactgagtctctaggggaaaattcaacacctcaaatgatgtagtatttgatcatttgttgattacatgtccattcattggtttgg

SEQ ID NO: 8349 - DNA, 2539 bp, Homo sapiens
  source 1..2539: mol_type = unassigned DNA; mol_type = unassigned DNA
gggtttcaccatattagtcaggctggtctcaaactcctgacctcaggcgatccacctgcctcggcctcccaaagtgctgggattacaggtgtgagccaccatgcctggcctattttttgtatttttagtagaggtttcactatgttggccaggctggtctcgaactcctggcgtcaggtgatccacctgcctcagcctcccaaaatgatggcattataggtgtgagccaccgcacccctcctggtctcctgatttcaataccgtgctgggttttcagaaagccaggtgccaggccagggcttgcagaggggctgaaatgaagccaggccagaagacagagcagccaggactctggcagcagcactattgggatttgggggctctccagcccgtttggaagagcctaggctctctctgctcggttgcataggttctcatactcatgatggggaggggggtgcgatggggaagccgggcatgggagaggatggctcatgccctgaaagtccatgagaggcctcctctccccacatctgcagaaaccagcctggacaccaagtctgtgtcagaaggccacctcaagaggaacatcgtggtgaagaccgtggagatgcgggatggagagggtacccacccagagacatctggtatcatttaacaaacacattgaaggacaactggtcttcagagctgaagagagctcctagggggagaagctgggacaacagtgaaataagtagcagcagcaacgacagaagtgaatggtgacaaagactgctgtgatgagcaggtagcctatcagggtgagctccacagccgagcgagtctcaggatctgagaacgaggctgggtagtgcccatgagatgtcacacccagccggaagccagcaactagcacaccctgcctccagcaatagtagatgccccggtcatccagctgggtgaagcggatgtggagctggttgccgtggtcaatgaacaccctcatggacctgttgacacccttcaggtactgtgtgcggtagaggtgctggcggtctttgtcccaggccactgcatgctctggccgggccccaggacaggagatgatgagtccatggcccagtctctgctggtggaactgaatgggcacctggggcacccagggccggctgcccactttggacacatagttaatgatggccagcacgccctcccggatggtctttgtcttctcacagggtactaagcagctccgaaccagcacctcaggcgtgtggtccctggccttggtccgcagcttccttggcacagcccttgagccacaagacaccacatcgggcacggccttgaggtagcgtggggagaggtctgggctctgcaggtagcagaggccgatgcgccactgctccccacgcactccgcagcggtcacagggggtccattcccagaaggtggtgaagacatggaggtgcccatagtattcatctgcaaagggctcctggcccttgtcctggaaagtggccaccattccctcactgttctggatgtccacatcgtaggcgtaaaagtagtcccccttgcgggtgccgcagaagtacaggcctgagtcctcagactgagccctgaaaaccaacaagctgaacatgcggatgctgaagcgggtcagcatgtcgctgcccacacgtacctgggctgcctccgtcagcacccgcccatcaaagtccgtcagcactttggtgtggctgctacctaggtgcttttggtagaaccagactacagctggcacctcttcgggtttgcagtgacagggaagctcaaagctcatgtcggccaggtaggctgcattttcaaacatcaggaaagcagggcagggggtcctctgaaaaatgttttccttctccacaatttcaaaggcctggagcccccatgcccacaggagcacagtggtgagggccaggtgcatacctgaaggaggcaggggtcagaggggcagggcaaaaccagggcattaaaggctcatagggctcctagaaagctctgctaagcggaagcctctagatgaggaaaggattatgcagccaggaaaagcagcaacaatctgcagaggaagccgccaagtgcaaggcaatttattcccagtggatgtacaagatgcccttctaacattccagacctgatctcagggtggggggggaaagccattctagaacctggcctttactcccctttctagaacactggcgctcacccaagaatgggtcaaaggaaaccggaatgagaagggcgggccgaggtgctcgggcagggagatctctgcctcagtgctccaggccctgccctgccagcctggtggaaaagtctttcatcaacctgggggatgaaggaaacccaccctcctgcatatctggccatccgggaggctggctggacctgagctgatggcttgggactttcccaggcccaacctgcacaagaactgagtctctaggggaaaattcaacacctcaaatgatgtagtatttgatcatttgttgattacatgtccattcattggttt

SEQ ID NO: 8350 - DNA, 1162 bp, Homo sapiens
  source 1..1162: mol_type = unassigned DNA; mol_type = unassigned DNA
ccaagtctgtgtcagaaggccacctcaagaggaacatcgtggtgaagaccgtggagatgcgggatggagagggtacccacccagagacatctggtatcatttaacaaacacattgaaggacaactggtcttcagagctgaagagagctcctagggggagaagctgggacaacagtgaaataagtagcagcagcaacgacagaagtgaatggtgacaaagactgctgtgatgagcaggtagcctatcagggtgagctccacagccgagcgagtctcaggatctgagaacgaggctgggtagtgcccatgagatgtcacacccagccggaagccagcaactagcacaccctgcctccagcaatagtagatgccccggtcatccagctgggtgaagcggatgtggagctggttgccgtggtcaatgaacaccctcatggacctgttgacacccttcagggtactaagcagctccgaaccagcacctcaggcgtgtggtccctggccttggtccgcagcttccttggcacagcccttgagccacaagacaccacatcgggcacggccttgaggcgtaaaagtagtcccccttgcgggtgccgcagaagtacaggcctgagtcctcagactgagccctgaaaaccaacaagctgaacatgcggatgctgaagcgggtcagcatgtcgctgcccacacgtacctgggctgcctccgtcagcacccgcccatcaaagtccgtcagcactttggtgtggctgctacctaggtgcttttggtagaaccagactacagctggcacctcttcgggtttgcagtgacagggaagctcaaagctcatgtcggccagaacactggcgctcacccaagaatgggtcaaaggaaaccggaatgagaagggcgggccgaggtgctcgggcagggagatctctgcctcagtgctccaggccctgccctgccagcctggtggaaaagtctttcatcaacctgggggatgaaggaaacccaccctcctgcatatctggccatccgggaggctggctggacctgagctgatggcttgggactttcccaggcccaacctgcacaagaactgagtctctaggggaaaattcaacacctcaaatgatgtagtatttgatcatttgttgattacatgtccattcatt

SEQ ID NO: 8351 - DNA, 1106 bp, Homo sapiens
  source 1..1106: mol_type = unassigned DNA; mol_type = unassigned DNA
ttcgagaaaccagcctggacaccaagtctgtgtcagaaggccacctcaagaggaacatcgtggtgaagaccgtggagatgcgggatggagagggtacccacccagagacatctggtatcatttaacaaacacattgaaggacaactggtcttcagagctgaagagagctcctagggggagaagctgggacaacagtgaaataagtagcagcagcaacgacagaagtgaatggtgacaaagactgctgtgatgagcaggtagcctatcagggtgagctccacagccgagcgagtctcaggatctgagaacgaggctgggtagtgcccatgagatgtcacacccagccggaagccagcaactagcacaccctgcctccagcaatagtagatgccccggtcatccagctgggtgaagcggatgtggagctggttgccgtggtcaatgaacaccctcatggacctgttgacacccttcaggtactgtgtgcggtagaggtgctggcggtctttgtcccaggccactgcatgctctggccgggccccaggacaggagatgatgagtccatggcccagtctctgctggtggaactgaatgggcacctggggcacccagggccggctgcccactttggacacatagttaatgatggccagcacgccctcccggatggtctttgtcttctcacagggtactaagcagctccgaaccagcacctcaggcgtgtggtccctggccttggtccgcagcttccttggcacagcccttgagccacaagacaccacatcgggcacggccttgagaacactggcgctcacccaagaatgggtcaaaggaaaccggaatgagaagggcgggccgaggtgctcgggcagggagatctctgcctcagtgctccaggccctgccctgccagcctggtggaaaagtctttcatcaacctgggggatgaaggaaacccaccctcctgcatatctggccatccgggaggctggctggacctgagctgatggcttgggactttcccaggcccaacctgcacaagaactgagtctctaggggaaaattcaacacctcaaatgatgtagtatttgatcatttgttgattac

SEQ ID NO: 8352 - DNA, 1533 bp, Homo sapiens
  source 1..1533: mol_type = unassigned DNA; mol_type = unassigned DNA
tcaagctggccctggacatcgagatcgccacctacaggaagctgctagagggcgaggagaaccggatcaccattcccgtgcagaccttctccaacctgcagattcgagggggcaaaagcaccaaagacggggaaaatcacaagaaaccagcctggacaccaagtctgtgtcagaaggccacctcaagaggaacatcgtggtgaagaccgtggagatgcgggatggagagccaaagaggacatacaccagctccctccactcttttcttccttcctctccctgctacctgcaactcaaccagcacaatcttcataggcaagaaagcaaagcagctcaaacatgattcaacactgatcagtgtttaccactggataaatctgagttcacactttccttctctgacctaaatgtgaagtcaggaaacacatgtgccctacttccatcctgagctcagtccccaatctcccaccagcctcaggcccctccacttctcagatcaggtcccagacctgcccatgaaaatggggagcaggctgtaacagatttgtccacatgttcctaccacctgtcccaacccagggtacccacccagagacatctggtatcatttaacaaacacattgaaggacaactggtcttcagagctgaagagagctcctagggggagaagctgggacaacagtgaaataagtagcagcagcaacgacagaagtgaatggtgacaaagactgctgtgatgagcaggtagcctatcagggtgagctccacagccgagcgagtctcaggatctgagaacgaggctgggtagtgcccatgagatgtcacacccagccggaagccagcaactagcacaccctgcctccagcaatagtagatgccccggtcatccagctgggtgaagcggatgtggagctggttgccgtggtcaatgaacaccctcatggacctgttgacacccttcaggtactgtgtgcggtagaggtgctggcggtctttgtcccaggccactgcatgctctggccgggccccaggacaggagatgatgagtccatggcccagtctctgctggtggaactgaatgggcacctggggcacccagggccggctgcccactttggacacatagttaatgatggccagcacgccctcccggatggtctttgtcttctcacagggtactaagcagctccgaaccagcacctcaggcgtgtggtccctggccttggtccgcagcttccttggcacagcccttgagccacaagacaccacatcgggcacggccttgagaacactggcgctcacccaagaatgggtcaaaggaaaccggaatgagaagggcgggccgaggtgctcgggcagggagatctctgcctcagtgctccaggccctgccctgccagcctggtggaaaagtctttcatcaacctgggggatgaaggaaacccaccctcctgcatatctggccatccgggaggctggctggacctgagctgatggcttgggactttcccaggcccaacctgcacaagaactg

SEQ ID NO: 8353 - DNA, 538 bp, Homo sapiens
  source 1..538: mol_type = unassigned DNA; mol_type = unassigned DNA
gtgtcagaaggccacctcaagaggaacatcgtggtgaagaccgtggagatgcgggatggagagggtactaagcagctccgaaccagcacctcaggcgtgtggtccctggccttggtccgcagcttccttggcacagcccttgagccacaagacaccacatcgggcacggccttgaggtagcgtggggagaggtctgggctctgcaggtagcagaggccgatgcgccactgctccccacgcactccgcagcggtcacagggggtccattcccagaaggtggtgaagacatggaggtgcccatagtattcatctgcaaagggctcctggcccttgtcctggaaagtggccaccattccctcactgttctggatgtccacatcgtaggcgtaaaagtagtcccccttgcgggtgccgcagaagtacaggcctgagtcctcagactgagccctgaaaaccaacaagctgaacatgcggatgctgaagcgggtcagcatgtcgctgcccacacgtacctgggctgcctccgtcagcacccgcc

SEQ ID NO: 8354 - DNA, 2617 bp, Homo sapiens
  source 1..2617: mol_type = unassigned DNA; mol_type = unassigned DNA
catgatggggaggggggtgcgatggggaagccgggcatgggagaggatggctcatgccctgaaagtccatgagaggcctcctctccccacatctgcagaaaccagcctggacaccaagtctgtgtcagaaggccacctcaagaggaacatcgtggtgaagaccgtggagatgcgggatggagaggtaaggagggatttgggcccagtcaggctctggctggccccagggattctcaaggccaggccatggaggaaagcctggggctggcacatagaaggttcccagcaactcccagtagctccccagggaattctggaggagagcaaggaaactgaatgtaattccgtttcctcagtccctccataggctgttctaaggggagccttggtaccaaagccactagatgggatcctaatacacactctctctttctcaccctcaaactcgggggccttgcttgccagggagagaaagagaattaaagttagtagctttcacttccaactctagcagacacagttggggatggggagggctttccatttccagcttggtaaaaggaaactaccaggggaatgggaagaggggatttggcgtatccgccacgccactccaaccacagtgggagctcatcttactccagcagcttaccactcgccaggcatgacgctaaatgctttcccagtgttatctcaccaccccctctgtccaccacgcaaggcagctgtggttactatcaagaaaagtaagacctgggaagtcggggacttcccaaggttacacagcctcgtggtggtggacctggggtctgtgtgaactcctaactgttgcactgtgcacgttccctgtcccctgcaggtcattaaggagtccaagcaggagcacaaggatgtgatgtgaggcaggacccacctggtggcctctgccccgtctcatgaggggcccgagcagaagcaggatagttgctccgcctctgctggcacatttccccagacctgagctccccaccaccccagctgctcccctccctcctctgtccctaggtcagcttgctgccctaggctccgtcagtatcaggcctgccagacggcacccacccagcacccagcaactccaactaacaagaaactcacccccaaggggcagtctggaggggcatggccagcagcttgcgttagaatgaggaggaaggagagaaggggaggagggcggggggcacctactacatcgccctccacatccctgattcctgttgttatggaaactgttgccagagatggaggttctctcggagtatctgggaactgtgcctttgagtttcctcaggctgctggaggaaaactgagactcagacaggaaagggaaggccccacagacaaggtagccctggccagaggcttgttttgtcttttggtttttatgaggtgggatatccctatgctgcctaggctgaccttgaactcctgggctcaagcagtctacccacctcagcctcctgtgtagctgggattatagattggagccaccatgcccagctcagagggttgttctcctagactgaccctgatcagtctaagatgggtggggacgtcctgccacctggggcagtcacctgcccagatcccagaaggacctcctgagcgatgactcaagtgtctcagtccacctgagctgccatccagggatgccatctgtgggcacgctgtgggcaggtgggagcttgattctcagcacttgggggatctgttgtgtacgtggagagggatgaggtgctgggagggatagaggggggctgcctggcccccagctgtgggtacagagaggtcaagcccaggaggactgccccgtgcagactggaggggacgctggtagagatggaggaggaggcaattgggatggcgctaggcatacaagtaggggttgtgggtgaccagttgcacttggcctctggattgtgggaattaaggaagtgactcatcctcttgaagatgctgaaacaggagagaaaggggatgtatccatgggggcagggcatgactttgtcccatttctaaaggcctcttccttgctgtgtcataccaggccgccccagcctctgagcccctgggactgctgcttcttaaccccagtaagccactgccacacgtctgaccctctccaccccatagtgaccggctgcttttccctaagccaagggcctcttgcggtcccttcttactcacacacaaaatgtacccagtattctaggtagtgccctattttacaattgtaaaactgaggcacgagcaaagtgaagacactggctcatattcctgcagcctggaggccgggtgctcagggctgacacgtccaccccagtgcacccactctgctttgactgagcagactggtgagcagactggtgggatctgtgcccagagatgggactgggagggcccacttcagggttctcctctcccctctaaggccgaagaagggtccttccctctccccaagacttggtgtcctttccctccactccttcctgccacctgctgctgctgctgctgctaatcttcagggcactgctgctgcctttagtcgctgaggaaaaataaagacaaatgctgcgccctt

SEQ ID NO: 8355 - DNA, 3135 bp, Homo sapiens
  source 1..3135: mol_type = unassigned DNA; mol_type = unassigned DNA
agagccagagcaggatggagaggagacgcatcacctccgctgctcgccgctcctacgtctcctcaggggagatgatggtggggggcctggctcctggccgccgtctgggtcctggcacccgcctctccctggctcgaatgccccctccactcccgacccgggtggatttctccctggctggggcactcaatgctggcttcaaggagacccgggccagtgagcgggcagagatgatggagctcaatgaccgctttgccagctacatcgagaaggttcgcttcctggaacagcaaaacaaggcgctggctgctgagctgaaccagctgcgggccaaggagcccaccaagctggcagacgtctaccaggctgagctgcgagagctgcggctgcggctcgatcaactcaccgccaacagcgcccggctggaggttgagagggacaatctggcacaggacctggccactgtgaggcagaagctccaggatgaaaccaacctgaggctggaagccgagaacaacctggctgcctatagacaggaagcagatgaagccaccctggcccgtctggatctggagaggaagattgagtcgctggaggaggagatccggttcttgaggaagatccacgaggaggaggttcgggaactccaggagcagctggcccgacagcaggtccatgtggagcttgacgtggccaagccagacctcaccgcagccctgaaagagatccgcacgcagtatgaggcaatggcgtccagcaacatgcatgaagccgaagagtggtaccgctccaagtttgcagacctgacagacgctgctgcccgcaacgcggagctgctccgccaggccaagcacgaagccaacgactaccggcgccagttgcagtccttgacctgcgacctggagtctctgcgcggcacgaacgagtccctggagaggcagatgcgcgagcaggaggagcggcacgtgcgggaggcggccagttatcaggaggcgctggcgcggctggaggaagaggggcagagcctcaaggacgagatggcccgccacttgcaggagtaccaggacctgctcaatgtcaagctggccctggacatcgagatcgccacctacaggaagctgctagagggcgaggagaaccggatcaccattcccgtgcagaccttctccaacctgcagattcgagggggcaaaagcaccaaagacggggaaaatcacaaggtcacaagatatctcaaaagcctcacaatacgagttataccaatacaggctcaccagattgtaaatggaacgccgccggctcgcgaaaccagcctggacaccaagtctgtgtcagaaggccacctcaagaggaacatcgtggtgaagaccgtggagatgcgggatggagaggtcattaaggagtccaagcaggagcacaaggatgtgatgtgaggcaggacccacctggtggcctctgccccgtctcatgaggggcccgagcagaagcaggatagttgctccgcctctgctggcacatttccccagacctgagctccccaccaccccagctgctcccctccctcctctgtccctaggtcagcttgctgccctaggctccgtcagtatcaggcctgccagacggcacccacccagcacccagcaactccaactaacaagaaactcacccccaaggggcagtctggaggggcatggccagcagcttgcgttagaatgaggaggaaggagagaaggggaggagggcggggggcacctactacatcgccctccacatccctgattcctgttgttatggaaactgttgccagagatggaggttctctcggagtatctgggaactgtgcctttgagtttcctcaggctgctggaggaaaactgagactcagacaggaaagggaaggccccacagacaaggtagccctggccagaggcttgttttgtcttttggtttttatgaggtgggatatccctatgctgcctaggctgaccttgaactcctgggctcaagcagtctacccacctcagcctcctgtgtagctgggattatagattggagccaccatgcccagctcagagggttgttctcctagactgaccctgatcagtctaagatgggtggggacgtcctgccacctggggcagtcacctgcccagatcccagaaggacctcctgagcgatgactcaagtgtctcagtccacctgagctgccatccagggatgccatctgtgggcacgctgtgggcaggtgggagcttgattctcagcacttgggggatctgttgtgtacgtggagagggatgaggtgctgggagggatagaggggggctgcctggcccccagctgtgggtacagagaggtcaagcccaggaggactgccccgtgcagactggaggggacgctggtagagatggaggaggaggcaattgggatggcgctaggcatacaagtaggggttgtgggtgaccagttgcacttggcctctggattgtgggaattaaggaagtgactcatcctcttgaagatgctgaaacaggagagaaaggggatgtatccatgggggcagggcatgactttgtcccatttctaaaggcctcttccttgctgtgtcataccaggccgccccagcctctgagcccctgggactgctgcttcttaaccccagtaagccactgccacacgtctgaccctctccaccccatagtgaccggctgcttttccctaagccaagggcctcttgcggtcccttcttactcacacacaaaatgtacccagtattctaggtagtgccctattttacaattgtaaaactgaggcacgagcaaagtgaagacactggctcatattcctgcagcctggaggccgggtgctcagggctgacacgtccaccccagtgcacccactctgctttgactgagcagactggtgagcagactggtgggatctgtgcccagagatgggactgggagggcccacttcagggttctcctctcccctctaaggccgaagaagggtccttccctctccccaagacttggtgtcctttccctccactccttcctgccacctgctgctgctgctgctgctaatcttcagggcactgctgctgcctttagtcgctgaggaaaaataaagaca

SEQ ID NO: 8356 - DNA, 2542 bp, Homo sapiens
  source 1..2542: mol_type = unassigned DNA; mol_type = unassigned DNA
aagctggccctggacatcgagatcgccacctacaggaagctgctagagggcgaggagaaccggatcaccattcccgtgcagaccttctccaacctgcagattcgagaaaccagcctggacaccaagtctgtgtcagaaggccacctcaagaggaacatcgtggtgaagaccgtggagatgcgggatggagaggtaaggagggatttgggcccagtcaggctctggctggccccagggattctcaaggccaggccatggaggaaagcctggggctggcacatagaaggttcccagcaactcccagtagctccccagggaattctggaggagagcaaggaaactgaatgtaattccgtttcctcagtccctccataggctgttctaaggggagccttggtaccaaagccactagatgggatcctaatacacactctctctttctcaccctcaaactcgggggccttgcttgccagggagagaaagagaattaaagttagtagctttcacttccaactctagcagacacagttggggatggggagggctttccatttccagcttggtaaaaggaaactaccaggggaatgggaagaggggatttggcgtatccgccacgccactccaaccacagtgggagctcatcttactccagcagcttaccactcgccaggcatgacgctaaatgctttcccagtgttatctcaccaccccctctgtccaccacgcaaggcagctgtggttactatcaagaaaagtaagacctgggaagtcggggacttcccaaggttacacagcctcgtggtggtggacctggggtctgtgtgaactcctaactgttgcactgtgcacgttccctgtcccctgcaggtcattaaggagtccaagcaggagcacaaggatgtgatgtgaggcaggacccacctggtggcctctgccccgtctcatgaggggcccgagcagaagcaggatagttgctccgcctctgctggcacatttccccagacctgagctccccaccaccccagctgctcccctccctcctctgtccctaggtcagcttgctgccctaggctccgtcagtatcaggcctgccagacggcacccacccagcacccagcaactccaactaacaagaaactcacccccaaggggcagtctggaggggcatggccagcagcttgcgttagaatgaggaggaaggagagaaggggaggagggcggggggcacctactacatcgccctccacatccctgattcctgttgttatggaaactgttgccagagatggaggttctctcggagtatctgggaactgtgcctttgagtttcctcaggctgctggaggaaaactgagactcagacaggaaagggaaggccccacagacaaggtagccctggccagaggcttgttttgtcttttggtttttatgaggtgggatatccctatgctgcctaggctgaccttgaactcctgggctcaagcagtctacccacctcagcctcctgtgtagctgggattatagattggagccaccatgcccagctcagagggttgttctcctagactgaccctgatcagtctaagatgggtggggacgtcctgccacctggggcagtcacctgcccagatcccagaaggacctcctgagcgatgactcaagtgtctcagtccacctgagctgccatccagggatgccatctgtgggcacgctgtgggcaggtgggagcttgattctcagcacttgggggatctgttgtgtacgtggagagggatgaggtgctgggagggatagaggggggctgcctggcccccagctgtgggtacagagaggtcaagcccaggaggactgccccgtgcagactggaggggacgctggtagagatggaggaggaggcaattgggatggcgctaggcatacaagtaggggttgtgggtgaccagttgcacttggcctctggattgtgggaattaaggaagtgactcatcctcttgaagatgctgaaacaggagagaaaggggatgtatccatgggggcagggcatgactttgtcccatttctaaaggcctcttccttgctgtgtcataccaggccgccccagcctctgagcccctgggactgctgcttcttaaccccagtaagccactgccacacgtctgaccctctccaccccatagtgaccggctgcttttccctaagccaagggcctcttgcggtcccttcttactcacacacaaaatgtacccagtattctaggtagtgccctattttacaattgtaaaactgaggcacgagcaaagtgaagacactggctcatattcctgcagcctggaggccgggtgctcagggctgacacgtccaccccagtgcacccactctgctttgactgagcagactggtgagcagactggtgggatctgtgcccagagatgggactgggagggcccacttcagggttctcctctcccctctaaggccgaagaagggtccttccctctccccaagacttggtgtcctttccctccactccttcctgccacct

SEQ ID NO: 8357 - DNA, 989 bp, Homo sapiens
  source 1..989: mol_type = unassigned DNA; mol_type = unassigned DNA
taccaggctgagctgcgagagctgcggctgcggctcgatcaactcaccgccaacagcgcccggctggaggttgagagggacaatctggcacaggacctggccactgtgaggcagaagctccaggatgaaaccaacctgaggctggaagccgagaacaacctggctgcctatagacaggaagcagatgaagccaccctggcccgtctggatctggagaggaagattgagtcgctggaggaggagatccggttcttgaggaagatccacgaggaggaggttcgggaactccaggagcagctggcccgacagcaggtccatgtggagcttgacgtggccaagccagacctcaccgcagccctgaaagagatccgcacgcagtatgaggcaatggcgtccagcaacatgcatgaagccgaagagtggtaccgctccaagtttgcagacctgacagacgctgctgcccgcaacgcggagctgctccgccaggccaagcacgaagccaacgactaccggcgccagttgcagtccttgacctgcgacctggagtctctgcgcggcacgaacgagtccctggagaggcagatgcgcgagcaggaggagcggcacgtgcgggaggcggccagttatcaggaggcgctggcgcggctggaggaagaggggcagagcctcaaggacgagatggcccgccacttgcaggagtaccaggacctgctcaatgtcaagctggccctggacatcgagatcgccacctacaggaagctgctagagggcgaggagaaccggatcaccattcccgtgcagaccttctccaacctgcagattcgagaaaccagcctggacaccaagtctgtgtcagaaggccacctcaagaggaacatcgtggtgaagaccgtggagatgcgggatggagaggccgccccagcctctgagcccctgggactgctgcttcttaaccccagtaagccactgccacacgtctgaccctctcc

SEQ ID NO: 8358 - DNA, 2668 bp, Homo sapiens
  source 1..2668: mol_type = unassigned DNA; mol_type = unassigned DNA
aggtcacaagatatctcaaaagcctcacaatacgagttataccaatacaggctcaccagattgtaaatggaacgccgccggctcgcggttagctgcctgcctctcagacacggcgctttgcccagcttgacagggagtgagcctcacccaccccatcctcccaatccccctgagttccctcttcccaggcttcccctaaagggcctggactgcgtcattttcccaggaactgcagtgcccagcccaggacgtggtacagagtaactgtacattaaactggcagagcttgttagtggtaaaggtggtgagtccttgggtgcgcagtggagctgctctggggcctctgagcaagcagcagcctctgtctcacctcttcctgtcactgggagggccccttgggtctcgctgtgcctggacgccaggctctctgctttattctttcatccctgaggctccatcgctcagctcagtgctgactcagttcagaggattcttccctcaggaccgcagctcttgcagtgaataaagttttatgttccctgctcttaatgttaaatattagtgaatgtgacgtgttatatttttctctctcgggcggggcggggggaggggggagctaaattactttttacttgcattggccctgaaatgattcttagctaaggaacaaaattcctcttcttctggactagaatatttaggaccactagatatgcatgtctcaggacttaattcagcatcagaaaggctaaccaggctgactagtagaggtaatactgccaaatcctagatagtcacaggtcactaaagcacagataaatggcagagagaagtaggaaagaggaaaggggacaggaaagggacctatgtgtattgagcactaatatgtgccacatgtttaacagcctttattttagttaattgtctcctctctcccacctagagaagtaggccccatcatccttattttacagatgaggaaactgaggctgggagaggtcaattaacttgcccagagtcatgtggctggttggtggctaagttgggacttcttgagctctggtctcctgatccttccttccttccttccttcttttcttccttccttccttctttccttccttccttcggcagagcgtccctctgtcactcaggctggaatgcagtagtgcaatcttggctcactgcaacctccacctcccaggttcaagcaattctcgtgcctcagactcccgagtaaggggattacaggtgcgagccaccacacctggctaatctttctttttctttctttctttctttcttccttccttccttccttccttcctttctctttcctgcttgcttgcttgcttgcttgcctgctttcgacggagtcttactctgttgctcaggctggagtgcagtggcacgatcgcagcttactgcaacctccgcctcccaggttcaagtgattctcctctctcagcctcctgagtagctgggactacaggcacctgtcaccatgcctgactaatttttgtatttttagtagagacagggtttcaccatattagtcaggctggtctcaaactcctgacctcaggcgatccacctgcctcggcctcccaaagtgctgggattacaggtgtgagccaccatgcctggcctattttttgtatttttagtagaggtttcactatgttggccaggctggtctcgaactcctggcgtcaggtgatccacctgcctcagcctcccaaaatgatggcattataggtgtgagccaccgcacccctcctggtctcctgatttcaataccgtgctgggttttcagaaagccaggtgccaggccagggcttgcagaggggctgaaatgaagccaggccagaagacagagcagccaggactctggcagcagcactattgggatttgggggctctccagcccgtttggaagagcctaggctctctctgctcggttgcataggttctcatactcatgatggggaggggggtgcgatggggaagccgggcatgggagaggatggctcatgccctgaaagtccatgagaggcctcctctccccacatctgcagaaaccagcctggacaccaagtctgtgtcagaaggccacctcaagaggaacatcgtggtgaagaccgtggagatgcgggatggagaggtcattaaggagtccaagcaggagcacaaggatgtgatgtgaggcaggacccacctggtggcctctgccccgtctcatgaggggcccgagcagaagcaggatagttgctccgcctctgctggcacatttccccagacctgagctccccaccaccccagctgctcccctccctcctctgtccctaggtcagcttgctgccctaggctccgtcagtatcaggcctgccagacggcacccacccagcacccagcaactccaactaacaagaaactcacccccaaggggcagtctggaggggcatggccagcagcttgcgttagaatgaggaggaaggagagaaggggaggagggcggggggcacctactacatcgccctccacatccctgattcctgttgttatggaaactgttgccagagatggaggttctctcggagtatctgggaactgtgcctttgagtttcctcaggctgctggaggaaaactgagactcagacaggaaagg

SEQ ID NO: 8359 - DNA, 579 bp, Homo sapiens
  source 1..579: mol_type = unassigned DNA; mol_type = unassigned DNA
actcagttcagaggattcttccctcaggaccgcagctcttgcaaaaccagcctggacaccaagtctgtgtcagaaggccacctcaagaggaacatcgtggtgaagaccgtggagatgcgggatggagaggtcattaaggagtccaagcaggagcacaaggatgtgatgtgaggcaggacccacctggtggcctctgccccgtctcatgaggggcccgagcagaagcaggatagttgctccgcctctgctggcacatttccccagacctgagctccccaccaccccagctgctcccctccctcctctgtccctaggtcagcttgctgccctaggctccgtcagtatcaggcctgccagacggcacccacccagcacccagcaactccaactaacaagaaactcacccccaaggggcagtctggaggggcatggccagcagcttgcgttagaatgaggaggaaggagagaaggggaggagggcggggggcacctactacatcgccctccacatccctgattcctgttgttatggaaactgttgccagagatggaggttctctcggagtatctgggaactgt

SEQ ID NO: 8360 - DNA, 594 bp, Homo sapiens
  source 1..594: mol_type = unassigned DNA; mol_type = unassigned DNA
ctcgaaacctccccaagtcgggtcggggctccgcgggaccggccggctccatcccacagaacgagtccctggagaggcagatgcgcgagcaggaggagcggcacgtgcgggaggcggccagttatcaggaggcgctggcgcggctggaggaagaggggcagagcctcaaggacgagatggcccgccacttgcaggagtaccaggacctgctcaatgtcaagctggccctggacatcgagatcgccacctacaggaagctgctagagggcgaggagaaccggatcaccattcccgtgcagaccttctccaacctgcagattcgagaaaccagcctggacaccaagtctgtgtcagaaggccacctcaagaggaacatcgtggtgaagaccgtggagatgcgggatggagaggtcattaaggagtccaagcaggagcacaaggatgtgatgtgaggcaggacccacctggtggcctctgccccgtctcatgaggggcccgagcagaagcaggatagttgctccgcctctgctggcacatttccccagacctgagctccccaccaccccagctgctcccctccctcctctgtcccta

SEQ ID NO: 8361 - DNA, 1103 bp, Homo sapiens
  source 1..1103: mol_type = unassigned DNA; mol_type = unassigned DNA
ggccctggacatcgagatcgccacctacaggaagctgctagagggcgaggagaaccggatcaccattcccgtgcagaccttctccaacctgcagattcgagggggcaaaagcaccaaagacggggaaaatcacaaggtcacaagatatctcaaaagcctcacaatacgagttataccaatacaggctcaccagattgtaaatggaacgccgccggctcgcggttagctgcctgcctctcagacacggcgctttgcccagcttgacagggaaaaccagcctggacaccaagtctgtgtcagaaggccacctcaagaggaacatcgtggtgaagaccgtggagatgcgggatggagaggtaaggagggatttgggcccagtcaggctctggctggccccagggattctcaaggccaggccatggaggaaagcctggggctggcacatagaaggttcccagcaactcccagtagctccccagggaattctggaggagagcaaggaaactgaatgtaattccgtttcctcagtccctccataggctgttctaaggggagccttggtaccaaagccactagatgggatcctaatacacactctctctttctcaccctcaaactcgggggccttgcttgccagggagagaaagagaattaaagttagtagctttcacttccaactctagcagacacagttggggatggggagggctttccatttccagcttggtaaaaggaaactaccaggggaatgggaagaggggatttggcgtatccgccacgccactccaaccacagtgggagctcatcttactccagcagcttaccactcgccaggcatgacgctaaatgctttcccagtgttatctcaccaccccctctgtccaccacgcaaggcagctgtggttactatcaagaaaagtaagacctgggaagtcggggacttcccaaggttacacagcctcgtggtggtggacctggggtctgtgtgaactcctaactgttgcactgtgcacgttccctgtcccctgcaggtcattaaggagtccaagcaggagcacaaggatgtgatgtgaggcaggacccacctggtggcctctgccccg

SEQ ID NO: 8362 - DNA, 566 bp, Homo sapiens
  source 1..566: mol_type = unassigned DNA; mol_type = unassigned DNA
aaagtcacacagctcctaagtggtagagttggatttccaactctagcacatctcacttgggagcctgcattccatgcctctgccagtctgttttgggttactgagcctctaccatatgccaggcaccccccaggacacagagaggtgtctgacctggaagtttgcagacctgacagacgctgctgcccgcaacgcggagctgctccgccaggccaagcacgaagccaacgactaccggcgccagttgcagtccttgacctgcgacctggagtctctgcgcggcacgaacgagtccctggagaggcagatgcgcgagcaggaggagcggcacgtgcgggaggcggccagttatcaggaggcgctggcgcggctggaggaagaggggcagagcctcaaggacgagatggcccgccacttgcaggagtaccaggacctgctcaatgtcaagctggccctggacatcgagatcgccacctacaggaagctgctagagggcgaggagaaccggatcaccattcccgtgcagaccttctccaacctgcagattcgagaaaccagcctggaca

SEQ ID NO: 8363 - DNA, 3573 bp, Homo sapiens
  source 1..3573: mol_type = unassigned DNA; mol_type = unassigned DNA
agagccagagcaggatggagaggagacgcatcacctccgctgctcgccgctcctacgtctcctcaggggagatgatggtggggggcctggctcctggccgccgtctgggtcctggcacccgcctctccctggctcgaatgccccctccactcccgacccgggtggatttctccctggctggggcactcaatgctggcttcaaggagacccgggccagtgagcgggcagagatgatggagctcaatgaccgctttgccagctacatcgagaaggttcgcttcctggaacagcaaaacaaggcgctggctgctgagctgaaccagctgcgggccaaggagcccaccaagctggcagacgtctaccaggctgagctgcgagagctgcggctgcggctcgatcaactcaccgccaacagcgcccggctggaggttgagagggacaatctggcacaggacctggccactgtgaggcagaagctccaggatgaaaccaacctgaggctggaagccgagaacaacctggctgcctatagacaggaagcagatgaagccaccctggcccgtctggatctggagaggaagattgagtcgctggaggaggagatccggttcttgaggaagatccacgaggaggaggttcgggaactccaggagcagctggcccgacagcaggtccatgtggagcttgacgtggccaagccagacctcaccgcagccctgaaagagatccgcacgcagtatgaggcaatggcgtccagcaacatgcatgaagccgaagagtggtaccgctccaagtttgcagacctgacagacgctgctgcccgcaacgcggagctgctccgccaggccaagcacgaagccaacgactaccggcgccagttgcagtccttgacctgcgacctggagtctctgcgcggcacgaacgagtccctggagaggcagatgcgcgagcaggaggagcggcacgtgcgggaggcggccagttatcaggaggcgctggcgcggctggaggaagaggggcagagcctcaaggacgagatggcccgccacttgcaggagtaccaggacctgctcaatgtcaagctggccctggacatcgagatcgccacctacaggaagctgctagagggcgaggagaaccggatcaccattcccgtgcagaccttctccaacctgcagattcgaggtcagtacagcagggcctcgtgggaagggcactggagtcctgccccctcctccagggcctgtaggttgctccagactgggactgaggatcagggcaaagggatccagctctccctgggggccttcgtgacactgcagcgctcctagccagagcctatcataccagggtacttctaggtggggcttgcagctgcccctgtcctgctaggccctggtccctcttcccctccctgcaccccattcgacagcagaactgggtgagagcttgacatctgccctgtctgcagatccctgagcaagcactgcccttctgagtgttttctgtttttgtttttttaactgcttgtcactacagggggcaaaagcaccaaagacggggaaaatcacaaggtcacaagatatctcaaaagcctcacaatacgagttataccaatacaggctcaccagattgtaaatggaacgccgccggctcgcggttagctgcctgcctctcagacacggcgctttgcccagcttgacagggagtgagcctcacccaccccatcctcccaatccccctgagttccctcttcccaggcttcccctaaagggcctggactgcgtcattttcccaggaactgcagtgcccagcccaggacgtggtacagagtaactgtacattaaactggcagagcttgttagtggtaaaggtggtgagtccttgggtgcgcagtggagctgctctggggcctctgagcaagcagcagcctctgtctcacctcttcctgtcactgggagggccccttgggtctcgctgtgcctggacgccaggctctctgctttattctttcatccctgaggctccatcgctcagctcagtgctgactcagttcagaggattcttccctcaggaccgcagctcttgcagtgaataaagttttatgttccctgctcttaatgttaaatattagtgaatgtgacgtgttatatttttctctctcgggcggggcggggggaggggggagctaaattactttttacttgcattggccctgaaatgattcttagctaaggaacaaaattcctcttcttctggactagaatatttaggaccactagatatgcatgtctcaggacttaattcagcatcagaaaggctaaccaggctgactagtagaggtaatactgccaaatcctagatagtcacaggtcactaaagcacagataaatggcagagagaagtaggaaagaggaaaggggacaggaaagggacctatgtgtattgagcactaatatgtgccacatgtttaacagcctttattttagttaattgtctcctctctcccacctagagaagtaggccccatcatccttattttacagatgaggaaactgaggctgggagaggtcaattaacttgcccagagtcatgtggctggttggtggctaagttgggacttcttgagctctggtctcctgatccttccttccttccttccttcttttcttccttccttccttctttccttccttccttcggcagagcgtccctctgtcactcaggctggaatgcagtagtgcaatcttggctcactgcaacctccacctcccaggttcaagcaattctcgtgcctcagactcccgagtaaggggattacaggtgcgagccaccacacctggctaatctttctttttctttctttctttctttcttccttccttccttccttccttcctttctctttcctgcttgcttgcttgcttgcttgcctgctttcgacggagtcttactctgttgctcaggctggagtgcagtggcacgatcgcagcttactgcaacctccgcctcccaggttcaagtgattctcctctctcagcctcctgagtagctgggactacaggcacctgtcaccatgcctgactaatttttgtatttttagtagagacagggtttcaccatattagtcaggctggtctcaaactcctgacctcaggcgatccacctgcctcggcctcccaaagtgctgggattacaggtgtgagccaccatgcctggcctattttttgtatttttagtagaggtttcactatgttggccaggctggtctcgaactcctggcgtcaggtgatccacctgcctcagcctcccaaaatgatggcattataggtgtgagccaccgcacccctcctggtctcctgatttcaataccgtgctgggttttcagaaagccaggtgccaggccagggcttgcagaggggctgaaatgaagccaggccagaagacagagcagccaggactctggcagcagcactattgggatttgggggctctccagcccgtttggaagagcctaggctctctctgctcggttgcataggttctcatactcatgatggggaggggggtgcg

SEQ ID NO: 8364 - DNA, 1779 bp, Homo sapiens
  source 1..1779: mol_type = unassigned DNA; mol_type = unassigned DNA
agagccagagcaggatggagaggagacgcatcacctccgctgctcgccgctcctacgtctcctcaggggagatgatggtggggggcctggctcctggccgccgtctgggtcctggcacccgcctctccctggctcgaatgccccctccactcccgacccgggtggatttctccctggctggggcactcaatgctggcttcaaggagacccgggccagtgagcgggcagagatgatggagctcaatgaccgctttgccagctacatcgagaaggttcgcttcctggaacagcaaaacaaggcgctggctgctgagctgaaccagctgcgggccaaggagcccaccaagctggcagacgtctaccaggctgagctgcgagagctgcggctgcggctcgatcaactcaccgccaacagcgcccggctggaggttgagagggacaatctggcacaggacctggccactgtgaggcagaagctccaggatgaaaccaacctgaggctggaagccgagaacaacctggctgcctatagacaggaagcagatgaagccaccctggcccgtctggatctggagaggaagattgagtcgctggaggaggagatccggttcttgaggaagatccacgaggaggaggttcgggaactccaggagcagctggcccgacagcaggtccatgtggagcttgacgtggccaagccagacctcaccgcagccctgaaagagatccgcacgcagtatgaggcaatggcgtccagcaacatgcatgaagccgaagagtggtaccgctccaagtttgcagacctgacagacgctgctgcccgcaacgcggagctgctccgccaggccaagcacgaagccaacgactaccggcgccagttgcagtccttgacctgcgacctggagtctctgcgcggcacgaacgagtccctggagaggcagatgcgcgagcaggaggagcggcacgtgcgggaggcggccagttatcaggaggcgctggcgcggctggaggaagaggggcagagcctcaaggacgagatggcccgccacttgcaggagtaccaggacctgctcaatgtcaagctggccctggacatcgagatcgccacctacaggaagctgctagagggcgaggagaaccggatcaccattcccgtgcagaccttctccaacctgcagattcgagggggcaaaagcaccaaagacggggaaaatcacaaggtcacaagatatctcaaaagcctcacaatacgagttataccaatacaggctcaccagattgtaaatggaacgccgccggctcgcggttagctgcctgcctctcagacacggcgctttgcccagcttgacagggagtgagcctcacccaccccatcctcccaatccccctgagttccctcttcccaggcttcccctaaagggcctggactgcgtcattttcccaggaactgcagtgcccagcccaggacgtggtacagagtaactgtacattaaactggcagagcttgttagtggtaaaggtggtgagtccttgggtgcgcagtggagctgctctggggcctctgagcaagcagcagcctctgtctcacctcttcctgtcactgggagggccccttgggtctcgctgtgcctggacgccaggctctctgctttattctttcatccctgaggctccatcgctcagctcagtgctgactcagttcagaggattcttccctcaggaccgcagctcttgcagtgaataaagttttatgttccctgctcttaatgttaaatatta

SEQ ID NO: 8365 - DNA, 3255 bp, Homo sapiens
  source 1..3255: mol_type = unassigned DNA; mol_type = unassigned DNA
gagccagagcaggatggagaggagacgcatcacctccgctgctcgccgctcctacgtctcctcaggggagatgatggtggggggcctggctcctggccgccgtctgggtcctggcacccgcctctccctggctcgaatgccccctccactcccgacccgggtggatttctccctggctggggcactcaatgctggcttcaaggagacccgggccagtgagcgggcagagatgatggagctcaatgaccgctttgccagctacatcgagaaggttcgcttcctggaacagcaaaacaaggcgctggctgctgagctgaaccagctgcgggccaaggagcccaccaagctggcagacgtctaccaggctgagctgcgagagctgcggctgcggctcgatcaactcaccgccaacagcgcccggctggaggttgagagggacaatctggcacaggacctggccactgtgaggcagaagtgaggaggggatggggaaggggggccttgtgagcagaaggggctgaatccccaagaaggagtgcccgagaagtctcagggaggggccgaacctccctgctccctgggcctccctacctcttgatggggcactatccttgccccccaacatgatgggagggaccagaaacaggcccagggccccggggatctgatgcccgcatgccttctgccaggagtccagggtcccctcagcacctccctactggggaaagcagtgcaggagcagcggggcccctgtgtttcattcatggctgggctttgtgactgtgggcagcgagctcacctattctgagcctgtgtccatataaaggaggagttggaagcggagaaggttgatgtccatgagggagattggattctggggtgaagaaagtgagggaaagagcaggcaggtctgggcgcaaagcacaggtgactgcctgccaccagcttgtgacccccatcaagttactttgacttgcacagctgtgaagcggtggtcataataaaattcatttcaaaaggtggttacctgggatcagaggaatccccaggggcatggcgcttcactgagctgacaggacatgcatgtgtgccttcaagtgcaggaggacatgtgcgtgtgtgtgtgtgtgtgtgcaacagtgagtgtatgcttgtggatgcgcctgtgtgagcagaagcaggtgcaccaaccctgataaggcaccttagtaatgagttaaggcaaaagcccacatctgctcatcctccagacaagtcctctgtctaaggccccccaacccttaatcctcctgctgctctactggtcctgggtgggggtggtctctgtgacagctgcctcaagggagactgaggcaggtattcaagtgtcctcagaagagcctggacccaggaatgtgtccccccactccaggctccaggatgaaaccaacctgaggctggaagccgagaacaacctggctgcctatagacaggtcagggaggtggaggggaggggcaggggagggaggaaaggattgatggccacccacccaaacacagcccccaagctcagcccgccagagcaatgtgctgctccccactgccccagaaggaggggtaaggcaaggctgaggaatggggagaaggagcctggggccccagtggccctctactcctcacccctcctgccactccaggaagcagatgaagccaccctggcccgtctggatctggagaggaagattgagtcgctggaggaggagatccggttcttgaggaagatccacgaggaggaggttcgggaactccaggagcagctggcccgacagcaggtccatgtggagcttgacgtggccaagccagacctcaccgcagccctgaaagagatccgcacgcagtatgaggcaatggcgtccagcaacatgcatgaagccgaagagtggtaccgctccaagtttgcagacctgacagacgctgctgcccgcaacgcggagctgctccgccaggccaagcacgaagccaacgactaccggcgccagttgcagtccttgacctgcgacctggagtctctgcgcggcacgaacgagtccctggagaggcagatgcgcgagcaggaggagcggcacgtgcgggaggcggccagttatcaggaggcgctggcgcggctggaggaagaggggcagagcctcaaggacgagatggcccgccacttgcaggagtaccaggacctgctcaatgtcaagctggccctggacatcgagatcgccacctacaggaagctgctagagggcgaggagaaccggatcaccattcccgtgcagaccttctccaacctgcagattcgaggtcagtacagcagggcctcgtgggaagggcactggagtcctgccccctcctccagggcctgtaggttgctccagactgggactgaggatcagggcaaagggatccagctctccctgggggccttcgtgacactgcagcgctcctagccagagcctatcataccagggtacttctaggtggggcttgcagctgcccctgtcctgctaggccctggtccctcttcccctccctgcaccccattcgacagcagaactgggtgagagcttgacatctgccctgtctgcagatccctgagcaagcactgcccttctgagtgttttctgtttttgtttttttaactgcttgtcactacagggggcaaaagcaccaaagacggggaaaatcacaaggtcacaagatatctcaaaagcctcacaatacgagttataccaatacaggctcaccagattgtaaatggaacgccgccggctcgcggttagctgcctgcctctcagacacggcgctttgcccagcttgacagggagtgagcctcacccaccccatcctcccaatccccctgagttccctcttcccaggcttcccctaaagggcctggactgcgtcattttcccaggaactgcagtgcccagcccaggacgtggtacagagtaactgtacattaaactggcagagcttgttagtggtaaaggtggtgagtccttgggtgcgcagtggagctgctctggggcctctgagcaagcagcagcctctgtctcacctcttcctgtcactgggagggccccttgggtctcgctgtgcctggacgccaggctctctgctttattctttcatccctgaggctccatcgctcagctcagtgctgactcagttcagaggattcttccctcaggaccgcagctcttgcagtgaataaagttttatgttccctgc

SEQ ID NO: 8366 - DNA, 2099 bp, Homo sapiens
  source 1..2099: mol_type = unassigned DNA; mol_type = unassigned DNA
atggagaggagacgcatcacctccgctgctcgccgctcctacgtctcctcaggggagatgatggtggggggcctggctcctggccgccgtctgggtcctggcacccgcctctccctggctcgaatgccccctccactcccgacccgggtggatttctccctggctggggcactcaatgctggcttcaaggagacccgggccagtgagcgggcagagatgatggagctcaatgaccgctttgccagctacatcgagaaggttcgcttcctggaacagcaaaacaaggcgctggctgctgagctgaaccagctgcgggccaaggagcccaccaagctggcagacgtctaccaggctgagctgcgagagctgcggctgcggctcgatcaactcaccgccaacagcgcccggctggaggttgagagggacaatctggcacaggacctggccactgtgaggcagaagctccaggatgaaaccaacctgaggctggaagccgagaacaacctggctgcctatagacaggaagcagatgaagccaccctggcccgtctggatctggagaggaagattgagtcgctggaggaggagatccggttcttgaggaagatccacgaggaggaggttcgggaactccaggagcagctggcccgacagcaggtccatgtggagcttgacgtggccaagccagacctcaccgcagccctgaaagagatccgcacgcagtatgaggcaatggcgtccagcaacatgcatgaagccgaagagtggtaccgctccaagtttgcagacctgacagacgctgctgcccgcaacgcggagctgctccgccaggccaagcacgaagccaacgactaccggcgccagttgcagtccttgacctgcgacctggagtctctgcgcggcacgaacgagtccctggagaggcagatgcgcgagcaggaggagcggcacgtgcgggaggcggccagttatcaggaggcgctggcgcggctggaggaagaggggcagagcctcaaggacgagatggcccgccacttgcaggagtaccaggacctgctcaatgtcaagctggccctggacatcgagatcgccacctacaggaagctgctagagggcgaggagaaccggatcaccattcccgtgcagaccttctccaacctgcagattcgaggtcagtacagcagggcctcgtgggaagggcactggagtcctgccccctcctccagggcctgtaggttgctccagactgggactgaggatcagggcaaagggatccagctctccctgggggccttcgtgacactgcagcgctcctagccagagcctatcataccagggtacttctaggtggggcttgcagctgcccctgtcctgctaggccctggtccctcttcccctccctgcaccccattcgacagcagaactgggtgagagcttgacatctgccctgtctgcagatccctgagcaagcactgcccttctgagtgttttctgtttttgtttttttaactgcttgtcactacagggggcaaaagcaccaaagacggggaaaatcacaaggtcacaagatatctcaaaagcctcacaatacgagttataccaatacaggctcaccagattgtaaatggaacgccgccggctcgcggttagctgcctgcctctcagacacggcgctttgcccagcttgacagggagtgagcctcacccaccccatcctcccaatccccctgagttccctcttcccaggcttcccctaaagggcctggactgcgtcattttcccaggaactgcagtgcccagcccaggacgtggtacagagtaactgtacattaaactggcagagcttgttagtggtaaaggtggtgagtccttgggtgcgcagtggagctgctctggggcctctgagcaagcagcagcctctgtctcacctcttcctgtcactgggagggccccttgggtctcgctgtgcctggacgccaggctctctgctttattctttcatccctgaggctccatcgctcagctcagtgctgactcagttcagaggattcttccctcaggaccgcagctcttgcagtgaataaagttttatgttccct

SEQ ID NO: 8367 - DNA, 1226 bp, Homo sapiens
  source 1..1226: mol_type = unassigned DNA; mol_type = unassigned DNA
gtaccaggacctgctcaatgtcaagctggccctggacatcgagatcgccacctacaggaagctgctagagggcgaggagaaccgatagacatgcgcccctcccagataacactcaagccccttgcagacgtttggaactccagatagcacgttggctgctggggaaaaagctaggagatggagttagactttcctggcaaggaaaagggcgttcaagttgtcatgatggccccgcaccaagacccagcctaggggtgtcccaggcagcccgggcagccctctccctctgctttctttcaggatcaccattcccgtgcagaccttctccaacctgcagattcgaggtcagtacagcagggcctcgtgggaagggcactggagtcctgccccctcctccagggcctgtaggttgctccagactgggactgaggatcagggcaaagggatccagctctccctgggggccttcgtgacactgcagcgctcctagccagagcctatcataccagggtacttctaggtggggcttgcagctgcccctgtcctgctaggccctggtccctcttcccctccctgcaccccattcgacagcagaactgggtgagagcttgacatctgccctgtctgcagatccctgagcaagcactgcccttctgagtgttttctgtttttgtttttttaactgcttgtcactacagggggcaaaagcaccaaagacggggaaaatcacaaggtcacaagatatctcaaaagcctcacaatacgagttataccaatacaggctcaccagattgtaaatggaacgccgccggctcgcggttagctgcctgcctctcagacacggcgctttgcccagcttgacagggagtgagcctcacccaccccatcctcccaatccccctgagttccctcttcccaggcttcccctaaagggcctggactgcgtcattttcccaggaactgcagtgcccagcccaggacgtggtacagagtaactgtacattaaactggcagagcttgttagtggtaaaggtggtgagtccttgggtgcgcagtggagctgctctggggcctctgagcaagcagcagcctctgtctcacctcttcctgtcactgggagggccccttgggtctcgctgtgcctggacgccaggctctctgctttattctttcatccctgaggctccatcgctcagctcagtgctgactcagttcagaggattctt

SEQ ID NO: 8368 - DNA, 763 bp, Homo sapiens
  source 1..763: mol_type = unassigned DNA; mol_type = unassigned DNA
gagcagagccagagcaggatggagaggagacgcatcacctccgctgctcgccgctcctacgtctcctcaggggagatgatggtggggggcctggctcctggccgccgtctgggtcctggcacccgcctctccctggctcgaatgccccctccactcccgacccgggtggatttctccctggctggggcactcaatgctggcttcaaggagacccgggccagtgagcgggcagagatgatggagctcaatgaccgctttgccagctacatcgagaaggttcgcttcctggaacagcaaaacaaggcgctggctgctgagctgaaccagctgcgggccaaggagcccaccaagctggcagacgtctaccaggctgagctgcgagagctgcggctgcggctcgatcaactcaccgccaacagcgcccggctggaggttgagagggacaatctggcacaggacctggccactgtgaggcagaagctccaggatgaaaccaacctgaggctggaagccgagaacaacctggctgcctatagacaggaagcagatgaagccaccctggcccgtctggatctggagaggaagattgagtcgctggaggaggagatccggttcttgaggaagatccacgaggaggagtaccaggacctgctcaatgtcaagctggccctggacatcgagatcgccacctacaggaagctgctagagggcgaggagaaccggatcaccattcccgtgcagaccttctccaacctgcagattc

SEQ ID NO: 8369 - DNA, 1678 bp, Homo sapiens
  source 1..1678: mol_type = unassigned DNA; mol_type = unassigned DNA
ctggaggttgagagggacaatctggcacaggacctggccactgtgaggcagaagtgaggaggggatggggaaggggggccttgtgagcagaaggggctgaatccccaagaaggagtgcccgagaagtctcagggaggggccgaacctccctgctccctgggcctccctacctcttgatggggcactatccttgccccccaacatgatgggagggaccagaaacaggcccagggccccggggatctgatgcccgcatgccttctgccaggagtccagggtcccctcagcacctccctactggggaaagcagtgcaggagcagcggggcccctgtgtttcattcatggctgggctttgtgactgtgggcagcgagctcacctattctgagcctgtgtccatataaaggaggagttggaagcggagaaggttgatgtccatgagggagattggattctggggtgaagaaagtgagggaaagagcaggcaggtctgggcgcaaagcacaggtgactgcctgccaccagcttgtgacccccatcaagttactttgacttgcacagctgtgaagcggtggtcataataaaattcatttcaaaaggtggttacctgggatcagaggaatccccaggggcatggcgcttcactgagctgacaggacatgcatgtgtgccttcaagtgcaggaggacatgtgcgtgtgtgtgtgtgtgtgtgcaacagtgagtgtatgcttgtggatgcgcctgtgtgagcagaagcaggtgcaccaaccctgataaggcaccttagtaatgagttaaggcaaaagcccacatctgctcatcctccagacaagtcctctgtctaaggccccccaacccttaatcctcctgctgctctactggtcctgggtgggggtggtctctgtgacagctgcctcaagggagactgaggcaggtattcaagtgtcctcagaagagcctggacccaggaatgtgtccccccactccaggctccaggatgaaaccaacctgaggctggaagccgagaacaacctggctgcctatagacaggaagcagatgaagccaccctggcccgtctggatctggagaggaagattgagtcgctggaggaggagatccggttcttgaggaagatccacgaggaggaggttcgggaactccaggagcagctggcccgacagcaggtccatgtggagcttgacgtggccaagccagacctcaccgcagccctgaaagagatccgcacgcagtatgaggcaatggcgtccagcaacatgcatgaagccgaagagtggtaccgctccaagtttgcagacctgacagacgctgctgcccgcaacgcggagctgctccgccaggccaagcacgaagccaacgactaccggcgccagttgcagtccttgacctgcgacctggagtctctgcgcggcacgaacgagtccctggagaggcagatgcgcgagcaggaggagcggcacgtgcgggaggcggccagttatcaggaggcgctggcgcggctggaggaagaggggcagagcctcaaggacgagatggcccgccacttgcaggagtaccaggacctgctcaatgtcaagctggccctggacatcgagatcgccacctacaggaagctgctagagggcgaggagaaccggatcaccattcccgtgcagacc

SEQ ID NO: 8370 - DNA, 1018 bp, Homo sapiens
  source 1..1018: mol_type = unassigned DNA; mol_type = unassigned DNA
agagccagagcaggatggagaggagacgcatcacctccgctgctcgccgctcctacgtctcctcaggggagatgatggtggggggcctggctcctggccgccgtctgggtcctggcacccgcctctccctggctcgaatgccccctccactcccgacccgggtggatttctccctggctggggcactcaatgctggcttcaaggagacccgggccagtgagcgggcagagatgatggagctcaatgaccgctttgccagctacatcgagaaggttcgcttcctggaacagcaaaacaaggcgctggctgctgagctgaaccagctgcgggccaaggagcccaccaagctggcagacgtctaccaggctgagctgcgagagctgcggctgcggctcgatcaactcaccgccaacagcgcccggctggaggttgagagggacaatctggcacaggacctggccactgtgaggcagaagctccaggatgaaaccaacctgaggctggaagccgagaacaacctggctgcctatagacaggaagcagatgaagccaccctggcccgtctggatctggagaggaagattgagtcgctggaggaggagatccggttcttgaggaagatccacgaggaggaggttcgggaactccaggagcagctggcccgacagcaggtccatgtggagcttgacgtggccaagccagacctcaccgcagccctgaaagagatccgcacgcagtatgaggcaatggcgtccagcaacatgcatgaagccgaagagtggtaccgctccaagtttgcagacctgacagacgctgctgcccgcaacgcggagctgctccgccaggccaagcacgaagccaacgactaccggcgccagttgcagtccttgacctgcgacctggagtctctgcgcggcacggagtaccaggacctgctcaatgtcaagctggccctggacatcgagatcgccacctacaggaagctgctagagggcgaggagaaccggatcaccattcc

SEQ ID NO: 8371 - DNA, 609 bp, Homo sapiens
  source 1..609: mol_type = unassigned DNA; mol_type = unassigned DNA
cacagagattgcaactgagagagggagagacagagacagagaagctgagactgagagagacactcagagagaggagagaaacagagattggcaggaggttcgggaactccaggagcagctggcccgacagcaggtccatgtggagcttgacgtggccaagccagacctcaccgcagccctgaaagagatccgcacgcagtatgaggcaatggcgtccagcaacatgcatgaagccgaagagtggtaccgctccaagtttgcagacctgacagacgctgctgcccgcaacgcggagctgctccgccaggccaagcacgaagccaacgactaccggcgccagttgcagtccttgacctgcgacctggagtctctgcgcggcacgaacgagtccctggagaggcagatgcgcgagcaggaggagcggcacgtgcgggaggcggccagttatcaggaggcgctggcgcggctggaggaagaggggcagagcctcaaggacgagatggcccgccacttgcaggagtaccaggacctgctcaatgtcaagctggccctggacatcgagatcgccacctacaggaagctgctagagggcgaggagaaccggatcac

SEQ ID NO: 8372 - DNA, 1013 bp, Homo sapiens
  source 1..1013: mol_type = unassigned DNA; mol_type = unassigned DNA
agagccagagcaggatggagaggagacgcatcacctccgctgctcgccgctcctacgtctcctcaggggagatgatggtggggggcctggctcctggccgccgtctgggtcctggcacccgcctctccctggctcgaatgccccctccactcccgacccgggtggatttctccctggctggggcactcaatgctggcttcaaggagacccgggccagtgagcgggcagagatgatggagctcaatgaccgctttgccagctacatcgagaaggttcgcttcctggaacagcaaaacaaggcgctggctgctgagctgaaccagctgcgggccaaggagcccaccaagctggcagacgtctaccaggctgagctgcgagagctgcggctgcggctcgatcaactcaccgccaacagcgcccggctggaggttgagagggacaatctggcacaggacctggccactgtgaggcagaagaagcagatgaagccaccctggcccgtctggatctggagaggaagattgagtcgctggaggaggagatccggttcttgaggaagatccacgaggaggaggttcgggaactccaggagcagctggcccgacagcaggtccatgtggagcttgacgtggccaagccagacctcaccgcagccctgaaagagatccgcacgcagtatgaggcaatggcgtccagcaacatgcatgaagccgaagagtggtaccgctccaagtttgcagacctgacagacgctgctgcccgcaacgcggagctgctccgccaggccaagcacgaagccaacgactaccggcgccagttgcagtccttgacctgcgacctggagtctctgcgcggcacgaacgagtccctggagaggcagatgcgcgagcaggaggagcggcacgtgcgggaggcggccagttatcaggaggcgctggcgcggctggaggaagaggggcagagcctcaaggacgagatggcccgccacttgcaggagtaccaggacctgctca

SEQ ID NO: 8373 - DNA, 585 bp, Homo sapiens
  source 1..585: mol_type = unassigned DNA; mol_type = unassigned DNA
attgacgtgcacccaaacatagtgcccgtagagaacaccacagctcagagcttatatgtagtgtgggagccaggaaagacactgtagagggggcatttgggctaggcaggacaggcacgctgtggacaggaagagaagaagggagggccattcctagtggaggacagagcctggaggcagaaaagcacagagaggcagggccccaagatgctagcctagccagggcacctagctgaggagtgtgagtggcagaagccactggtgtctgagcagggtgagggcccgatggggctgggaggacctccctgcaggcaggggagaaagggctattagaacccagggtgaggccaggcgaggtggctcacacctgtaatcccagcactttgggaggccgaggcatgcggatcacctgagtttgcagacctgacagacgctgctgcccgcaacgcggagctgctccgccaggccaagcacgaagccaacgactaccggcgccagttgcagtccttgacctgcgacctggagtctctgcgcggcacgaacgagtccctggagaggcagatgcgcgagcaggaggagcggcac

SEQ ID NO: 8374 - DNA, 556 bp, Homo sapiens
  source 1..556: mol_type = unassigned DNA; mol_type = unassigned DNA
aacacagagattgcaactgagagagggagagacagagacagagaagctgagactgagagagacactcagagagaggagagaaacagagattggcaggtagagacaggaaatgaaagacaaacagaaagacactaagggagacggaaagagacaagagagcattcgaactcctggccgaggggcaggcagaagaggacacaatggcgtggggaaccccagctgtggcctgtaccctgagccctggtaccgcttctctcaccctggtcaggaggttcgggaactccaggagcagctggcccgacagcaggtccatgtggagcttgacgtggccaagccagacctcaccgcagccctgaaagagatccgcacgcagtatgaggcaatggcgtccagcaacatgcatgaagccgaagagtggtaccgctccaagtttgcagacctgacagacgctgctgcccgcaacgcggagctgctccgccaggccaagcacgaagccaacgactaccggcgccagttgcagtccttgacctgcgacctggagtctctgcgcggcacg

SEQ ID NO: 8375 - DNA, 578 bp, Homo sapiens
  source 1..578: mol_type = unassigned DNA; mol_type = unassigned DNA
aaacacagctcactgcagcctcaacctactgggctcaagcaatcctccagcctcagcctcccaaagtgctgggattacaagcatgagccaccccactcagccctttccttcctttttaattgatgcataataattgctccaggatgaaaccaacctgaggctggaagccgagaacaacctggctgcctatagacaggaagcagatgaagccaccctggcccgtctggatctggagaggaagattgagtcgctggaggaggagatccggttcttgaggaagatccacgaggaggaggttcgggaactccaggagcagctggcccgacagcaggtccatgtggagcttgacgtggccaagccagacctcaccgcagccctgaaagagatccgcacgcagtatgaggcaatggcgtccagcaacatgcatgaagccgaagagtggtaccgctccaagtttgcagacctgacagacgctgctgcccgcaacgcggagctgctccgccaggccaagcacgaagccaacgactaccggcgccagttgcagtccttgacctgcgacctggagtctctgcgcggca

SEQ ID NO: 8376 - DNA, 787 bp, Homo sapiens
  source 1..787: mol_type = unassigned DNA; mol_type = unassigned DNA
ggatggagaggagacgcatcacctccgctgctcgccgctcctacgtctcctcaggggagatgatggtggggggcctggctcctggccgccgtctgggtcctggcacccgcctctccctggctcgaatgccccctccactcccgacccgggtggatttctccctggctggggcactcaatgctggcttcaaggagacccgggccagtgagcgggcagagatgatggagctcaatgaccgctttgccagctacatcgagaaggttcgcttcctggaacagcaaaacaaggcgctggctgctgagctgaaccagctgcgggccaaggagcccaccaagctggcagacgtctaccaggctgagctgcgagagctgcggctgcggctcgatcaactcaccgccaacagcgcccggctggaggttgagagggacaatctggcacaggacctggccactgtgaggcagaagctccaggatgaaaccaacctgaggctggaagccgagaacaacctggctgcctatagacaggaggttcgggaactccaggagcagctggcccgacagcaggtccatgtggagcttgacgtggccaagccagacctcaccgcagccctgaaagagatccgcacgcagtatgaggcaatggcgtccagcaacatgcatgaagccgaagagtggtaccgctccaagtttgcagacctgacagacgctgctgcccgcaacgcggagctgctccgccaggccaagcacgaagccaacgactaccggcgccagttgcagtccttgacctg

SEQ ID NO: 8377 - DNA, 580 bp, Homo sapiens
  source 1..580: mol_type = unassigned DNA; mol_type = unassigned DNA
agagccagagcaggatggagaggagacgcatcacctccgctgctcgccgctcctacgtctcctcaggggagatgatggtggggggcctggctcctggccgccgtctgggtcctggcacccgcctctccctggctcgaatgccccctccactcccgacccgggtggatttctccctggctggggcactcaatgctggctgagctgcgagagctgcggctgcggctcgatcaactcaccgccaacagcgcccggctggaggttgagagggacaatctggcacaggacctggccactgtgaggcagaagctccaggatgaaaccaacctgaggctggaagccgagaacaacctggctgcctatagacaggaagcagatgaagccaccctggcccgtctggatctggagaggaagattgagtcgctggaggaggagatccggttcttgaggaagatccacgaggaggaggttcgggaactccaggagcagctggcccgacagcaggtccatgtggagcttgacgtggccaagccagacctcaccgcagccctgaaagagatccgcacgcagtatgaggcaatgg

SEQ ID NO: 8378 - DNA, 585 bp, Homo sapiens
  source 1..585: mol_type = unassigned DNA; mol_type = unassigned DNA
agcagagccagagcaggatggagaggagacgcatcacctccgctgctcgccgctcctacgtctcctcaggggagatgatggtggggggcctggctcctggccgccgtctgggtcctggcacccgcctctccctggctcgaatgccccctccactcccgacccgggtggatttctccctggctggggcactcaatgctggcttcaaggagacccgggccagtgagcgggcagagatgatggagctcaatgaccgctttgccagctacatcgagaaggttcgcttcctggaacagcaaaacaaggcgctggctgctgagctgaaccagctgcgggccaaggagcccaccaagctggcagacgtctaccaggctgagctgcgagagctgcggctgcggctcgatcaactcaccgccaacagcgcccggctggaggttgagagggacaatctggcacaggacctggccactgtgaggcagaagaatgtgtccccccactccaggctccaggatgaaaccaacctgaggctggaagccgagaacaacctggctgcctatagacaggaagcagatgaagccaccctggccc

SEQ ID NO: 8379 - DNA, 370 bp, Homo sapiens
  source 1..370: mol_type = unassigned DNA; mol_type = unassigned DNA
agcacagccccctaggggctgcccttgctgtgtggcgccaccggcggtggagaacaaggctctattcagcctgtgcccaggaaaggggatcaggggatgcccaggcatggacagtgggtggcagggggggagaggagggctgtctgcttcccagaagtccaaggacacaaatgggctggagtggcgcaaacacagctcactgcagcctcaacctactgggctcaagcaatcctccagcctcagcctcccaaagtgctgggattacaagcatgagccaccccactcagccctttccttcctttttaattgatgcataataattgagcgagcagagccagagcaggatggagaggagacgcatcacctccgc

SEQ ID NO: 8380 - DNA, 4921 bp, Homo sapiens
  source 1..4921: mol_type = unassigned DNA; mol_type = unassigned DNA
aagacacacgcacgcagagacacacggtcactggaattccattagaaaaaagtgagccgagcaagggttagcgggagaagatttttttgaatcttgtcttcgtcttggtgcgaaagaagcgactccagtctctcgtcctcgaagctccgactggattgttcttgggcgctgacacccgtctgtggatttcttttctatttgcattttattccgaccccctccctcgccgcttccttccagcccttcactcgcaaatcgcctctctccccacctccccaggcccctcctgggaagcgcaggggaattggacccgcggggactcacgccttcccggacgattggaggggagggctgaccccaggactgggctgttggcttagaaagccgatacacagatacgcgtatatttgattgtagcgggcaaggggggcgtcgagaggcagcagcccatcgcccgcctctcaccccaccccctccagccagaggcgagaatcgcaggactcgggatcttcatcgggtggactagctgggatctccgcattggatttggggctgattaccactgcttgcctattattattgttgttgttactactattatttttttttacccaagggagaaagacaaaaaaacggtgggatttatttaacatgatcttggcaaacgtcttctgcctcttcttctttctagacgagaccctccgctctttggccagcccttcctccctgcagggccccgagctccacggctggcgccccccagtggactgtgtccgggccaatgagctgtgtgccgccgaatccaactgcagctctcgctaccgcactctgcggcagtgcctggcaggccgcgaccgcaacaccatgctggccaacaaggagtgccaggcggccttggaggtcttgcaggagagcccgctgtacgactgccgctgcaagcggggcatgaagaaggagctgcagtgtctgcagatctactggagcatccacctggggctgaccgagggtgaggagttctacgaagcctccccctatgagccggtgacctcccgcctctcggacatcttcaggcttgcttcaatcttctcagggacaggggcagacccggtggtcagcgccaagagcaaccattgcctggatgctgccaaggcctgcaacctgaatgacaactgcaagaagctgcgctcctcctacatctccatctgcaaccgcgagatctcgcccaccgagcgctgcaaccgccgcaagtgccacaaggccctgcgccagttcttcgaccgggtgcccagcgagtacacctaccgcatgctcttctgctcctgccaagaccaggcgtgcgctgagcgccgccggcaaaccatcctgcccagctgctcctatgaggacaaggagaagcccaactgcctggacctgcgtggcgtgtgccggactgaccacctgtgtcggtcccggctggccgacttccatgccaattgtcgagcctcctaccagacggtcaccagctgccctgcggacaattaccaggcgtgtctgggctcttatgctggcatgattgggtttgacatgacacctaactatgtggactccagccccactggcatcgtggtgtccccctggtgcagctgtcgtggcagcgggaacatggaggaggagtgtgagaagttcctcagggacttcaccgagaacccatgcctccggaacgccatccaggcctttggcaacggcacggacgtgaacgtgtccccaaaaggcccctcgttccaggccacccaggcccctcgggtggagaagacgccttctttgccagatgacctcagtgacagtaccagcttggggaccagtgtcatcaccacctgcacgtctgtccaggagcaggggctgaaggccaacaactccaaagagttaagcatgtgcttcacagagctcacgacaaatatcatcccagggagtaacaaggtgatcaaacctaactcaggccccagcagagccagaccgtcggctgccttgaccgtgctgtctgtcctgatgctgaaactggccttgtaggctgtgggaaccgagtcagaatatttttgaaagctacgcagacaagaacagccgcctgacgaaatggaaacacacacagacacacacacaccttgcaaaaaaaaaattgtttttcccaccttgtcgctgaacctgtctcctcccaggtttcttctctggagaagtttttgtaaaccaaacagacaagcaggcaggcagcctgagagctggcccaggggtcccctggcaggggaaactctggtgccggggagggcacgaggctctagaaatgcccttcactttctcctggtgtttttctctctggacccttctgaagcagagaccggacaagagcctgcagcggaagggactctgggctgtgcctgaggctggctgggggcaggacaacacagctgcttccccaggctgcccactctggggacccgctgggggctggcagagggcatcggtcagcggggcagcggggctggccatgagggtccaccttcagccctttggcttcaaggatggagatggttttgccctccctctctgccctcgggtggggctggtgggtctgcagctggtgtgggaacttccccacggatggcggtggagggggttcgcaccgtgctgggctccccctgactgtagcacggagtgttggggctgggggccagctccaggagggcttgagagctcagcctgcctgggagagcccttgtggcgaggcattaaaacttgggcaccagcttctttctcggtggcagaaattttgaagtcagagagaaacggtcctttgttggcttctttgctttctcgtgggtcctttggcaggcctccctttggggagagggaggggagagaccacagccgggtgtgtgtctgcagcaccgtgggccctcaagctttcctgctgtcttctccctcctcctcctttcccctttctctttcctcatttcctagacgtacgtcaactgtatgtacataccggggctcctctcctaacatatatgtatatacacatccatatacatatattgtgtggtttcccctttctttcctttttttaagcaacaaaactatggaaataataccccaacagatgagcgaaaatgtattattgtaaagtttattttttttaatactgttgtctataatggggaaaaaggacattggccccgcagtgccctgccccagtcagcctggctgggctctggtgggggctcctgatccgcatccaagcttaaccaaggctccaataaacgtgctaggaagcaagctgcctctgcctcggtcccgtggggttttgcccccattttgttcttggtccagtgttacctgcgtaagtggagctcccagtgggctggggaaatgtgtgtccgtgtgtgtgcctgtgtgcatgtgtgtgcatccatgtgtctcacccatgtgtccacattgtgtgtagatggagctctcttaggagctggtttgacactgggggcgggatctgagggtccacgctgtgctgagcctggtgggctgttctgttccctctttgctcacttctccagttggcgcaaatgcctgtggctcccaggctggaagagaatgcagtggacgtggacgtggtggggagccacagcttggcatcacacgttgggaatgttttattgtcaggctgtctgggtggccctgttagtcttacatagagcaaagtggtatgtccctctgggactcctggcttatttgagatgtgtgattgtgagtgcagtgacctggccttttgggtcccaccagagaagaaggacatgactgtgcatgttctggggtcatggtctgaaagcataagtattttttgggtctccctctattccttcctttcctgtttctccatttgctacccaggccccacttggacactaggcctgccatagtctccaagagagattctccccagagaggaccaggagaatgcctgctggccaagtgtgtgtgtgtccatgtatgtgagcatgtgtacatgtgtgtgcggtcgtgtgcaggctcgcacatgttcacgtgcacgtgtgaatatatacccatggcaggagggagaatggaagactggtaggcgagaagatgtttctactgtcagcctggccttcagggctgcatgtgagcccatcccatttcaactggacaataggatgcagttttcccatctcccaatcgcaggtcccctcaatggcttttgcttctggttgtatatgtgtgagcagcatccgttcacagcgtttatcactgtggtgtattgccttccagcctctgcatggaaggggtacagtgagccagccaggtctctgtccagccattgcgggtagacgtggtcatggcatccacttaggaatccgtgttctttgcaaacagcaaagaccatttaacttaaaaagtactttactggaaggctatgggagaaggtggctcacggaatttgtgggaggtggggggaccaggggaggcgagggcagggactggagggcatctgaggggctggaaggcaggatgtacagggtcagcattctgctgccaaccattgcccatctggctgaactgggccttgtgcctgccctctgccatacttgagtgtgagagagaggatatatatgtcatgtctggtatccctaataggaggtaagcccttaggctacatcatgggggagagaaaatttcccaagaggaaactgaggtgccattatgaaggaggagtggatactagctagctttactctgccctcaaatgtctccctatccaagtatcacatggctgaaattttaccattaggtattcattcctttggttgagatgattcctatttgtgattctctcaaaatatgcaaatcgaactagaagaataaattgttgctatcttaa

SEQ ID NO: 8381 - DNA, 3558 bp, Homo sapiens
  source 1..3558: mol_type = unassigned DNA; mol_type = unassigned DNA
ggagagagaaagacacacgcacgcagagacacacggtcactggaattccattagaaaaaagtgagccgagcaagggttagcgggagaagatttttttgaatcttgtcttcgtcttggtgcgaaagaagcgactccagtctctcgtcctcgaagctccgactggattgttcttgggcgctgacacccgtctgtggatttcttttctatttgcattttattccgaccccctccctcgccgcttccttccagcccttcactcgcaaatcgcctctctccccacctccccaggcccctcctgggaagcgcaggggaattggacccgcggggactcacgccttcccggacgattggaggggagggctgaccccaggactgggctgttggcttagaaagccgatacacagatacgcgtatatttgattgtagcgggcaaggggggcgtcgagaggcagcagcccatcgcccgcctctcaccccaccccctccagccagaggcgagaatcgcaggactcgggatcttcatcgggtggactagctgggatctccgcattggatttggggctgattaccactgcttgcctattattattgttgttgttactactattatttttttttacccaagggagaaagacaaaaaaacggtgggatttatttaacatgatcttggcaaacgtcttctgcctcttcttctttctaggcccagggccgctgctgaggaggaatggagtgcaaagggagaaaacttgctcctacatccaggggaggatgatgcctgagttctccctggggtatgaggagggctgtcccacagagtcgccttggtgtgctttggcgaaatgggtgtgacgttcccagcagggcccaagcccccaggcctgcatcttgggtgggagattgtggcggccgtcattcatgcttgtcttccctccccaccacccagacgagaccctccgctctttggccagcccttcctccctgcagggccccgagctccacggctggcgccccccagtggactgtgtccgggccaatgagctgtgtgccgccgaatccaactgcagctctcgctaccgcactctgcggcagtgcctggcaggccgcgaccgcaacaccatgctggccaacaaggagtgccaggcggccttggaggtcttgcaggagagcccgctgtacgactgccgctgcaagcggggcatgaagaaggagctgcagtgtctgcagatctactggagcatccacctggggctgaccgagggtgaggagttctacgaagcctccccctatgagccggtgacctcccgcctctcggacatcttcaggcttgcttcaatcttctcagggacaggggcagacccggtggtcagcgccaagagcaaccattgcctggatgctgccaaggcctgcaacctgaatgacaactgcaagaagctgcgctcctcctacatctccatctgcaaccgcgagatctcgcccaccgagcgctgcaaccgccgcaagtgccacaaggccctgcgccagttcttcgaccgggtgcccagcgagtacacctaccgcatgctcttctgctcctgccaagaccaggcgtgcgctgagcgccgccggcaaaccatcctgcccagctgctcctatgaggacaaggagaagcccaactgcctggacctgcgtggcgtgtgccggactgaccacctgtgtcggtcccggctggccgacttccatgccaattgtcgagcctcctaccagacggtcaccagctgccctgcggacaattaccaggcgtgtctgggctcttatgctggcatgattgggtttgacatgacacctaactatgtggactccagccccactggcatcgtggtgtccccctggtgcagctgtcgtggcagcgggaacatggaggaggagtgtgagaagttcctcagggacttcaccgagaacccatgcctccggaacgccatccaggcctttggcaacggcacggacgtgaacgtgtccccaaaaggcccctcgttccaggccacccaggcccctcgggtggagaagacgccttctttgccagatgacctcagtgacagtaccagcttggggaccagtgtcatcaccacctgcacgtctgtccaggagcaggggctgaaggccaacaactccaaagagttaagcatgtgcttcacagagctcacgacaaatatcatcccagggagtaacaaggtgatcaaacctaactcaggccccagcagagccagaccgtcggctgccttgaccgtgctgtctgtcctgatgctgaaactggccttgtaggctgtgggaaccgagtcagaatatttttgaaagctacgcagacaagaacagccgcctgacgaaatggaaacacacacagacacacacacaccttgcaaaaaaaaaattgtttttcccaccttgtcgctgaacctgtctcctcccaggtttcttctctggagaagtttttgtaaaccaaacagacaagcaggcaggcagcctgagagctggcccaggggtcccctggcaggggaaactctggtgccggggagggcacgaggctctagaaatgcccttcactttctcctggtgtttttctctctggacccttctgaagcagagaccggacaagagcctgcagcggaagggactctgggctgtgcctgaggctggctgggggcaggacaacacagctgcttccccaggctgcccactctggggacccgctgggggctggcagagggcatcggtcagcggggcagcggggctggccatgagggtccaccttcagccctttggcttcaaggatggagatggttttgccctccctctctgccctcgggtggggctggtgggtctgcagctggtgtgggaacttccccacggatggcggtggagggggttcgcaccgtgctgggctccccctgactgtagcacggagtgttggggctgggggccagctccaggagggcttgagagctcagcctgcctgggagagcccttgtggcgaggcattaaaacttgggcaccagcttctttctcggtggcagaaattttgaagtcagagagaaacggtcctttgttggcttctttgctttctcgtgggtcctttggcaggcctccctttggggagagggaggggagagaccacagccgggtgtgtgtctgcagcaccgtgggccctcaagctttcctgctgtcttctccctcctcctcctttcccctttctctttcctcatttcctagacgtacgtcaactgtatgtacataccggggctcctctcctaacatatatgtatatacacatccatatacatatattgtgtggtttcccctttctttcctttttttaagcaacaaaactatggaaataataccccaacagatgagcgaaaatgtattattgtaaagtttattttttttaatactgttgtctataatggggaaaaaggacattggccccgcagtgccctgccccagtcagcctggctgggctctggtgggggctcctgatccgcatccaagcttaaccaaggctccaataaacgtgctaggaagcaa

SEQ ID NO: 8382 - DNA, 2104 bp, Homo sapiens
  source 1..2104: mol_type = unassigned DNA; mol_type = unassigned DNA
gggagtggagccagcagctgagaccccggcaagggcaaccatggatctggagttggaacgggacaatgcgccatcaggccggcagaagctggcagatgagggccgagttgcggcacacaggtgccagatctccaaatagaggaaattggaaagaaaaagataaagctaatctgtaatttcatcacccggagacaactgctgttgacattgcattgtgtgtctaaggaggactttgacagggagaaagacaaaaaaacggtgggatttatttaacatgatcttggcaaacgtcttctgcctcttcttctttctagacgagaccctccgctctttggccagcccttcctccctgcagggccccgagctccacggctggcgccccccagtggactgtgtccgggccaatgagctgtgtgccgccgaatccaactgcagctctcgctaccgcactctgcggcagtgcctggcaggccgcgaccgcaacaccatgctggccaacaaggagtgccaggcggccttggaggtcttgcaggagagcccgctgtacgactgccgctgcaagcggggcatgaagaaggagctgcagtgtctgcagatctactggagcatccacctggggctgaccgagggtgaggagttctacgaagcctccccctatgagccggtgacctcccgcctctcggacatcttcaggcttgcttcaatcttctcagggacaggggcagacccggtggtcagcgccaagagcaaccattgcctggatgctgccaaggcctgcaacctgaatgacaactgcaagaagctgcgctcctcctacatctccatctgcaaccgcgagatctcgcccaccgagcgctgcaaccgccgcaagtgccacaaggccctgcgccagttcttcgaccgggtgcccagcgagtacacctaccgcatgctcttctgctcctgccaagaccaggcgtgcgctgagcgccgccggcaaaccatcctgcccagctgctcctatgaggacaaggagaagcccaactgcctggacctgcgtggcgtgtgccggactgaccacctgtgtcggtcccggctggccgacttccatgccaattgtcgagcctcctaccagacggtcaccagctgccctgcggacaattaccaggcgtgtctgggctcttatgctggcatgattgggtttgacatgacacctaactatgtggactccagccccactggcatcgtggtgtccccctggtgcagctgtcgtggcagcgggaacatggaggaggagtgtgagaagttcctcagggacttcaccgagaacccatgcctccggaacgccatccaggcctttggcaacggcacggacgtgaacgtgtccccaaaaggcccctcgttccaggccacccaggcccctcgggtggagaagacgccttctttgccagatgacctcagtgacagtaccagcttggggaccagtgtcatcaccacctgcacgtctgtccaggagcaggggctgaaggccaacaactccaaagagttaagcatgtgcttcacagagctcacgacaaatatcatcccagggagtaacaaggtgatcaaacctaactcaggccccagcagagccagaccgtcggctgccttgaccgtgctgtctgtcctgatgctgaaactggccttgtaggctgtgggaaccgagtcagaatatttttgaaagctacgcagacaagaacagccgcctgacgaaatggaaacacacacagacacacacacaccttgcaaaaaaaaaattgtttttcccaccttgtcgctgaacctgtctcctcccaggtttcttctctggagaagtttttgtaaaccaaacagacaagcaggcaggcagcctgagagctggcccaggggtcccctggcaggggaaactctggtgccggggagggcacgaggctctagaaatgcccttcactttctcctggtgtttttctctctggacccttctgaagcagagaccggacaagagcctgcagcggaagggactctgggctgtgcctgaggctggctgggggcaggacaacacagctgcttccccaggctgcccactctggggacccgctgggggctg

SEQ ID NO: 8383 - DNA, 1503 bp, Homo sapiens
  source 1..1503: mol_type = unassigned DNA; mol_type = unassigned DNA
gagaatcgcaggactcgggatcttcatcgggtggactagctgggatctccgcattggatttggggctgattaccactgcttgcctattattattgttgttgttactactattatttttttttacccaagggagaaagacaaaaaaacggtgggatttatttaacatgatcttggcaaacgtcttctgcctcttcttctttctagggacaggggcagacccggtggtcagcgccaagagcaaccattgcctggatgctgccaaggcctgcaacctgaatgacaactgcaagaagctgcgctcctcctacatctccatctgcaaccgcgagatctcgcccaccgagcgctgcaaccgccgcaagtgccacaaggccctgcgccagttcttcgaccgggtgcccagcgagtacacctaccgcatgctcttctgctcctgccaagaccaggcgtgcgctgagcgccgccggcaaaccatcctgcccagctgctcctatgaggacaaggagaagcccaactgcctggacctgcgtggcgtgtgccggactgaccacctgtgtcggtcccggctggccgacttccatgccaattgtcgagcctcctaccagacggtcaccagctgccctgcggacaattaccaggcgtgtctgggctcttatgctggcatgattgggtttgacatgacacctaactatgtggactccagccccactggcatcgtggtgtccccctggtgcagctgtcgtggcagcgggaacatggaggaggagtgtgagaagttcctcagggacttcaccgagaacccatgcctccggaacgccatccaggcctttggcaacggcacggacgtgaacgtgtccccaaaaggcccctcgttccaggccacccaggcccctcgggtggagaagacgccttctttgccagatgacctcagtgacagtaccagcttggggaccagtgtcatcaccacctgcacgtctgtccaggagcaggggctgaaggccaacaactccaaagagttaagcatgtgcttcacagagctcacgacaaatatcatcccagggagtaacaaggtgatcaaacctaactcaggccccagcagagccagaccgtcggctgccttgaccgtgctgtctgtcctgatgctgaaactggccttgtaggctgtgggaaccgagtcagaatatttttgaaagctacgcagacaagaacagccgcctgacgaaatggaaacacacacagacacacacacaccttgcaaaaaaaaaattgtttttcccaccttgtcgctgaacctgtctcctcccaggtttcttctctggagaagtttttgtaaaccaaacagacaagcaggcaggcagcctgagagctggcccaggggtcccctggcaggggaaactctggtgccggggagggcacgaggctctagaaatgcccttcactttctcctggtgtttttctctctggacccttctgaagcagagaccggacaagagcctgcagcgg

SEQ ID NO: 8384 - DNA, 1176 bp, Homo sapiens
  source 1..1176: mol_type = unassigned DNA; mol_type = unassigned DNA
atgatcttggcaaacgtcttctgcctcttcttctttctaggtgaggagttctacgaagcctccccctatgagccggtgacctcccgcctctcggacatcttcaggcttgcttcaatcttctcagggacaggggcagacccggtggtcagcgccaagagcaaccattgcctggatgctgccaaggcctgcaacctgaatgacaactgcaagaagctgcgctcctcctacatctccatctgcaaccgcgagatctcgcccaccgagcgctgcaaccgccgcaagtgccacaaggccctgcgccagttcttcgaccgggtgcccagcgagtacacctaccgcatgctcttctgctcctgccaagaccaggcgtgcgctgagcgccgccggcaaaccatcctgcccagctgctcctatgaggacaaggagaagcccaactgcctggacctgcgtggcgtgtgccggactgaccacctgtgtcggtcccggctggccgacttccatgccaattgtcgagcctcctaccagacggtcaccagctgccctgcggacaattaccaggcgtgtctgggctcttatgctggcatgattgggtttgacatgacacctaactatgtggactccagccccactggcatcgtggtgtccccctggtgcagctgtcgtggcagcgggaacatggaggaggagtgtgagaagttcctcagggacttcaccgagaacccatgcctccggaacgccatccaggcctttggcaacggcacggacgtgaacgtgtccccaaaaggcccctcgttccaggccacccaggcccctcgggtggagaagacgccttctttgccagatgacctcagtgacagtaccagcttggggaccagtgtcatcaccacctgcacgtctgtccaggagcaggggctgaaggccaacaactccaaagagttaagcatgtgcttcacagagctcacgacaaatatcatcccagggagtaacaaggtgatcaaacctaactcaggccccagcagagccagaccgtcggctgccttgaccgtgctgtctgtcctgatgctgaaactggccttgtaggctgtgggaaccgagtcagaatatttttgaaagctacgcagacaagaacagccgcctgacgaaatggaaacacacacagacacacacacaccttgc

SEQ ID NO: 8385 - DNA, 872 bp, Homo sapiens
  source 1..872: mol_type = unassigned DNA
gccgtagccgggggagccagtcagtttccggccaaggcagcagggagaaagacaaaaaaacggtgggatttatttaacatgatcttggcaaacgtcttctgcctcttcttctttctagacgagaccctccgctctttggccagcccttcctccctgcagggccccgagctccacggctggcgccccccagtggactgtgtccgggccaatgagctgtgtgccgccgaatccaactgcagctctcgctaccgcactctgcggcagtgcctggcaggccgcgaccgcaacaccatgctggccaacaaggagtgccaggcggccttggaggtcttgcaggagagcccgctgtacgactgccgctgcaagcggggcatgaagaaggagctgcagtgtctgcagatctactggagcatccacctggggctgaccgagggtgaggagttctacgaagcctccccctatgagccggtgacctcccgcctctcggacatcttcaggcttgcttcaatcttctcagggacaggggcagacccggtggtcagcgccaagagcaaccattgcctggatgctgccaaggcctgcaacctgaatgacaactgcaagaagctgcgctcctcctacatctccatctgcaaccgcgagatctcgcccaccgagcgctgcaaccgccgcaagtgccacaaggccctgcgccagttcttcgaccgggtgcccagcgagtacacctaccgcatgctcttctgctcctgccaagaccaggcgtgcgctgagcgccgccggcaaaccatcctgcccagctgctcctatgaggacaaggagaagcccaactgcctggacctgcgtggcgtgtgccggactgaccacctgtgtcg

SEQ ID NO: 8386 - DNA, 546 bp, Homo sapiens
  source 1..546: mol_type = unassigned DNA
gtcactggaattccattagaaaaaagtgagccgagcaagggttagcgggagaagatttttttgaatcttgtcttcgtcttggtgcgaaagaagcgactccagtctctcgtcctcgaagctccgactggattgttcttgggcgctgacacccacgagaccctccgctctttggccagcccttcctccctgcagggccccgagctccacggctggcgccccccagtggactgtgtccgggccaatgagctgtgtgccgccgaatccaactgcagctctcgctaccgcactctgcggcagtgcctggcaggccgcgaccgcaacaccatgctggccaacaaggagtgccaggcggccttggaggtcttgcaggagagcccgctgtacgactgccgctgcaagcggggcatgaagaaggagctgcagtgtctgcagatctactggagcatccacctggggctgaccgagggtgaggagttctacgaagcctccccctatgagccggtgacctcccgcctctcggacatcttcaggcttgcttcaatcttc

SEQ ID NO: 8387 - DNA, 616 bp, Homo sapiens
  source 1..616: mol_type = unassigned DNA
atgatcttggcaaacgtcttctgcctcttcttctttctagacgagaccctccgctctttggccagcccttcctccctgcagggccccgagctccacggctggcgccccccagtggactgtgtccgggccaatgagctgtgtgccgccgaatccaactgcagctctcgctaccgcactctgcggcagtgcctggcaggccgcgaccgcaacaccatgctggccaacaaggagtgccaggcggccttggaggtcttgcaggagagcccgctgtacgactgccgctgcaagcggggcatgaagaaggagctgcagtgtctgcagatctactggagcatccacctggggctgaccgaggagatggggtctcgttatgttgcacaggcctatctcaaactcccgggctcaagcagtactcccaccttggtttcccaaagttctgggcttacaggcggtgccttctccctagcaacctggattcctagaactagcatgagcaaagggaggaatactgtcctgagggtactgcactctattcttcaggagataaggcgctgtcttcacccagagccggactctgtagcgtacaaataattaaagcgctcaatgcctgagctga

SEQ ID NO: 8388 - DNA, 2128 bp, Homo sapiens
  source 1..2128: mol_type = unassigned DNA
ttttccgacagaggcctgcccgtgattggctgctcgtactatttacgtcctttcgatgttgcgtcatgcagtgcgccggaggaactgtgctctttgaggccgacgctaggggcccggaagggaaactgcgaggcgaaggtgaccggggaccgagcatttcagatctgctcggtagacctggtgcaccaccaccatgttggctgcaaggctggtgtgtctccggacactaccttctagggttttccacccagctttcaccaaggcctcccctgttgtgaagaattccatcacgaagaatcaatggctgttaacacctagcagggaatatgccaccaaaacaagaattgggatccggcgtgggagaactggccaagaactcaaagaggcagcattggaaccatcgatggaaaaaatatttaaaattgatcagatgggaagatggtttgttgctggaggggctgctgttggtcttggagcattgtgctactatggcttgggactgtctaatgagattggagctattgaaaaggctgtaatttggcctcagtatgtcaaggatagaattcattccacctatatgtacttagcagggagtattggtttaacagctttgtctgccatagcaatcagcagaacgcctgttctcatgaacttcatgatgagaggctcttgggtgacaattggtgtgacctttgcagccatggttggagctggaatgctggtacgatcaataccatatgaccagagcccaggcccaaagcatcttgcttggttgctacattctggtgtgatgggtgcagtggtggctcctctgacaatattagggggtcctcttctcatcagagctgcatggtacacagctggcattgtgggaggcctctccactgtggccatgtgtgcgcccagtgaaaagtttctgaacatgggtgcacccctgggagtgggcctgggtctcgtctttgtgtcctcattgggatctatgtttcttccacctaccaccgtggctggtgccactctttactcagtggcaatgtacggtggattagttcttttcagcatgttccttctgtatgatacccagaaagtaatcaagcgtgcagaagtatcaccaatgtatggagttcaaaaatatgatcccattaactcgatgctgagtatctacatggatacattaaatatatttatgcgagttgcaactatgctggcaactggaggcaacagaaagaaatgaagtgactcagcttctggcttctctgctacatcaaatatcttgtttaatggggcagatatgcattaaatagtttgtacaagcagctttcgttgaagtttagaagataagaaacatgtcatcatatttaaatgttccggtaatgtgatgcctcaggtctgcctttttttctggagaataaatgcagtaatcctctcccaaataagcacacacattttcaattctcatgtttgagtgattttaaaatgttttggtgaatgtgaaaactaaagtttgtgtcatgagaatgtaagtcttttttctactttaaaatttagtaggttcactgagtaactaaaatttagcaaacctgtgtttgcatatttttttggagtgcagaatattgtaattaatgtcataagtgatttggagctttggtaaagggaccagagagaaggagtcacctgcagtcttttgtttttttaaatacttagaacttagcacttgtgttattgattagtgaggagccagtaagaaacatctgggtatttggaaacaagtggtcattgttacattcatctgctgaacttaacaaaactgttcatcctgaaacaggcacaggtgatgcattctcctgctgttgcttctcagtgctctctttccaatatagatgtggtcatgtttgacttgtacagaatgttaatcatacagagaatccttgatggaattatatatgtgtgttttacttttgaatgttacaaaaggaaataactttaaaactattctcaagagaaaatattcaaagcatgaaatatgttgctttttccagaatacaaacagtatactcatgattgctaagtgtttttttatttttgcatatttattgaactgtctaattgaatacagcttgctcttgtcacc

SEQ ID NO: 8389 - DNA, 4560 bp, Homo sapiens
  source 1..4560: mol_type = unassigned DNA
gcggcggcggcggcagcggcagcagcagctgctacagtggcggtggcggcggcggctgctgctgagcccgggcggcggcggggaccccgggctggggccacgcgggccggaggccccggcaccattggccccagcgcagacgcgaacccgcgctctctgatcagaggcgaagctcggaggtcctacaggtatggatctctggcagctgctgttgaccttggcactggcaggatcaagtgatgctttttctggaagtgaggccacagcagctatccttagcagagcaccctggagtctgcaaagtgttaatccaggcctaaagacaaattcttctaaggagcctaaattcaccaagtgccgttcacctgagcgagagactttttcatgccactggacagatgaggttcatcatggtacaaagaacctaggacccatacagctgttctataccagaaggaacactcaagaatggactcaagaatggaaagaatgccctgattatgtttctgctggggaaaacagctgttactttaattcatcgtttacctccatctggataccttattgtatcaagctaactagcaatggtggtacagtggatgaaaagtgtttctctgttgatgaaatagtgcaaccagatccacccattgccctcaactggactttactgaacgtcagtttaactgggattcatgcagatatccaagtgagatgggaagcaccacgcaatgcagatattcagaaaggatggatggttctggagtatgaacttcaatacaaagaagtaaatgaaactaaatggaaaatgatggaccctatattgacaacatcagttccagtgtactcattgaaagtggataaggaatatgaagtgcgtgtgagatccaaacaacgaaactctggaaattatggcgagttcagtgaggtgctctatgtaacacttcctcagatgagccaatttacatgtgaagaagatttctactttccatggctcttaattattatctttggaatatttgggctaacagtgatgctatttgtattcttattttctaaacagcaaaggattaaaatgctgattctgcccccagttccagttccaaagattaaaggaatcgatccagatctcctcaaggaaggaaaattagaggaggtgaacacaatcttagccattcatgatagctataaacccgaattccacagtgatgactcttgggttgaatttattgagctagatattgatgagccagatgaaaagactgaggaatcagacacagacagacttctaagcagtgaccatgagaaatcacatagtaacctaggggtgaaggatggcgactctggacgtaccagctgttgtgaacctgacattctggagactgatttcaatgccaatgacatacatgagggtacctcagaggttgctcagccacagaggttaaaaggggaagcagatctcttatgccttgaccagaagaatcaaaataactcaccttatcatgatgcttgccctgctactcagcagcccagtgttatccaagcagagaaaaacaaaccacaaccacttcctactgaaggagctgagtcaactcaccaagctgcccatattcagctaagcaatccaagttcactgtcaaacatcgacttttatgcccaggtgagcgacattacaccagcaggtagtgtggtcctttccccgggccaaaagaataaggcagggatgtcccaatgtgacatgcacccggaaatggtctcactctgccaagaaaacttccttatggacaatgcctacttctgtgaggcagatgccaaaaagtgcatccctgtggctcctcacatcaaggttgaatcacacatacagccaagcttaaaccaagaggacatttacatcaccacagaaagccttaccactgctgctgggaggcctgggacaggagaacatgttccaggttctgagatgcctgtcccagactatacctccattcatatagtacagtccccacagggcctcatactcaatgcgactgccttgcccttgcctgacaaagagtttctctcatcatgtggctatgtgagcacagaccaactgaacaaaatcatgccttagcctttctttggtttcccaagagctacgtatttaatagcaaagaattgactggggcaataacgtttaagccaaaacaatgtttaaaccttttttgggggagtgacaggatggggtatggattctaaaatgccttttcccaaaatgttgaaatatgatgttaaaaaaataagaagaatgcttaatcagatagatattcctattgtgcaatgtaaatattttaaagaattgtgtcagactgtttagtagcagtgattgtcttaatattgtgggtgttaatttttgatactaagcattgaatggctatgtttttaatgtatagtaaatcacgctttttgaaaaagcgaaaaaatcaggtggcttttgcggttcaggaaaattgaatgcaaaccatagcacaggctaattttttgttgtttcttaaataagaaacttttttatttaaaaaactaaaaactagaggtgagaaatttaaactataagcaagaaggcaaaaatagtttggatatgtaaaacatttattttgacataaagttgataaagattttttaataatttagacttcaagcatggctattttatattacactacacactgtgtactgcagttggtatgacccctctaaggagtgtagcaactacagtctaaagctggtttaatgttttggccaatgcacctaaagaaaaacaaactcgttttttacaaagcccttttatacctccccagactccttcaacaattctaaaatgattgtagtaatctgcattattggaatataattgttttatctgaatttttaaacaagtatttgttaatttagaaaactttaaagcgtttgcacagatcaacttaccaggcaccaaaagaagtaaaagcaaaaaagaaaacctttcttcaccaaatcttggttgatgccaaaaaaaaatacatgctaagagaagtagaaatcatagctggttcacactgaccaagatacttaagtgctgcaattgcacgcggagtgagttttttagtgcgtgcagatggtgagagataagatctatagcctctgcagcggaatctgttcacacccaacttggttttgctacataattatccaggaagggaataaggtacaagaagcattttgtaagttgaagcaaatcgaatgaaattaactgggtaatgaaacaaagagttcaagaaataagtttttgtttcacagcctataaccagacacatactcatttttcatgataatgaacagaacatagacagaagaaacaaggttttcagtccccacagataactgaaaattatttaaaccgctaaaagaaactttctttctcactaaatcttttataggatttatttaaaatagcaaaagaagaagtttcatcattttttacttcctctctgagtggactggcctcaaagcaagcattcagaagaaaaagaagcaacctcagtaatttagaaatcattttgcaatcccttaatatcctaaacatcattcatttttgttgttgttgttgttgttgagacagagtctcgctctgtcgccaggctagagtgcggtggcgcgatcttgactcactgcaatctccacctcccacaggttcaggcgattcccgtgcctcagcctcctgagtagctgggactacaggcacgcaccaccatgccaggctaatttttttgtattttagcagagacggggtttcaccatgttggccaggatggtctcgatctcctgacctcgtgatccacccgactcggcctcccaaagtgctgggattacaggtgtaagccaccgtgcccagccctaaacatcattcttgagagcattgggatatctcctgaaaaggtttatgaaaaagaagaatctcatctcagtgaagaatacttctcattttttaaaaaagcttaaaactttgaagttagctttaacttaaatagtatttcccatttatcgcagaccttttttaggaagcaagcttaatggctgataattttaaattctctctcttgcaggaaggactatgaaaagctagaattgagtgtttaaagttcaacatgttatttgtaatagatgtttgatagattttctgctactttgctgctatggttttctccaagagctacataatttagtttcatataaagtatcatcagtgtagaacctaattcaattcaaagctgtgtgtttggaagactatcttactatttcacaacagcctgacaacatttctatagccaaaaatagctaaatacctcaatcagtctcagaatgtcattttggtactttggtggccacataagccattattcactagtatgactagttgtgtctggcagtttatatttaactctctttatgtctgtggattttttccttcaaagtttaataaatttattttcttggattcctgatagtgtgcttctgttatcaaacaccaacataaaaatgatctaaacc

SEQ ID NO: 8390 - DNA, 566 bp, Homo sapiens
  source 1..566: mol_type = unassigned DNA
tttgtgcgggccgcagccgcacgttggcaccgatggaactggggtcagtagagtgacagccaccagtccgcatgaactggggtcctacaggtatggatctctggcagctgctgttgaccttggcactggcaggatcaagtgatgctttttctggaagtgaggccacagcagctatccttagcagagcaccctggagtctgcaaagtgttaatccaggcctaaagacaagatggggtccatgctcacatatcaagaaaatggagtcttacatgcaagcctaatgcagagtagagaagctcaccaacttgaaggaagcatgaatgaaattacaaggaaatctagcttagaaaaattaaccctgtagcttggtttttccactctttgctcttggcaaaaggatcttacgggaaaactggagcttagagaacttatgtaacattactagcaagttgcacagctgggattcaaactgaaatccagctagcttcaaagactgtgttctttctgctgctgcatactacccctacctaccaaggctctgagattagaaagcaggatgggtgtgt

SEQ ID NO: 8391 - DNA, 615 bp, Homo sapiens
  source 1..615: mol_type = unassigned DNA
gaattcactgggcgcatcttacaagtaatttttggattctgcattgactacctacaagtgccttctgggtgcaagtccacaggcaagatttgttctgcaaatcttccatgaccaaggtcacctctttggattggcagacccagggagtccatattgggaagataaattcacacttcaccccttgttgagatctccagccttgctcctctgataaccagtttttggcatctcagatgaggaagagtgatgggcgacaggtgatggtgacaactattaataagatctgaaagtaaacagtctcatgaaaggtggccaggagagggcagtcaccttttatcaggagcacagactgaatttgcaaagggtcctacaggtatggatctctggcagctgctgttgaccttggcactggcaggatcaagtgatgctttttctggaagtgaggctctgaaatacctacttccaagagaacgaaatttattcaagaaatgttggatggaaattgaagagtgagcttggaaacgagacacagagtggcaggagcccagaccaacctgtttatgaaagatgcctttgcccatagagggaaaaatacaccttaaaacctctgccaaa

SEQ ID NO: 8392 - DNA, 2173 bp, Homo sapiens
  source 1..2173: mol_type = unassigned DNA
gattgcaggtcctacaggtatggatctctggcagctgctgttgaccttggcactggcaggatcaagtgatgctttttctggaagtgaggccacagcagctatccttagcagagcaccctggagtctgcaaagtgttaatccaggcctaaagacaagaacactcaagaatggactcaagaatggaaagaatgccctgattatgtttctgctggggaaaacagctgttactttaattcatcgtttacctccatctggataccttattgtatcaagctaactagcaatggtggtacagtggatgaaaagtgtttctctgttgatgaaatagtgcaaccagatccacccattgccctcaactggactttactgaacgtcagtttaactgggattcatgcagatatccaagtgagatgggaagcaccacgcaatgcagatattcagaaaggatggatggttctggagtatgaacttcaatacaaagaagtaaatgaaactaaatggaaaatgatggaccctatattgacaacatcagttccagtgtactcattgaaagtggataaggaatatgaagtgcgtgtgagatccaaacaacgaaactctggaaattatggcgagttcagtgaggtgctctatgtaacacttcctcagatgagccaatttacatgtgaagaagatttctactttccatggctcttaattattatctttggaatatttgggctaacagtgatgctatttgtattcttattttctaaacagcaaaggattaaaatgctgattctgcccccagttccagttccaaagattaaaggaatcgatccagatctcctcaaggaaggaaaattagaggaggtgaacacaatcttagccattcatgatagctataaacccgaattccacagtgatgactcttgggttgaatttattgagctagatattgatgagccagatgaaaagactgaggaatcagacacagacagacttctaagcagtgaccatgagaaatcacatagtaacctaggggtgaaggatggcgactctggacgtaccagctgttgtgaacctgacattctggagactgatttcaatgccaatgacatacatgagggtacctcagaggttgctcagccacagaggttaaaaggggaagcagatctcttatgccttgaccagaagaatcaaaataactcaccttatcatgatgcttgccctgctactcagcagcccagtgttatccaagcagagaaaaacaaaccacaaccacttcctactgaaggagctgagtcaactcaccaagctgcccatattcagctaagcaatccaagttcactgtcaaacatcgacttttatgcccaggtgagcgacattacaccagcaggtagtgtggtcctttccccgggccaaaagaataaggcagggatgtcccaatgtgacatgcacccggaaatggtctcactctgccaagaaaacttccttatggacaatgcctacttctgtgaggcagatgccaaaaagtgcatccctgtggctcctcacatcaaggttgaatcacacatacagccaagcttaaaccaagaggacatttacatcaccacagaaagccttaccactgctgctgggaggcctgggacaggagaacatgttccaggttctgagatgcctgtcccagactatacctccattcatatagtacagtccccacagggcctcatactcaatgcgactgccttgcccttgcctgacaaagagtttctctcatcatgtggctatgtgagcacagaccaactgaacaaaatcatgccttagcctttctttggtttcccaagagctacgtatttaatagcaaagaattgactggggcaataacgtttaagccaaaacaatgtttaaaccttttttgggggagtgacaggatggggtatggattctaaaatgccttttcccaaaatgttgaaatatgatgttaaaaaaataagaagaatgcttaatcagatagatattcctattgtgcaatgtaaatattttaaagaattgtgtcagactgtttagtagcagtgattgtcttaatattgtgggtgttaatttttgatactaagcattgaatggctatgtttttaatgtatagtaaatcacgctttttgaaaaagcgaaaaaatcaggtggcttttgcggt

SEQ ID NO: 8393 - DNA, 782 bp, Homo sapiens
  source 1..782: mol_type = unassigned DNA
gtatcactgagcctttggctgagtctgatacagtccttatatacagacaatttttttttttccttgagacggagtcttactctgttgcccaggctggagtgcaatggcgcaatcttggctcactgcaaccgccgccccccaggttcaagcaattctcctgcctcagcctccagagtagctgggattacaggcatgcgccaccaagcccagctaattttgtatttttagatacagtttcaccatgttggtcagactggtctcgaactcctgacctcaggtgatctgcccacctcagcctcccaaagcgctgggattacaggcgtgagctaccgcgcctggccccatttaaggattaaaatgctgattctgcccccagttccagttccaaagattaaaggaatcgatccagatctcctcaaggaaggaaaattagaggaggtgaacacaatcttagccattcatgatagctataaacccgaattccacagtgatgactcttgggttgaatttattgagctagatattgatgagccagatgaaaagactgaggaatcagacacagacagacttctaagcagtgaccatgagaaatcacatagtaacctaggggtgaaggatggcgactctggacgtaccagctgttgtgaacctgacattctggagactgatttcaatgccaatgacatacatgagggtacctcagaggttgctcagccacagaggttaaaaggggaagcagatctcttatgccttgaccagaagaatcaaaataactcacctta

SEQ ID NO: 8394 - DNA, 4814 bp, Homo sapiens
  source 1..4814: mol_type = unassigned DNA
ggagagactggggaggtcgagctgtgcgcgtggacacagcgcgcagagcgcgcggtcttttgcgcgtttgtgcgggccgcagccgcacgttggcaccgatggaactggggtcagtagagtgacagccaccagtccgcatgaactgggttaaaatgagcaacttctttaaccagaactgaccttgaagacaaatggctaaaataaaacatttgctgaattcactgggcgcatcttacaagtaatttttggattctgcattgactacctacaagtgccttctgggtgcaagtccacaggcaagatttgttctgcaaatcttccatgaccaaggtcacctctttggattggcagacccagggagtccatattgggaagataaattcacacttcaccccttgttgagatctccagccttgctcctctgataaccaggtcctacaggtatggatctctggcagctgctgttgaccttggcactggcaggatcaagtgatgctttttctggaagtgaggccacagcagctatccttagcagagcaccctggagtctgcaaagtgttaatccaggcctaaagacaaattcttctaaggagcctaaattcaccaagtgccgttcacctgagcgagagactttttcatgccactggacagatgaggttcatcatggtacaaagaacctaggacccatacagctgttctataccagaaggaacactcaagaatggactcaagaatggaaagaatgccctgattatgtttctgctggggaaaacagctgttactttaattcatcgtttacctccatctggataccttattgtatcaagctaactagcaatggtggtacagtggatgaaaagtgtttctctgttgatgaaatagtgcaaccagatccacccattgccctcaactggactttactgaacgtcagtttaactgggattcatgcagatatccaagtgagatgggaagcaccacgcaatgcagatattcagaaaggatggatggttctggagtatgaacttcaatacaaagaagtaaatgaaactaaatggaaaatgatggaccctatattgacaacatcagttccagtgtactcattgaaagtggataaggaatatgaagtgcgtgtgagatccaaacaacgaaactctggaaattatggcgagttcagtgaggtgctctatgtaacacttcctcagatgagccaatttacatgtgaagaagatttctactttccatggctcttaattattatctttggaatatttgggctaacagtgatgctatttgtattcttattttctaaacagcaaaggattaaaatgctgattctgcccccagttccagttccaaagattaaaggaatcgatccagatctcctcaaggaaggaaaattagaggaggtgaacacaatcttagccattcatgatagctataaacccgaattccacagtgatgactcttgggttgaatttattgagctagatattgatgagccagatgaaaagactgaggaatcagacacagacagacttctaagcagtgaccatgagaaatcacatagtaacctaggggtgaaggatggcgactctggacgtaccagctgttgtgaacctgacattctggagactgatttcaatgccaatgacatacatgagggtacctcagaggttgctcagccacagaggttaaaaggggaagcagatctcttatgccttgaccagaagaatcaaaataactcaccttatcatgatgcttgccctgctactcagcagcccagtgttatccaagcagagaaaaacaaaccacaaccacttcctactgaaggagctgagtcaactcaccaagctgcccatattcagctaagcaatccaagttcactgtcaaacatcgacttttatgcccaggtgagcgacattacaccagcaggtagtgtggtcctttccccgggccaaaagaataaggcagggatgtcccaatgtgacatgcacccggaaatggtctcactctgccaagaaaacttccttatggacaatgcctacttctgtgaggcagatgccaaaaagtgcatccctgtggctcctcacatcaaggttgaatcacacatacagccaagcttaaaccaagaggacatttacatcaccacagaaagccttaccactgctgctgggaggcctgggacaggagaacatgttccaggttctgagatgcctgtcccagactatacctccattcatatagtacagtccccacagggcctcatactcaatgcgactgccttgcccttgcctgacaaagagtttctctcatcatgtggctatgtgagcacagaccaactgaacaaaatcatgccttagcctttctttggtttcccaagagctacgtatttaatagcaaagaattgactggggcaataacgtttaagccaaaacaatgtttaaaccttttttgggggagtgacaggatggggtatggattctaaaatgccttttcccaaaatgttgaaatatgatgttaaaaaaataagaagaatgcttaatcagatagatattcctattgtgcaatgtaaatattttaaagaattgtgtcagactgtttagtagcagtgattgtcttaatattgtgggtgttaatttttgatactaagcattgaatggctatgtttttaatgtatagtaaatcacgctttttgaaaaagcgaaaaaatcaggtggcttttgcggttcaggaaaattgaatgcaaaccatagcacaggctaattttttgttgtttcttaaataagaaacttttttatttaaaaaactaaaaactagaggtgagaaatttaaactataagcaagaaggcaaaaatagtttggatatgtaaaacatttattttgacataaagttgataaagattttttaataatttagacttcaagcatggctattttatattacactacacactgtgtactgcagttggtatgacccctctaaggagtgtagcaactacagtctaaagctggtttaatgttttggccaatgcacctaaagaaaaacaaactcgttttttacaaagcccttttatacctccccagactccttcaacaattctaaaatgattgtagtaatctgcattattggaatataattgttttatctgaatttttaaacaagtatttgttaatttagaaaactttaaagcgtttgcacagatcaacttaccaggcaccaaaagaagtaaaagcaaaaaagaaaacctttcttcaccaaatcttggttgatgccaaaaaaaaatacatgctaagagaagtagaaatcatagctggttcacactgaccaagatacttaagtgctgcaattgcacgcggagtgagttttttagtgcgtgcagatggtgagagataagatctatagcctctgcagcggaatctgttcacacccaacttggttttgctacataattatccaggaagggaataaggtacaagaagcattttgtaagttgaagcaaatcgaatgaaattaactgggtaatgaaacaaagagttcaagaaataagtttttgtttcacagcctataaccagacacatactcatttttcatgataatgaacagaacatagacagaagaaacaaggttttcagtccccacagataactgaaaattatttaaaccgctaaaagaaactttctttctcactaaatcttttataggatttatttaaaatagcaaaagaagaagtttcatcattttttacttcctctctgagtggactggcctcaaagcaagcattcagaagaaaaagaagcaacctcagtaatttagaaatcattttgcaatcccttaatatcctaaacatcattcatttttgttgttgttgttgttgttgagacagagtctcgctctgtcgccaggctagagtgcggtggcgcgatcttgactcactgcaatctccacctcccacaggttcaggcgattcccgtgcctcagcctcctgagtagctgggactacaggcacgcaccaccatgccaggctaatttttttgtattttagcagagacggggtttcaccatgttggccaggatggtctcgatctcctgacctcgtgatccacccgactcggcctcccaaagtgctgggattacaggtgtaagccaccgtgcccagccctaaacatcattcttgagagcattgggatatctcctgaaaaggtttatgaaaaagaagaatctcatctcagtgaagaatacttctcattttttaaaaaagcttaaaactttgaagttagctttaacttaaatagtatttcccatttatcgcagaccttttttaggaagcaagcttaatggctgataattttaaattctctctcttgcaggaaggactatgaaaagctagaattgagtgtttaaagttcaacatgttatttgtaatagatgtttgatagattttctgctactttgctgctatggttttctccaagagctacataatttagtttcatataaagtatcatcagtgtagaacctaattcaattcaaagctgtgtgtttggaagactatcttactatttcacaacagcctgacaacatttctatagccaaaaatagctaaatacctcaatcagtctcagaatgtcattttggtactttggtggccacataagccattattcactagtatgactagttgtgtctggcagtttatatttaactctctttatgtctgtggattttttccttcaaagtttaataaatttattttcttggattcctgatagtgtgcttctgttatcaaacaccaacataaaaatgatctaaacca

SEQ ID NO: 8395 - DNA, 4491 bp, Homo sapiens
  source 1..4491: mol_type = unassigned DNA
cctcttctcagctgatttggctgcctccattgtaataggcctcatgagactccagcctaggcctggccttcagttcagcaggcagagcccagagatgtactgggcaaaggtcctacaggtatggatctctggcagctgctgttgaccttggcactggcaggatcaagtgatgctttttctggaagtgaggccacagcagctatccttagcagagcaccctggagtctgcaaagtgttaatccaggcctaaagacaaattcttctaaggagcctaaattcaccaagtgccgttcacctgagcgagagactttttcatgccactggacagatgaggttcatcatggtacaaagaacctaggacccatacagctgttctataccagaaggaacactcaagaatggactcaagaatggaaagaatgccctgattatgtttctgctggggaaaacagctgttactttaattcatcgtttacctccatctggataccttattgtatcaagctaactagcaatggtggtacagtggatgaaaagtgtttctctgttgatgaaatagtgcaaccagatccacccattgccctcaactggactttactgaacgtcagtttaactgggattcatgcagatatccaagtgagatgggaagcaccacgcaatgcagatattcagaaaggatggatggttctggagtatgaacttcaatacaaagaagtaaatgaaactaaatggaaaatgatggaccctatattgacaacatcagttccagtgtactcattgaaagtggataaggaatatgaagtgcgtgtgagatccaaacaacgaaactctggaaattatggcgagttcagtgaggtgctctatgtaacacttcctcagatgagccaatttacatgtgaagaagatttctactttccatggctcttaattattatctttggaatatttgggctaacagtgatgctatttgtattcttattttctaaacagcaaaggattaaaatgctgattctgcccccagttccagttccaaagattaaaggaatcgatccagatctcctcaaggaaggaaaattagaggaggtgaacacaatcttagccattcatgatagctataaacccgaattccacagtgatgactcttgggttgaatttattgagctagatattgatgagccagatgaaaagactgaggaatcagacacagacagacttctaagcagtgaccatgagaaatcacatagtaacctaggggtgaaggatggcgactctggacgtaccagctgttgtgaacctgacattctggagactgatttcaatgccaatgacatacatgagggtacctcagaggttgctcagccacagaggttaaaaggggaagcagatctcttatgccttgaccagaagaatcaaaataactcaccttatcatgatgcttgccctgctactcagcagcccagtgttatccaagcagagaaaaacaaaccacaaccacttcctactgaaggagctgagtcaactcaccaagctgcccatattcagctaagcaatccaagttcactgtcaaacatcgacttttatgcccaggtgagcgacattacaccagcaggtagtgtggtcctttccccgggccaaaagaataaggcagggatgtcccaatgtgacatgcacccggaaatggtctcactctgccaagaaaacttccttatggacaatgcctacttctgtgaggcagatgccaaaaagtgcatccctgtggctcctcacatcaaggttgaatcacacatacagccaagcttaaaccaagaggacatttacatcaccacagaaagccttaccactgctgctgggaggcctgggacaggagaacatgttccaggttctgagatgcctgtcccagactatacctccattcatatagtacagtccccacagggcctcatactcaatgcgactgccttgcccttgcctgacaaagagtttctctcatcatgtggctatgtgagcacagaccaactgaacaaaatcatgccttagcctttctttggtttcccaagagctacgtatttaatagcaaagaattgactggggcaataacgtttaagccaaaacaatgtttaaaccttttttgggggagtgacaggatggggtatggattctaaaatgccttttcccaaaatgttgaaatatgatgttaaaaaaataagaagaatgcttaatcagatagatattcctattgtgcaatgtaaatattttaaagaattgtgtcagactgtttagtagcagtgattgtcttaatattgtgggtgttaatttttgatactaagcattgaatggctatgtttttaatgtatagtaaatcacgctttttgaaaaagcgaaaaaatcaggtggcttttgcggttcaggaaaattgaatgcaaaccatagcacaggctaattttttgttgtttcttaaataagaaacttttttatttaaaaaactaaaaactagaggtgagaaatttaaactataagcaagaaggcaaaaatagtttggatatgtaaaacatttattttgacataaagttgataaagattttttaataatttagacttcaagcatggctattttatattacactacacactgtgtactgcagttggtatgacccctctaaggagtgtagcaactacagtctaaagctggtttaatgttttggccaatgcacctaaagaaaaacaaactcgttttttacaaagcccttttatacctccccagactccttcaacaattctaaaatgattgtagtaatctgcattattggaatataattgttttatctgaatttttaaacaagtatttgttaatttagaaaactttaaagcgtttgcacagatcaacttaccaggcaccaaaagaagtaaaagcaaaaaagaaaacctttcttcaccaaatcttggttgatgccaaaaaaaaatacatgctaagagaagtagaaatcatagctggttcacactgaccaagatacttaagtgctgcaattgcacgcggagtgagttttttagtgcgtgcagatggtgagagataagatctatagcctctgcagcggaatctgttcacacccaacttggttttgctacataattatccaggaagggaataaggtacaagaagcattttgtaagttgaagcaaatcgaatgaaattaactgggtaatgaaacaaagagttcaagaaataagtttttgtttcacagcctataaccagacacatactcatttttcatgataatgaacagaacatagacagaagaaacaaggttttcagtccccacagataactgaaaattatttaaaccgctaaaagaaactttctttctcactaaatcttttataggatttatttaaaatagcaaaagaagaagtttcatcattttttacttcctctctgagtggactggcctcaaagcaagcattcagaagaaaaagaagcaacctcagtaatttagaaatcattttgcaatcccttaatatcctaaacatcattcatttttgttgttgttgttgttgttgagacagagtctcgctctgtcgccaggctagagtgcggtggcgcgatcttgactcactgcaatctccacctcccacaggttcaggcgattcccgtgcctcagcctcctgagtagctgggactacaggcacgcaccaccatgccaggctaatttttttgtattttagcagagacggggtttcaccatgttggccaggatggtctcgatctcctgacctcgtgatccacccgactcggcctcccaaagtgctgggattacaggtgtaagccaccgtgcccagccctaaacatcattcttgagagcattgggatatctcctgaaaaggtttatgaaaaagaagaatctcatctcagtgaagaatacttctcattttttaaaaaagcttaaaactttgaagttagctttaacttaaatagtatttcccatttatcgcagaccttttttaggaagcaagcttaatggctgataattttaaattctctctcttgcaggaaggactatgaaaagctagaattgagtgtttaaagttcaacatgttatttgtaatagatgtttgatagattttctgctactttgctgctatggttttctccaagagctacataatttagtttcatataaagtatcatcagtgtagaacctaattcaattcaaagctgtgtgtttggaagactatcttactatttcacaacagcctgacaacatttctatagccaaaaatagctaaatacctcaatcagtctcagaatgtcattttggtactttggtggccacataagccattattcactagtatgactagttgtgtctggcagtttatatttaactctctttatgtctgtggattttttccttcaaagtttaataaatttattttcttggattcctgatagtgtgcttctgttatcaaacaccaacataaaaatgatctaaacca

SEQ ID NO: 8396 - DNA, 4316 bp, Homo sapiens
  source 1..4316: mol_type = unassigned DNA
gtcctacaggtatggatctctggcagctgctgttgaccttggcactggcaggatcaagtgatgctttttctggaagtgaggattcttctaaggagcctaaattcaccaagtgccgttcacctgagcgagagactttttcatgccactggacagatgaggttcatcatggtacaaagaacctaggacccatacagctgttctataccagaaggaacactcaagaatggactcaagaatggaaagaatgccctgattatgtttctgctggggaaaacagctgttactttaattcatcgtttacctccatctggataccttattgtatcaagctaactagcaatggtggtacagtggatgaaaagtgtttctctgttgatgaaatagtgcaaccagatccacccattgccctcaactggactttactgaacgtcagtttaactgggattcatgcagatatccaagtgagatgggaagcaccacgcaatgcagatattcagaaaggatggatggttctggagtatgaacttcaatacaaagaagtaaatgaaactaaatggaaaatgatggaccctatattgacaacatcagttccagtgtactcattgaaagtggataaggaatatgaagtgcgtgtgagatccaaacaacgaaactctggaaattatggcgagttcagtgaggtgctctatgtaacacttcctcagatgagccaatttacatgtgaagaagatttctactttccatggctcttaattattatctttggaatatttgggctaacagtgatgctatttgtattcttattttctaaacagcaaaggattaaaatgctgattctgcccccagttccagttccaaagattaaaggaatcgatccagatctcctcaaggaaggaaaattagaggaggtgaacacaatcttagccattcatgatagctataaacccgaattccacagtgatgactcttgggttgaatttattgagctagatattgatgagccagatgaaaagactgaggaatcagacacagacagacttctaagcagtgaccatgagaaatcacatagtaacctaggggtgaaggatggcgactctggacgtaccagctgttgtgaacctgacattctggagactgatttcaatgccaatgacatacatgagggtacctcagaggttgctcagccacagaggttaaaaggggaagcagatctcttatgccttgaccagaagaatcaaaataactcaccttatcatgatgcttgccctgctactcagcagcccagtgttatccaagcagagaaaaacaaaccacaaccacttcctactgaaggagctgagtcaactcaccaagctgcccatattcagctaagcaatccaagttcactgtcaaacatcgacttttatgcccaggtgagcgacattacaccagcaggtagtgtggtcctttccccgggccaaaagaataaggcagggatgtcccaatgtgacatgcacccggaaatggtctcactctgccaagaaaacttccttatggacaatgcctacttctgtgaggcagatgccaaaaagtgcatccctgtggctcctcacatcaaggttgaatcacacatacagccaagcttaaaccaagaggacatttacatcaccacagaaagccttaccactgctgctgggaggcctgggacaggagaacatgttccaggttctgagatgcctgtcccagactatacctccattcatatagtacagtccccacagggcctcatactcaatgcgactgccttgcccttgcctgacaaagagtttctctcatcatgtggctatgtgagcacagaccaactgaacaaaatcatgccttagcctttctttggtttcccaagagctacgtatttaatagcaaagaattgactggggcaataacgtttaagccaaaacaatgtttaaaccttttttgggggagtgacaggatggggtatggattctaaaatgccttttcccaaaatgttgaaatatgatgttaaaaaaataagaagaatgcttaatcagatagatattcctattgtgcaatgtaaatattttaaagaattgtgtcagactgtttagtagcagtgattgtcttaatattgtgggtgttaatttttgatactaagcattgaatggctatgtttttaatgtatagtaaatcacgctttttgaaaaagcgaaaaaatcaggtggcttttgcggttcaggaaaattgaatgcaaaccatagcacaggctaattttttgttgtttcttaaataagaaacttttttatttaaaaaactaaaaactagaggtgagaaatttaaactataagcaagaaggcaaaaatagtttggatatgtaaaacatttattttgacataaagttgataaagattttttaataatttagacttcaagcatggctattttatattacactacacactgtgtactgcagttggtatgacccctctaaggagtgtagcaactacagtctaaagctggtttaatgttttggccaatgcacctaaagaaaaacaaactcgttttttacaaagcccttttatacctccccagactccttcaacaattctaaaatgattgtagtaatctgcattattggaatataattgttttatctgaatttttaaacaagtatttgttaatttagaaaactttaaagcgtttgcacagatcaacttaccaggcaccaaaagaagtaaaagcaaaaaagaaaacctttcttcaccaaatcttggttgatgccaaaaaaaaatacatgctaagagaagtagaaatcatagctggttcacactgaccaagatacttaagtgctgcaattgcacgcggagtgagttttttagtgcgtgcagatggtgagagataagatctatagcctctgcagcggaatctgttcacacccaacttggttttgctacataattatccaggaagggaataaggtacaagaagcattttgtaagttgaagcaaatcgaatgaaattaactgggtaatgaaacaaagagttcaagaaataagtttttgtttcacagcctataaccagacacatactcatttttcatgataatgaacagaacatagacagaagaaacaaggttttcagtccccacagataactgaaaattatttaaaccgctaaaagaaactttctttctcactaaatcttttataggatttatttaaaatagcaaaagaagaagtttcatcattttttacttcctctctgagtggactggcctcaaagcaagcattcagaagaaaaagaagcaacctcagtaatttagaaatcattttgcaatcccttaatatcctaaacatcattcatttttgttgttgttgttgttgttgagacagagtctcgctctgtcgccaggctagagtgcggtggcgcgatcttgactcactgcaatctccacctcccacaggttcaggcgattcccgtgcctcagcctcctgagtagctgggactacaggcacgcaccaccatgccaggctaatttttttgtattttagcagagacggggtttcaccatgttggccaggatggtctcgatctcctgacctcgtgatccacccgactcggcctcccaaagtgctgggattacaggtgtaagccaccgtgcccagccctaaacatcattcttgagagcattgggatatctcctgaaaaggtttatgaaaaagaagaatctcatctcagtgaagaatacttctcattttttaaaaaagcttaaaactttgaagttagctttaacttaaatagtatttcccatttatcgcagaccttttttaggaagcaagcttaatggctgataattttaaattctctctcttgcaggaaggactatgaaaagctagaattgagtgtttaaagttcaacatgttatttgtaatagatgtttgatagattttctgctactttgctgctatggttttctccaagagctacataatttagtttcatataaagtatcatcagtgtagaacctaattcaattcaaagctgtgtgtttggaagactatcttactatttcacaacagcctgacaacatttctatagccaaaaatagctaaatacctcaatcagtctcagaatgtcattttggtactttggtggccacataagccattattcactagtatgactagttgtgtctggcagtttatatttaactctctttatgtctgtggattttttccttcaaagtttaataaatttattttcttggattcctgatagtgtgcttctgttatcaaacaccaacataaaaatgatctaaacca

SEQ ID NO: 8397 - DNA, 4419 bp, Homo sapiens
  source 1..4419: mol_type = unassigned DNA
caatgatattagctatgacagcacgtatgagcctggggtcctacaggtatggatctctggcagctgctgttgaccttggcactggcaggatcaagtgatgctttttctggaagtgaggccacagcagctatccttagcagagcaccctggagtctgcaaagtgttaatccaggcctaaagacaaattcttctaaggagcctaaattcaccaagtgccgttcacctgagcgagagactttttcatgccactggacagatgaggttcatcatggtacaaagaacctaggacccatacagctgttctataccagaaggaacactcaagaatggactcaagaatggaaagaatgccctgattatgtttctgctggggaaaacagctgttactttaattcatcgtttacctccatctggataccttattgtatcaagctaactagcaatggtggtacagtggatgaaaagtgtttctctgttgatgaaatagtgcaaccagatccacccattgccctcaactggactttactgaacgtcagtttaactgggattcatgcagatatccaagtgagatgggaagcaccacgcaatgcagatattcagaaaggatggatggttctggagtatgaacttcaatacaaagaagtaaatgaaactaaatggaaaatgatggaccctatattgacaacatcagttccagtgtactcattgaaagtggataaggaatatgaagtgcgtgtgagatccaaacaacgaaactctggaaattatggcgagttcagtgaggtgctctatgtaacacttcctcagatgagccaatttacatgtgaagaagatttctactttccatggctcttaattattatctttggaatatttgggctaacagtgatgctatttgtattcttattttctaaacagcaaaggattaaaatgctgattctgcccccagttccagttccaaagattaaaggaatcgatccagatctcctcaaggaaggaaaattagaggaggtgaacacaatcttagccattcatgatagctataaacccgaattccacagtgatgactcttgggttgaatttattgagctagatattgatgagccagatgaaaagactgaggaatcagacacagacagacttctaagcagtgaccatgagaaatcacatagtaacctaggggtgaaggatggcgactctggacgtaccagctgttgtgaacctgacattctggagactgatttcaatgccaatgacatacatgagggtacctcagaggttgctcagccacagaggttaaaaggggaagcagatctcttatgccttgaccagaagaatcaaaataactcaccttatcatgatgcttgccctgctactcagcagcccagtgttatccaagcagagaaaaacaaaccacaaccacttcctactgaaggagctgagtcaactcaccaagctgcccatattcagctaagcaatccaagttcactgtcaaacatcgacttttatgcccaggtgagcgacattacaccagcaggtagtgtggtcctttccccgggccaaaagaataaggcagggatgtcccaatgtgacatgcacccggaaatggtctcactctgccaagaaaacttccttatggacaatgcctacttctgtgaggcagatgccaaaaagtgcatccctgtggctcctcacatcaaggttgaatcacacatacagccaagcttaaaccaagaggacatttacatcaccacagaaagccttaccactgctgctgggaggcctgggacaggagaacatgttccaggttctgagatgcctgtcccagactatacctccattcatatagtacagtccccacagggcctcatactcaatgcgactgccttgcccttgcctgacaaagagtttctctcatcatgtggctatgtgagcacagaccaactgaacaaaatcatgccttagcctttctttggtttcccaagagctacgtatttaatagcaaagaattgactggggcaataacgtttaagccaaaacaatgtttaaaccttttttgggggagtgacaggatggggtatggattctaaaatgccttttcccaaaatgttgaaatatgatgttaaaaaaataagaagaatgcttaatcagatagatattcctattgtgcaatgtaaatattttaaagaattgtgtcagactgtttagtagcagtgattgtcttaatattgtgggtgttaatttttgatactaagcattgaatggctatgtttttaatgtatagtaaatcacgctttttgaaaaagcgaaaaaatcaggtggcttttgcggttcaggaaaattgaatgcaaaccatagcacaggctaattttttgttgtttcttaaataagaaacttttttatttaaaaaactaaaaactagaggtgagaaatttaaactataagcaagaaggcaaaaatagtttggatatgtaaaacatttattttgacataaagttgataaagattttttaataatttagacttcaagcatggctattttatattacactacacactgtgtactgcagttggtatgacccctctaaggagtgtagcaactacagtctaaagctggtttaatgttttggccaatgcacctaaagaaaaacaaactcgttttttacaaagcccttttatacctccccagactccttcaacaattctaaaatgattgtagtaatctgcattattggaatataattgttttatctgaatttttaaacaagtatttgttaatttagaaaactttaaagcgtttgcacagatcaacttaccaggcaccaaaagaagtaaaagcaaaaaagaaaacctttcttcaccaaatcttggttgatgccaaaaaaaaatacatgctaagagaagtagaaatcatagctggttcacactgaccaagatacttaagtgctgcaattgcacgcggagtgagttttttagtgcgtgcagatggtgagagataagatctatagcctctgcagcggaatctgttcacacccaacttggttttgctacataattatccaggaagggaataaggtacaagaagcattttgtaagttgaagcaaatcgaatgaaattaactgggtaatgaaacaaagagttcaagaaataagtttttgtttcacagcctataaccagacacatactcatttttcatgataatgaacagaacatagacagaagaaacaaggttttcagtccccacagataactgaaaattatttaaaccgctaaaagaaactttctttctcactaaatcttttataggatttatttaaaatagcaaaagaagaagtttcatcattttttacttcctctctgagtggactggcctcaaagcaagcattcagaagaaaaagaagcaacctcagtaatttagaaatcattttgcaatcccttaatatcctaaacatcattcatttttgttgttgttgttgttgttgagacagagtctcgctctgtcgccaggctagagtgcggtggcgcgatcttgactcactgcaatctccacctcccacaggttcaggcgattcccgtgcctcagcctcctgagtagctgggactacaggcacgcaccaccatgccaggctaatttttttgtattttagcagagacggggtttcaccatgttggccaggatggtctcgatctcctgacctcgtgatccacccgactcggcctcccaaagtgctgggattacaggtgtaagccaccgtgcccagccctaaacatcattcttgagagcattgggatatctcctgaaaaggtttatgaaaaagaagaatctcatctcagtgaagaatacttctcattttttaaaaaagcttaaaactttgaagttagctttaacttaaatagtatttcccatttatcgcagaccttttttaggaagcaagcttaatggctgataattttaaattctctctcttgcaggaaggactatgaaaagctagaattgagtgtttaaagttcaacatgttatttgtaatagatgtttgatagattttctgctactttgctgctatggttttctccaagagctacataatttagtttcatataaagtatcatcagtgtagaacctaattcaattcaaagctgtgtgtttggaagactatcttactatttcacaacagcctgacaacatttctatagccaaaaatagctaaatacctcaatcagtctcagaatgtcattttggtactttggtggccacataagccattattcactagtatgactagttgtgtctggcagtttatatttaactctctttatgtctgtggattttttccttcaaagtttaataaatttattttcttggattcctgatagtgtgcttctgttatcaaacaccaacataaaaatgatctaaacca

SEQ ID NO: 8398 - DNA, 4699 bp, Homo sapiens
  source 1..4699: mol_type = unassigned DNA
agatatgtgtgtgtgtgcatgagagagagagattgagaatgactgatttgggagggattttgtgaaggtttatatatcaaagcagaaagaccaagaatttagagattaatacatgccaagtggtaaccaagaaacttctgtgggatcccacctccaacccctccctctctgtcagattttaaccaaatcagtgtgatgtgatctgcttgcatatatgagtgaaagaaaaaggaaatttaaaaagttcttgatataaagcctggaggaaacaatacgaaaatccagcctctatttcagcaatatctgccggactattggtcctacaggtatggatctctggcagctgctgttgaccttggcactggcaggatcaagtgatgctttttctggaagtgaggccacagcagctatccttagcagagcaccctggagtctgcaaagtgttaatccaggcctaaagacaaattcttctaaggagcctaaattcaccaagtgccgttcacctgagcgagagactttttcatgccactggacagatgaggttcatcatggtacaaagaacctaggacccatacagctgttctataccagaaggaacactcaagaatggactcaagaatggaaagaatgccctgattatgtttctgctggggaaaacagctgttactttaattcatcgtttacctccatctggataccttattgtatcaagctaactagcaatggtggtacagtggatgaaaagtgtttctctgttgatgaaatagtgcaaccagatccacccattgccctcaactggactttactgaacgtcagtttaactgggattcatgcagatatccaagtgagatgggaagcaccacgcaatgcagatattcagaaaggatggatggttctggagtatgaacttcaatacaaagaagtaaatgaaactaaatggaaaatgatggaccctatattgacaacatcagttccagtgtactcattgaaagtggataaggaatatgaagtgcgtgtgagatccaaacaacgaaactctggaaattatggcgagttcagtgaggtgctctatgtaacacttcctcagatgagccaatttacatgtgaagaagatttctactttccatggctcttaattattatctttggaatatttgggctaacagtgatgctatttgtattcttattttctaaacagcaaaggattaaaatgctgattctgcccccagttccagttccaaagattaaaggaatcgatccagatctcctcaaggaaggaaaattagaggaggtgaacacaatcttagccattcatgatagctataaacccgaattccacagtgatgactcttgggttgaatttattgagctagatattgatgagccagatgaaaagactgaggaatcagacacagacagacttctaagcagtgaccatgagaaatcacatagtaacctaggggtgaaggatggcgactctggacgtaccagctgttgtgaacctgacattctggagactgatttcaatgccaatgacatacatgagggtacctcagaggttgctcagccacagaggttaaaaggggaagcagatctcttatgccttgaccagaagaatcaaaataactcaccttatcatgatgcttgccctgctactcagcagcccagtgttatccaagcagagaaaaacaaaccacaaccacttcctactgaaggagctgagtcaactcaccaagctgcccatattcagctaagcaatccaagttcactgtcaaacatcgacttttatgcccaggtgagcgacattacaccagcaggtagtgtggtcctttccccgggccaaaagaataaggcagggatgtcccaatgtgacatgcacccggaaatggtctcactctgccaagaaaacttccttatggacaatgcctacttctgtgaggcagatgccaaaaagtgcatccctgtggctcctcacatcaaggttgaatcacacatacagccaagcttaaaccaagaggacatttacatcaccacagaaagccttaccactgctgctgggaggcctgggacaggagaacatgttccaggttctgagatgcctgtcccagactatacctccattcatatagtacagtccccacagggcctcatactcaatgcgactgccttgcccttgcctgacaaagagtttctctcatcatgtggctatgtgagcacagaccaactgaacaaaatcatgccttagcctttctttggtttcccaagagctacgtatttaatagcaaagaattgactggggcaataacgtttaagccaaaacaatgtttaaaccttttttgggggagtgacaggatggggtatggattctaaaatgccttttcccaaaatgttgaaatatgatgttaaaaaaataagaagaatgcttaatcagatagatattcctattgtgcaatgtaaatattttaaagaattgtgtcagactgtttagtagcagtgattgtcttaatattgtgggtgttaatttttgatactaagcattgaatggctatgtttttaatgtatagtaaatcacgctttttgaaaaagcgaaaaaatcaggtggcttttgcggttcaggaaaattgaatgcaaaccatagcacaggctaattttttgttgtttcttaaataagaaacttttttatttaaaaaactaaaaactagaggtgagaaatttaaactataagcaagaaggcaaaaatagtttggatatgtaaaacatttattttgacataaagttgataaagattttttaataatttagacttcaagcatggctattttatattacactacacactgtgtactgcagttggtatgacccctctaaggagtgtagcaactacagtctaaagctggtttaatgttttggccaatgcacctaaagaaaaacaaactcgttttttacaaagcccttttatacctccccagactccttcaacaattctaaaatgattgtagtaatctgcattattggaatataattgttttatctgaatttttaaacaagtatttgttaatttagaaaactttaaagcgtttgcacagatcaacttaccaggcaccaaaagaagtaaaagcaaaaaagaaaacctttcttcaccaaatcttggttgatgccaaaaaaaaatacatgctaagagaagtagaaatcatagctggttcacactgaccaagatacttaagtgctgcaattgcacgcggagtgagttttttagtgcgtgcagatggtgagagataagatctatagcctctgcagcggaatctgttcacacccaacttggttttgctacataattatccaggaagggaataaggtacaagaagcattttgtaagttgaagcaaatcgaatgaaattaactgggtaatgaaacaaagagttcaagaaataagtttttgtttcacagcctataaccagacacatactcatttttcatgataatgaacagaacatagacagaagaaacaaggttttcagtccccacagataactgaaaattatttaaaccgctaaaagaaactttctttctcactaaatcttttataggatttatttaaaatagcaaaagaagaagtttcatcattttttacttcctctctgagtggactggcctcaaagcaagcattcagaagaaaaagaagcaacctcagtaatttagaaatcattttgcaatcccttaatatcctaaacatcattcatttttgttgttgttgttgttgttgagacagagtctcgctctgtcgccaggctagagtgcggtggcgcgatcttgactcactgcaatctccacctcccacaggttcaggcgattcccgtgcctcagcctcctgagtagctgggactacaggcacgcaccaccatgccaggctaatttttttgtattttagcagagacggggtttcaccatgttggccaggatggtctcgatctcctgacctcgtgatccacccgactcggcctcccaaagtgctgggattacaggtgtaagccaccgtgcccagccctaaacatcattcttgagagcattgggatatctcctgaaaaggtttatgaaaaagaagaatctcatctcagtgaagaatacttctcattttttaaaaaagcttaaaactttgaagttagctttaacttaaatagtatttcccatttatcgcagaccttttttaggaagcaagcttaatggctgataattttaaattctctctcttgcaggaaggactatgaaaagctagaattgagtgtttaaagttcaacatgttatttgtaatagatgtttgatagattttctgctactttgctgctatggttttctccaagagctacataatttagtttcatataaagtatcatcagtgtagaacctaattcaattcaaagctgtgtgtttggaagactatcttactatttcacaacagcctgacaacatttctatagccaaaaatagctaaatacctcaatcagtctcagaatgtcattttggtactttggtggccacataagccattattcactagtatgactagttgtgtctggcagtttatatttaactctctttatgtctgtggattttttccttcaaagtttaataaatttattttcttggattcctgatagtgtgcttctgttatcaaacaccaacataaaaatgatctaaacca

SEQ ID NO: 8399 - DNA, 4312 bp, Homo sapiens
  source 1..4312: mol_type = unassigned DNA
gtcctacaggtatggatctctggcagctgctgttgaccttggcactggcaggatcaagtgatgctttttctggaagtgaggccacagcagctatccttagcagagcaccctggagtctgcaaagtgttaatccaggcctaaagacaaattcttctaaggagcctaaattcaccaagtgccgttcacctgagcgagagactttttcatgccactggacagatgaggttcatcatggtacaaagaacctaggacccatacagctgttctataccagaaggaacactcaagaatggactcaagaatggaaagaatgccctgattatgtttctgctggggaaaacagctgttactttaattcatcgtttacctccatctggataccttattgtatcaagctaactagcaatggtggtacagtggatgaaaagtgtttctctgttgatgaaatagtgcaaccagatccacccattgccctcaactggactttactgaacgtcagtttaactgggattcatgcagatatccaagtgagatgggaagcaccacgcaatgcagatattcagaaaggatggatggttctggagtatgaacttcaatacaaagaagtaaatgaaactaaatggaaaatgatggaccctatattgacaacatcagttccagtgtactcattgaaagtggataaggaatatgaagtgcgtgtgagatccaaacaacgaaactctggaaattatggcgagttcagtgaggtgctctatgtaacacttcctcagatgagccaatttacatgtgaagaagatttctactttccatggctcttaattattatctttggaatatttgggctaacagtgatgctatttgtattcttattttctaaacagcaaaggaaggaaaattagaggaggtgaacacaatcttagccattcatgatagctataaacccgaattccacagtgatgactcttgggttgaatttattgagctagatattgatgagccagatgaaaagactgaggaatcagacacagacagacttctaagcagtgaccatgagaaatcacatagtaacctaggggtgaaggatggcgactctggacgtaccagctgttgtgaacctgacattctggagactgatttcaatgccaatgacatacatgagggtacctcagaggttgctcagccacagaggttaaaaggggaagcagatctcttatgccttgaccagaagaatcaaaataactcaccttatcatgatgcttgccctgctactcagcagcccagtgttatccaagcagagaaaaacaaaccacaaccacttcctactgaaggagctgagtcaactcaccaagctgcccatattcagctaagcaatccaagttcactgtcaaacatcgacttttatgcccaggtgagcgacattacaccagcaggtagtgtggtcctttccccgggccaaaagaataaggcagggatgtcccaatgtgacatgcacccggaaatggtctcactctgccaagaaaacttccttatggacaatgcctacttctgtgaggcagatgccaaaaagtgcatccctgtggctcctcacatcaaggttgaatcacacatacagccaagcttaaaccaagaggacatttacatcaccacagaaagccttaccactgctgctgggaggcctgggacaggagaacatgttccaggttctgagatgcctgtcccagactatacctccattcatatagtacagtccccacagggcctcatactcaatgcgactgccttgcccttgcctgacaaagagtttctctcatcatgtggctatgtgagcacagaccaactgaacaaaatcatgccttagcctttctttggtttcccaagagctacgtatttaatagcaaagaattgactggggcaataacgtttaagccaaaacaatgtttaaaccttttttgggggagtgacaggatggggtatggattctaaaatgccttttcccaaaatgttgaaatatgatgttaaaaaaataagaagaatgcttaatcagatagatattcctattgtgcaatgtaaatattttaaagaattgtgtcagactgtttagtagcagtgattgtcttaatattgtgggtgttaatttttgatactaagcattgaatggctatgtttttaatgtatagtaaatcacgctttttgaaaaagcgaaaaaatcaggtggcttttgcggttcaggaaaattgaatgcaaaccatagcacaggctaattttttgttgtttcttaaataagaaacttttttatttaaaaaactaaaaactagaggtgagaaatttaaactataagcaagaaggcaaaaatagtttggatatgtaaaacatttattttgacataaagttgataaagattttttaataatttagacttcaagcatggctattttatattacactacacactgtgtactgcagttggtatgacccctctaaggagtgtagcaactacagtctaaagctggtttaatgttttggccaatgcacctaaagaaaaacaaactcgttttttacaaagcccttttatacctccccagactccttcaacaattctaaaatgattgtagtaatctgcattattggaatataattgttttatctgaatttttaaacaagtatttgttaatttagaaaactttaaagcgtttgcacagatcaacttaccaggcaccaaaagaagtaaaagcaaaaaagaaaacctttcttcaccaaatcttggttgatgccaaaaaaaaatacatgctaagagaagtagaaatcatagctggttcacactgaccaagatacttaagtgctgcaattgcacgcggagtgagttttttagtgcgtgcagatggtgagagataagatctatagcctctgcagcggaatctgttcacacccaacttggttttgctacataattatccaggaagggaataaggtacaagaagcattttgtaagttgaagcaaatcgaatgaaattaactgggtaatgaaacaaagagttcaagaaataagtttttgtttcacagcctataaccagacacatactcatttttcatgataatgaacagaacatagacagaagaaacaaggttttcagtccccacagataactgaaaattatttaaaccgctaaaagaaactttctttctcactaaatcttttataggatttatttaaaatagcaaaagaagaagtttcatcattttttacttcctctctgagtggactggcctcaaagcaagcattcagaagaaaaagaagcaacctcagtaatttagaaatcattttgcaatcccttaatatcctaaacatcattcatttttgttgttgttgttgttgttgagacagagtctcgctctgtcgccaggctagagtgcggtggcgcgatcttgactcactgcaatctccacctcccacaggttcaggcgattcccgtgcctcagcctcctgagtagctgggactacaggcacgcaccaccatgccaggctaatttttttgtattttagcagagacggggtttcaccatgttggccaggatggtctcgatctcctgacctcgtgatccacccgactcggcctcccaaagtgctgggattacaggtgtaagccaccgtgcccagccctaaacatcattcttgagagcattgggatatctcctgaaaaggtttatgaaaaagaagaatctcatctcagtgaagaatacttctcattttttaaaaaagcttaaaactttgaagttagctttaacttaaatagtatttcccatttatcgcagaccttttttaggaagcaagcttaatggctgataattttaaattctctctcttgcaggaaggactatgaaaagctagaattgagtgtttaaagttcaacatgttatttgtaatagatgtttgatagattttctgctactttgctgctatggttttctccaagagctacataatttagtttcatataaagtatcatcagtgtagaacctaattcaattcaaagctgtgtgtttggaagactatcttactatttcacaacagcctgacaacatttctatagccaaaaatagctaaatacctcaatcagtctcagaatgtcattttggtactttggtggccacataagccattattcactagtatgactagttgtgtctggcagtttatatttaactctctttatgtctgtggattttttccttcaaagtttaataaatttattttcttggattcctgatagtgtgcttctgttatcaaacaccaacataaaaatgatctaaacca

SEQ ID NO: 8400 - DNA, 4529 bp, Homo sapiens
  source 1..4529: mol_type = unassigned DNA
ggagagactggggaggtcgagctgtgcgcgtggacacagcgcgcagagcgcgcggtcttttgcgcgtttgtgcgggccgcagccgcacgttggcaccgatggaactggggtcagtagagtgacagccaccagtccgcatgaactggggtcctacaggtatggatctctggcagctgctgttgaccttggcactggcaggatcaagtgatgctttttctggaagtgaggccacagcagctatccttagcagagcaccctggagtctgcaaagtgttaatccaggcctaaagacaaattcttctaaggagcctaaattcaccaagtgccgttcacctgagcgagagactttttcatgccactggacagatgaggttcatcatggtacaaagaacctaggacccatacagctgttctataccagaaggaacactcaagaatggactcaagaatggaaagaatgccctgattatgtttctgctggggaaaacagctgttactttaattcatcgtttacctccatctggataccttattgtatcaagctaactagcaatggtggtacagtggatgaaaagtgtttctctgttgatgaaatagtgcaaccagatccacccattgccctcaactggactttactgaacgtcagtttaactgggattcatgcagatatccaagtgagatgggaagcaccacgcaatgcagatattcagaaaggatggatggttctggagtatgaacttcaatacaaagaagtaaatgaaactaaatggaaaatgatggaccctatattgacaacatcagttccagtgtactcattgaaagtggataaggaatatgaagtgcgtgtgagatccaaacaacgaaactctggaaattatggcgagttcagtgaggtgctctatgtaacacttcctcagatgagccaatttacatgtgaagaagatttctactttccatggctcttaattattatctttggaatatttgggctaacagtgatgctatttgtattcttattttctaaacagcaaaggattaaaatgctgattctgcccccagttccagttccaaagattaaaggaatcgatccagatctcctcaaggaaggaaaattagaggaggtgaacacaatcttagccattcatgatagctataaacccgaattccacagtgatgactcttgggttgaatttattgagctagatattgatgagccagatgaaaagactgaggaatcagacacagacagacttctaagcagtgaccatgagaaatcacatagtaacctaggggtgaaggatggcgactctggacgtaccagctgttgtgaacctgacattctggagactgatttcaatgccaatgacatacatgagggtacctcagaggttgctcagccacagaggttaaaaggggaagcagatctcttatgccttgaccagaagaatcaaaataactcaccttatcatgatgcttgccctgctactcagcagcccagtgttatccaagcagagaaaaacaaaccacaaccacttcctactgaaggagctgagtcaactcaccaagctgcccatattcagctaagcaatccaagttcactgtcaaacatcgacttttatgcccaggtgagcgacattacaccagcaggtagtgtggtcctttccccgggccaaaagaataaggcagggatgtcccaatgtgacatgcacccggaaatggtctcactctgccaagaaaacttccttatggacaatgcctacttctgtgaggcagatgccaaaaagtgcatccctgtggctcctcacatcaaggttgaatcacacatacagccaagcttaaaccaagaggacatttacatcaccacagaaagccttaccactgctgctgggaggcctgggacaggagaacatgttccaggttctgagatgcctgtcccagactatacctccattcatatagtacagtccccacagggcctcatactcaatgcgactgccttgcccttgcctgacaaagagtttctctcatcatgtggctatgtgagcacagaccaactgaacaaaatcatgccttagcctttctttggtttcccaagagctacgtatttaatagcaaagaattgactggggcaataacgtttaagccaaaacaatgtttaaaccttttttgggggagtgacaggatggggtatggattctaaaatgccttttcccaaaatgttgaaatatgatgttaaaaaaataagaagaatgcttaatcagatagatattcctattgtgcaatgtaaatattttaaagaattgtgtcagactgtttagtagcagtgattgtcttaatattgtgggtgttaatttttgatactaagcattgaatggctatgtttttaatgtatagtaaatcacgctttttgaaaaagcgaaaaaatcaggtggcttttgcggttcaggaaaattgaatgcaaaccatagcacaggctaattttttgttgtttcttaaataagaaacttttttatttaaaaaactaaaaactagaggtgagaaatttaaactataagcaagaaggcaaaaatagtttggatatgtaaaacatttattttgacataaagttgataaagattttttaataatttagacttcaagcatggctattttatattacactacacactgtgtactgcagttggtatgacccctctaaggagtgtagcaactacagtctaaagctggtttaatgttttggccaatgcacctaaagaaaaacaaactcgttttttacaaagcccttttatacctccccagactccttcaacaattctaaaatgattgtagtaatctgcattattggaatataattgttttatctgaatttttaaacaagtatttgttaatttagaaaactttaaagcgtttgcacagatcaacttaccaggcaccaaaagaagtaaaagcaaaaaagaaaacctttcttcaccaaatcttggttgatgccaaaaaaaaatacatgctaagagaagtagaaatcatagctggttcacactgaccaagatacttaagtgctgcaattgcacgcggagtgagttttttagtgcgtgcagatggtgagagataagatctatagcctctgcagcggaatctgttcacacccaacttggttttgctacataattatccaggaagggaataaggtacaagaagcattttgtaagttgaagcaaatcgaatgaaattaactgggtaatgaaacaaagagttcaagaaataagtttttgtttcacagcctataaccagacacatactcatttttcatgataatgaacagaacatagacagaagaaacaaggttttcagtccccacagataactgaaaattatttaaaccgctaaaagaaactttctttctcactaaatcttttataggatttatttaaaatagcaaaagaagaagtttcatcattttttacttcctctctgagtggactggcctcaaagcaagcattcagaagaaaaagaagcaacctcagtaatttagaaatcattttgcaatcccttaatatcctaaacatcattcatttttgttgttgttgttgttgttgagacagagtctcgctctgtcgccaggctagagtgcggtggcgcgatcttgactcactgcaatctccacctcccacaggttcaggcgattcccgtgcctcagcctcctgagtagctgggactacaggcacgcaccaccatgccaggctaatttttttgtattttagcagagacggggtttcaccatgttggccaggatggtctcgatctcctgacctcgtgatccacccgactcggcctcccaaagtgctgggattacaggtgtaagccaccgtgcccagccctaaacatcattcttgagagcattgggatatctcctgaaaaggtttatgaaaaagaagaatctcatctcagtgaagaatacttctcattttttaaaaaagcttaaaactttgaagttagctttaacttaaatagtatttcccatttatcgcagaccttttttaggaagcaagcttaatggctgataattttaaattctctctcttgcaggaaggactatgaaaagctagaattgagtgtttaaagttcaacatgttatttgtaatagatgtttgatagattttctgctactttgctgctatggttttctccaagagctacataatttagtttcatataaagtatcatcagtgtagaacctaattcaattcaaagctgtgtgtttggaagactatcttactatttcacaacagcctgacaacatttctatagccaaaaatagctaaatacctcaatcagtctcagaatgtcattttggtactttggtggccacataagccattattcactagtatgactagttgtgtctggcagtttatatttaactctctttatgtctgtggattttttccttcaaagtttaataaatttattttcttggattcctgatagtgtgcttctgttatcaaacaccaacataaaaatgatctaaacca

SEQ ID NO: 8401 - DNA, 4524 bp, Homo sapiens
  source 1..4524: mol_type = unassigned DNA
ggggaatgagtagcaaagatggattaagtgagaagagtataggaggcagcagggccagaggtgtgaatagcccagaaccttctgagaagattcctttgtggacggaagaaaggggaggtttgtggaaatggtggaagataaggtcctacaggtatggatctctggcagctgctgttgaccttggcactggcaggatcaagtgatgctttttctggaagtgaggccacagcagctatccttagcagagcaccctggagtctgcaaagtgttaatccaggcctaaagacaaattcttctaaggagcctaaattcaccaagtgccgttcacctgagcgagagactttttcatgccactggacagatgaggttcatcatggtacaaagaacctaggacccatacagctgttctataccagaaggaacactcaagaatggactcaagaatggaaagaatgccctgattatgtttctgctggggaaaacagctgttactttaattcatcgtttacctccatctggataccttattgtatcaagctaactagcaatggtggtacagtggatgaaaagtgtttctctgttgatgaaatagtgcaaccagatccacccattgccctcaactggactttactgaacgtcagtttaactgggattcatgcagatatccaagtgagatgggaagcaccacgcaatgcagatattcagaaaggatggatggttctggagtatgaacttcaatacaaagaagtaaatgaaactaaatggaaaatgatggaccctatattgacaacatcagttccagtgtactcattgaaagtggataaggaatatgaagtgcgtgtgagatccaaacaacgaaactctggaaattatggcgagttcagtgaggtgctctatgtaacacttcctcagatgagccaatttacatgtgaagaagatttctactttccatggctcttaattattatctttggaatatttgggctaacagtgatgctatttgtattcttattttctaaacagcaaaggattaaaatgctgattctgcccccagttccagttccaaagattaaaggaatcgatccagatctcctcaaggaaggaaaattagaggaggtgaacacaatcttagccattcatgatagctataaacccgaattccacagtgatgactcttgggttgaatttattgagctagatattgatgagccagatgaaaagactgaggaatcagacacagacagacttctaagcagtgaccatgagaaatcacatagtaacctaggggtgaaggatggcgactctggacgtaccagctgttgtgaacctgacattctggagactgatttcaatgccaatgacatacatgagggtacctcagaggttgctcagccacagaggttaaaaggggaagcagatctcttatgccttgaccagaagaatcaaaataactcaccttatcatgatgcttgccctgctactcagcagcccagtgttatccaagcagagaaaaacaaaccacaaccacttcctactgaaggagctgagtcaactcaccaagctgcccatattcagctaagcaatccaagttcactgtcaaacatcgacttttatgcccaggtgagcgacattacaccagcaggtagtgtggtcctttccccgggccaaaagaataaggcagggatgtcccaatgtgacatgcacccggaaatggtctcactctgccaagaaaacttccttatggacaatgcctacttctgtgaggcagatgccaaaaagtgcatccctgtggctcctcacatcaaggttgaatcacacatacagccaagcttaaaccaagaggacatttacatcaccacagaaagccttaccactgctgctgggaggcctgggacaggagaacatgttccaggttctgagatgcctgtcccagactatacctccattcatatagtacagtccccacagggcctcatactcaatgcgactgccttgcccttgcctgacaaagagtttctctcatcatgtggctatgtgagcacagaccaactgaacaaaatcatgccttagcctttctttggtttcccaagagctacgtatttaatagcaaagaattgactggggcaataacgtttaagccaaaacaatgtttaaaccttttttgggggagtgacaggatggggtatggattctaaaatgccttttcccaaaatgttgaaatatgatgttaaaaaaataagaagaatgcttaatcagatagatattcctattgtgcaatgtaaatattttaaagaattgtgtcagactgtttagtagcagtgattgtcttaatattgtgggtgttaatttttgatactaagcattgaatggctatgtttttaatgtatagtaaatcacgctttttgaaaaagcgaaaaaatcaggtggcttttgcggttcaggaaaattgaatgcaaaccatagcacaggctaattttttgttgtttcttaaataagaaacttttttatttaaaaaactaaaaactagaggtgagaaatttaaactataagcaagaaggcaaaaatagtttggatatgtaaaacatttattttgacataaagttgataaagattttttaataatttagacttcaagcatggctattttatattacactacacactgtgtactgcagttggtatgacccctctaaggagtgtagcaactacagtctaaagctggtttaatgttttggccaatgcacctaaagaaaaacaaactcgttttttacaaagcccttttatacctccccagactccttcaacaattctaaaatgattgtagtaatctgcattattggaatataattgttttatctgaatttttaaacaagtatttgttaatttagaaaactttaaagcgtttgcacagatcaacttaccaggcaccaaaagaagtaaaagcaaaaaagaaaacctttcttcaccaaatcttggttgatgccaaaaaaaaatacatgctaagagaagtagaaatcatagctggttcacactgaccaagatacttaagtgctgcaattgcacgcggagtgagttttttagtgcgtgcagatggtgagagataagatctatagcctctgcagcggaatctgttcacacccaacttggttttgctacataattatccaggaagggaataaggtacaagaagcattttgtaagttgaagcaaatcgaatgaaattaactgggtaatgaaacaaagagttcaagaaataagtttttgtttcacagcctataaccagacacatactcatttttcatgataatgaacagaacatagacagaagaaacaaggttttcagtccccacagataactgaaaattatttaaaccgctaaaagaaactttctttctcactaaatcttttataggatttatttaaaatagcaaaagaagaagtttcatcattttttacttcctctctgagtggactggcctcaaagcaagcattcagaagaaaaagaagcaacctcagtaatttagaaatcattttgcaatcccttaatatcctaaacatcattcatttttgttgttgttgttgttgttgagacagagtctcgctctgtcgccaggctagagtgcggtggcgcgatcttgactcactgcaatctccacctcccacaggttcaggcgattcccgtgcctcagcctcctgagtagctgggactacaggcacgcaccaccatgccaggctaatttttttgtattttagcagagacggggtttcaccatgttggccaggatggtctcgatctcctgacctcgtgatccacccgactcggcctcccaaagtgctgggattacaggtgtaagccaccgtgcccagccctaaacatcattcttgagagcattgggatatctcctgaaaaggtttatgaaaaagaagaatctcatctcagtgaagaatacttctcattttttaaaaaagcttaaaactttgaagttagctttaacttaaatagtatttcccatttatcgcagaccttttttaggaagcaagcttaatggctgataattttaaattctctctcttgcaggaaggactatgaaaagctagaattgagtgtttaaagttcaacatgttatttgtaatagatgtttgatagattttctgctactttgctgctatggttttctccaagagctacataatttagtttcatataaagtatcatcagtgtagaacctaattcaattcaaagctgtgtgtttggaagactatcttactatttcacaacagcctgacaacatttctatagccaaaaatagctaaatacctcaatcagtctcagaatgtcattttggtactttggtggccacataagccattattcactagtatgactagttgtgtctggcagtttatatttaactctctttatgtctgtggattttttccttcaaagtttaataaatttattttcttggattcctgatagtgtgcttctgttatcaaacaccaacataaaaatgatctaaacca

SEQ ID NO: 8402 - DNA, 312 bp, Homo sapiens
  source 1..312: mol_type = unassigned DNA
agtgcgtccgagacgccgcgcggtgatgctcctgaaaacgtctgcccggcgtagcgggaacccagcatgattttcaggatcttatattgcactttaaacacacctaaaattgacatggaaagactcttaggaggacaactaggactagaagatttcatatttgcccatgtgaaaggaatcgaaaaagaagtgaatgtgtataaatctgaggattcacttggtctcaccattacagataatggtgttggctatgcttttataaagattcttatctgctgcctctgatagtgaaatgtgctgtgacttttctct

SEQ ID NO: 8403 - DNA, 3847 bp, Homo sapiens
  source 1..3847: mol_type = unassigned DNA
gctgggcgggcgggcggctgctccggtccaggggtggaggtcggggccctgacccgacgcagccaggcggaagcgcggctgccattggaggctgcttttacctgcgcggggcccggggcgcaaagtccgaggcgccggggggaggaggcggcggacggcagcgcaggtgggcccgcgctctcggccctgcaagatgcccctgaagctgcgggggaagaagaaggccaagtccaaggagaccgccgggctggtggagggcgagccgacgggcgcgggcggcgggagcctctcagcgtcccgggctcccgcacgcaggctggtcttccacgcgcagctggcgcacggtagtgccacgggccgagtggagggcttctccagcatccaggagctctacgcccagatcgcgggcgcgtttgaaatctcgccgtcggagatcttatattgcactttaaacacacctaaaattgacatggaaagactcttaggaggacaactaggactagaagatttcatatttgcccatgtgaaaggaatcgaaaaagaagtgaatgtgtataaatctgaggattcacttggtctcaccattacagataatggtgttggctatgcttttataaagagaattaaagatggtggtgttattgactcagttaaaacaatctgtgttggggatcatattgaatccataaatggagaaaatattgttgggtggcgtcactatgatgttgctaagaagttaaaggaattaaaaaaggaggaactctttactatgaagttaatagaacctaagaaggcatttgaaatagagctgaggtcaaaggctggaaagtcatcaggagaaaaaattggttgtggaagggcaacacttcgcctgagatcaaaaggtcctgccaccgtggaagaaatgccttctgaaaccaaagcaaaggcaattgaaaagattgatgatgttcttgagttgtacatgggaattcgagatattgatttagccaccacaatgtttgaagctggaaaggacaaagtaaatccagatgaatttgctgtggcacttgacgaaactcttggagactttgcgttcccagacgaatttgtctttgatgtttggggagtcattggtgatgccaaacgaagaggattatgatgtgtacactccatctctgaagaaacaacccatcgttcttttttttctcttttttaaaaagtcctataagatctgtttttggacacctttactaactctggtttaatttcatgtgtatggaatatattctttgaaatataattttggtaattttgatttctgggcactttttaacattgctgatgtagtatgcttaagagaaatgacctaaataaggatcaattgtaatattcattcaaaaggtttttaaaagtaagttttaaggagtatttctcgacagatgattttcttctccattaatacccatgctttgtttttcacatataaatagatgatttcaatagctttgtagttttttttcaaaatcttaatgtaaactaggattggagtatgatttacctcatagtatcttcactgtgttatcctagtttgaacaggatatgttcaggaaatgaaaggtgaattatgccccttattggtctagaagcattggtttttttttgatcctctgagtaagggaaggaagattcctgtggcatgttgatttctatggccaactttctctctttgtaaaacaaagattgattgattttcttgtatgcttctttatacatgctcttaaaacttgtggttgaaatctgtgctgtgtgtgtgtgtctctgcatgtgtaaaagaagggtaaaaaagagatgggtagggtagaactacttgcatttgatttttttttcagtccttaaaacattatttctttttttcactcatagccacttttatgttaccttttataagcactccagggaagattttatatttttttgtagagtttttggaaagatatttactcaaaataactatgctttagaactttttttttttttttttttttggttaaacagcagcactttttagttccctaaactttagaagaaatgctatcagaaatagatttccttccagtggaaagaaaggaggaagggagaattgagaaaatatattagtctattattttagagttctaatacactctaaattaaagagaaaattgagagtaaatgactgtcttatcactcttatttgacatttcgtaggtgtaagagaaatggaaatgaatggtttcaacaaagatcatttaatacagcagagcatggcatgaccaagcatctttgtaaagtgttagatggaaaatgctgtgtgctgccatggtaatcagaaataataacctgttagggatgtattctaggaaatcagaagtagttctcttttcttgctggattattgcttagataactcttgttttctggtaaaactttagttgtattgccatccactcctttttcaaatgagtttaatgccataaagctgatattctttgtccgattaatttgaaatctgcacagaagctgttttagtcattaatgtgtaacaaaagtagcttatagaatatggactgccttattgctgttgcttatcatttgaaaataaaatccagctcaggttgtaacttgttggtactcgtttagtgagttcgttttggaggttctgaaatacctattaattcttaatattacctctcttggaaagacacaaaaaaagagctgttatttttaggcataagatgacttaggaggcccatagaaacattctcgtttaaacaacaacaacaaaataaatttatcagcactagatattagatttgaaataagtcattgttcattattgatggttgtcagtttctccttcctttttgggcatgcataaagacacacttggtgctgattccatgtgatttatggaatgtcattttcacaatgatctttctagaatttgtgtgtaaggttgtgatatccatgtacagctgtaactatatatacttgtctgttagcattcagtggaccattatcattactatcatcacattacctgggcttcaactgggcccaagtactctatatactgcctgtaataggtttttccttgaaatatccttatctttcacctctacagctaaactgataacaaggtcagtttctttatgtcattttattcccatacctaaaattgcatctatttgtgagctttctgcctttttgtaacgctcagtgcaccaaaagcgtctgtttttagtgcagtcacataatatataagtgtgggatacccttctgcagcttcagtgagacaaatcactttttaaaaaacattccattttattggcatcactagatgtttttaggaccctgtccttttcacttttctgtaggctttttttttttaaatggaagatgattattttgtttgttcttgatttcctgttattgaaaacagcatcttccttcttgcaatggccactaatagcacacaatgcgttttctttgattgtagcagaaaatgcaaatgataattgtatgttgggctcgatgaggccttgaacatagctgagtcctaatcagatgtatatactctgatgattacaaataggtacatgttgggtttctgtgatgtttcaaaaatacaattatataattatgatgtaaactctttaagaattcaattataaaagcaataatcaggtaacctctatttggagctgctacatccaatattgtgactgaaaattaactaaagagagataatttttcaaatgatgtataatttgcaatattttcccttgcaactttagcaaatacacatattccaagtaaaacttta

SEQ ID NO: 8404 - DNA, 3289 bp, Homo sapiens
  source 1..3289: mol_type = unassigned DNA
ggcagcggtggcaggggctgcaggagcaagtgaccaggagcaggactggggacaggcctgatcgcccctgcacgaaccagacccttcgccgccctcacgatgactacctctccgatcctgcagctgctgctgcggctctcactgtgcgggctgctgctccagagggcggagacaggctctaaggggcagacggcgggggagctgtaccagcgctgggaacggtaccgcagggagtgccaggagaccttggcagccgcggaaccgccttcaggcctcgcctgtaacgggtccttcgatatgtacgtctgctgggactatgctgcacccaatgccactgcccgtgcgtcctgcccctggtacctgccctggcaccaccatgtggctgcaggtttcgtcctccgccagtgtggcagtgatggccaatggggactttggagagaccatacacaatgtgagaacccagagaagaatgaggcctttctggaccaaaggctcatcttggagcggttgcaggtcatgtacactgtcggctactccctgtctctcgccacactgctgctagccctgctcatcttgagtttgttcaggcggctacattgcactagaaactatatccacatcaacctgttcacgtctttcatgctgcgagctgcggccattctcagccgagaccgtctgctacctcgacctggcccctaccttggggaccaggcccttgcgctgtggaaccaggccctcgctgcctgccgcacggcccagatcgtgacccagtactgcgtgggtgccaactacacgtggctgctggtggagggcgtctacctgcacagtctcctggtgctcgtgggaggctccgaggagggccacttccgctactacctgctcctcggctggggggcccccgcgcttttcgtcattccctgggtgatcgtcaggtacctgtacgagaacacgcagtgctgggagcgcaacgaagtcaaggccatttggtggattatacggacccccatcctcatgaccatcttgattaatttcctcatttttatccgcattcttggcattctcctgtccaagctgaggacacggcaaatgcgctgccgggattaccggctgaggctggctcgctccacgctgacgctggtgcccctgctgggtgtccacgaggtggtgtttgctcccgtgacagaggaacaggcccggggcgccctgcgcttcgccaagctcggctttgagatcttcctcagctccttccagggcttcctggtcagcgtcctctactgcttcatcaacaaggaggtgcagtcggagatccgccgtggctggcaccactgccgcctgcgccgcagcctgggcgaggagcaacgccagctcccggagcgcgccttccgggccctgccctccggctccggcccgggcgaggtccccaccagccgcggcttgtcctcggggaccctcccagggcctgggaatgaggccagccgggagttggaaagttactgctagggggcgggatccccgtgtctgttcagttagcatggatttattgagtgccaactgcgtgccaggcccagtacggaggacgctggggaaatggtgaaggaaacagaaaaaaggtccctgcccttctggagatgacaactgagtggggaaaacagaccgtgaacacaaaacatcaagttccacacacgctatggaatggttatgaagggaagcgagaagggggcctagggtggtctgggaggcgtctccaaggaggtgacacttaagccatccccgaaagaggtgaaagagatcactttggggagagctggagaacaggattctaggcggaagcgatagcataggcaaaggcccttgggcaggaaggcgctcagccttggctggagtagaattaagtcagagccaacaggtggggagagacagagaagtgggcaggggcacccaagttgggatttcatttcaggtgcattggagattcttaggagtgtctcttgggggtaatattttattttttaaaaaatgaggatgtcactcttacccaggttggtcttgaactcctgggctcaagcaatcctcccaccacgggtctctcaaagtgctgggattacaggcgtgagccaccgcacccggcttttttttttttttttaaacggagtctcactctgtcacccaggctggagtgcagtggtgcaatttcagctcactgcaccctccacctcccgagttcaagcctcccgggtagctgggattacaggcaccgccaccatgcctggctaatttttgcattttcagtagagatagggtttctccatgttggccaggctggtctcgaactcctgacctcaagtgatccacccacctcagcctcccaaagtgctgggattacaggcataagccaccatgcccggcccaaatgggctaatgttttaaacagatccttcttgtctgccctgtaggaggacaaattatcaggggcaggggtggaagctggagcccagaaaggaggggactgcaggtgggaagtgatggtggctggaccaggatggaggccactgaggggtatgaagcagtcggatttgaagctgtttaaaaggtggaggtgagaggatttcatgaaggagcacatgaggacacagcagcagagaggactccttggctttggatggtggagagactaaagatagagagattgggttcgggtagggggagaaccacgtgtgctctttggaaaggttaggctggcagtgtttgtaggacatgacaggacactgagtgtaagggtctggagctctcaggagaggggcgagctggagatagtaatgtgagaggcactgggtcctgagagggtgatttggtgtggaccggagcacaggtgaggcaaggcaggcctcgcagctgaaactttatatccagagcagccagggccactgctggctgcggagtgaggacgcatatccccactgtccttagatgggtggcccctggaacctgggagaatgagggggcatgctgacagtctcattgtggctggaccacctgtacatacacccacaagaccctcacccctaaatcctccccctacacatatgcacacttaagttaccgtatgggtgttgtcgagcattttccctggggtctgtggctccctggaccgacatgccccaaagctgaactcagccttttcaagcttgcggccctgctgcccaattcccctacaccctgccttgtgggttctcgcggggtgggggccttagggcaaggctcttgtaaataaagtataagaaacagttgc

SEQ ID NO: 8405 - DNA, 1791 bp, Homo sapiens
  source 1..1791: mol_type = unassigned DNA
aggggctgcaggagcaagtgaccaggagcaggactggggacaggcctgatcgcccctgcacgaaccagacccttcgccgccctcacgatgactacctctccgatcctgcagctgctgctgcggctctcactgtgcgggctgctgctccagagggcggagacaggctctaaggggcagacggcgggggagctgtaccagcgctgggaacggtaccgcagggagtgccaggagaccttggcagccgcggaaccgccttcaggcctcgcctgtaacgggtccttcgatatgtacgtctgctgggactatgctgcacccaatgccactgcccgtgcgtcctgcccctggtacctgccctggcaccaccatgtggctgcaggtttcgtcctccgccagtgtggcagtgatggccaatggggactttggagagaccatacacaatgtgagaacccagagaagaatgaggcctttctggaccaaaggctcatcttggagcggttgcaggtcatgtacactgtcggctactccctgtctctcgccacactgctgctagccctgctcatcttgagtttgttcaggcggctacattgcactagaaactatatccacatcaacctgttcacgtctttcatgctgcgagctgcggccattctcagccgagaccgtctgctacctcgacctggcccctaccttggggaccaggcccttgcgctgtggaaccaggccctcgctgcctgccgcacggcccagatcgtgacccagtactgcgtgggtgccaactacacgtggctgctggtggagggcgtctacctgcacagtctcctggtgctcgtgggaggctccgaggagggccacttccgctactacctgctcctcggctggggggcccccgcgcttttcgtcattccctgggtgatcgtcaggtacctgtacgagaacacgcagtgctgggagcgcaacgaagtcaaggccatttggtggattatacggacccccatcctcatgaccatcttgattaatttcctcatttttatccgcattcttggcattctcctgtccaagctgaggacacggcaaatgcgctgccgggattaccggctgaggctggctcgctccacgctgacgctggtgcccctgctgggtgtccacgaggtggtgtttgctcccgtgacagaggaacaggcccggggcgccctgcgcttcgccaagctcggctttgagatcttcctcagctccttccagggcttcctggtcagcgtcctctactgcttcatcaacaaggaggtaggcagagacccggccgccgcccccgccctctggcggcagcgcggggtacggcgccgcctctgagcgccatcgtctcacaggtgcagtcggagatccgccgtggctggcaccactgccgcctgcgccgcagcctgggcgaggagcaacgccagctcccggagcgcgccttccgggccctgccctccggctccggcccgggcgaggtccccaccagccgcggcttgtcctcggggaccctcccagggcctgggaatgaggccagccgggagttggaaagttactgctagggggcgggatccccgtgtctgttcagttagcatggatttattgagtgccaactgcgtgccaggcccagtacggaggacgctggggaaatggtgaaggaaacagaaaaaaggtccctgcccttctggagatgacaactgagtggggaaaacagaccgtgaacacaaaacatcaagttccacacacgctatggaatggttatgaagggaagcgagaaggggg

SEQ ID NO: 8406 - DNA, 1432 bp, Homo sapiens
  source 1..1432: mol_type = unassigned DNA
ggggctgcaggagcaagtgaccaggagcaggactggggacaggcctgatcgcccctgcacgaaccagacccttcgccgccctcacgatgactacctctccgatcctgcagctgctgctgcggctctcactgtgcgggctgctgctccagagggcggagacaggctctaaggggcagacggcgggggagctgtaccagcgctgggaacggtaccgcagggagtgccaggagaccttggcagccgcggaaccgccttcagtggctgcaggtttcgtcctccgccagtgtggcagtgatggccaatggggactttggagagaccatacacaatgtgagaacccagagaagaatgaggcctttctggaccaaaggctcatcttggagcggttgcaggtcatgtacactgtcggctactccctgtctctcgccacactgctgctagccctgctcatcttgagtttgttcaggcggctacattgcactagaaactatatccacatcaacctgttcacgtctttcatgctgcgagctgcggccattctcagccgagaccgtctgctacctcgacctggcccctaccttggggaccaggcccttgcgctgtggaaccaggccctcgctgcctgccgcacggcccagatcgtgacccagtactgcgtgggtgccaactacacgtggctgctggtggagggcgtctacctgcacagtctcctggtgctcgtgggaggctccgaggagggccacttccgctactacctgctcctcggctggggggcccccgcgcttttcgtcattccctgggtgatcgtcaggtacctgtacgagaacacgcagtgctgggagcgcaacgaagtcaaggccatttggtggattatacggacccccatcctcatgaccatcttgattaatttcctcatttttatccgcattcttggcattctcctgtccaagctgaggacacggcaaatgcgctgccgggattaccggctgaggctggctcgctccacgctgacgctggtgcccctgctgggtgtccacgaggtggtgtttgctcccgtgacagaggaacaggcccggggcgccctgcgcttcgccaagctcggctttgagatcttcctcagctccttccagggcttcctggtcagcgtcctctactgcttcatcaacaaggaggtgcagtcggagatccgccgtggctggcaccactgccgcctgcgccgcagcctgggcgaggagcaacgccagctcccggagcgcgccttccgggccctgccctccggctccggcccgggcgaggtccccaccagccgcggcttgtcctcggggaccctcccagggcctgggaatgaggccagccgggagttggaaagttactgctagggggcgggatccccgtgtctgttcagttagcatggatttattgagtgccaact

SEQ ID NO: 8407 - DNA, 1414 bp, Homo sapiens
  source 1..1414: mol_type = unassigned DNA
ggggctgcaggagcaagtgaccaggagcaggactggggacaggcctgatcgcccctgcacgaaccagacccttcgccgccctcacgatgactacctctccgatcctgcagctgctgctgcggctctcactgtgcgggctgctgctccagagggcggagacaggctctaaggggcagacggcgggggagctgtaccagcgctgggaacggtaccgcagggagtgccaggagaccttggcagccgcggaaccgccttcaggcctcgcctgtaacgggtccttcgatatgtacgtctgctgggactatgctgcacccaatgccactgcccgtgcgtcctgcccctggtacctgccctggcaccaccatgtggctgcaggtttcgtcctccgccagtgtggcagtgatggccaatggggactttggagagaccatacacaatgtgagaacccagagaagaatgaggcctttctggaccaaaggctcatcttggagcggttgcaggtcatgtacactgtcggctactccctgtctctcgccacactgctgctagccctgctcatcttgagtttgttcaggcggctacattgcactagaaactatatccacatcaacctgttcacgtctttcatgctgcgagctgcggccattctcagccgagaccgtctgctacctcgacctggcccctaccttggggaccaggcccttgcgctgtggaaccaggccctcgctgcctgccgcacggcccagatcgtgacccagtactgcgtgggtgccaactacacgtggctgctggtggagggcgtctacctgcacagtctcctggtgctcgtgggaggctccgaggagggccacttccgctactacctgctcctcggctgggattaatttcctcatttttatccgcattcttggcattctcctgtccaagctgaggacacggcaaatgcgctgccgggattaccggctgaggctggctcgctccacgctgacgctggtgcccctgctgggtgtccacgaggtggtgtttgctcccgtgacagaggaacaggcccggggcgccctgcgcttcgccaagctcggctttgagatcttcctcagctccttccagggcttcctggtcagcgtcctctactgcttcatcaacaaggaggtgcagtcggagatccgccgtggctggcaccactgccgcctgcgccgcagcctgggcgaggagcaacgccagctcccggagcgcgccttccgggccctgccctccggctccggcccgggcgaggtccccaccagccgcggcttgtcctcggggaccctcccagggcctgggaatgaggccagccgggagttggaaagttactgctagggggcgggatccccgtgtctgttcagttagcatggatttattgagtgccaactgcgtg

SEQ ID NO: 8408 - DNA, 557 bp, Homo sapiens
  source 1..557: mol_type = unassigned DNA
tcctggcctcaagtgatccacccgcttcggcctcccaaagtgctgggattacaggcgtgagccaccgcgcccgggcccagattcgagttttgattatcgtttccactcccttttcttcccccaacaagtcctcctgataatttccagccaccccctccccaattttcttgaaggttttcagtctcccatagcaactccagtgggtggcttccaggcaccccaccccaagacttggaactggtttccaagctacccaagactcccgaacaacacgcaacagaccctcaaagtctctctggggcgcttctgggccacatggacctagcagcctgggagcgggggtcggtctgggggggtcctcccttctttcttttcctagacaggctctaaggggcagacggcgggggagctgtaccagcgctgggaacggtaccgcagggagtgccaggagaccttggcagccgcggaaccgccttcaggcctcgcctgtaacgggtccttcgatatgtacgtctgctgggactatgctgcacccaatgccactgcccgtgcgtcct

SEQ ID NO: 8409 - DNA, 709 bp, Homo sapiens
  source 1..709: mol_type = unassigned DNA
cctcaattttcccatatgtagaactaggttaaggatattactaattccatgggctagtatgaatattaaattaatacaaataacatgccatataagggtttatcatcatcatcatcatcatcatcatcatcaccacttcggctctctccctctctgttattgtctcacagtttgtctttctgtatttatctctttctctgtgtgccttaattccctctcttctttccccacagtggctgcaggtttcgtcctccgccagtgtggcagtgatggccaatggggactttggagagaccatacacaatgtgagaacccagagaagaatgaggcctttctggaccaaaggctcatcttggagcggttgcaggtcatgtacactgtcggctactccctgtctctcgccacactgctgctagccctgctcatcttgagtttgttcaggtgggaccttaaccctgagtggtggcggcagagatgtgagctcggcctcagtttgtccagtaagatggggtggtctgtttccaccaggtccagctatccactggtggttctatggggagcagtgggggtggttaaaggagctctgtgtggccgggagcggtggctgatgcctgtaatcccagctctttgggatgccaaggcaggaggatcgcttgagcccaggagtttgagatcagcctggccaatatggtgaaaccctgtctctact

SEQ ID NO: 8410 - DNA, 782 bp, Homo sapiens
  source 1..782: mol_type = unassigned DNA
taggaaaggttgtgttccagggcaatcggcaaggggagggggtggggcctggatcgtaatgggcgggaccttagagaatgtgtgtggtctcaagtgcggtgggcggggcctagcgagcaaatgagcttggtgatcggtgagtctagagtttttctatctcttagctctactccgccttccccaggtgctgggagcgcaacgaagtcaaggccatttggtggattatacggacccccatcctcatgaccatcttggtaggatcggtcccgcctccaccaggccgccctcagggatttcccattctgggaagtgggctgccacctcctcctgccccttcagaatgggatcgcggctggctcagcccttatctctccccacagattaatttcctcatttttatccgcattcttggcattctcctgtccaagctgaggacacggcaaatgcgctgccgggattaccggctgaggctggctcgctccacgctgacgctggtgcccctgctgggtgtccacgaggtggtgtttgctcccgtgacagaggaacaggcccggggcgccctgcgcttcgccaagctcggctttgagatcttcctcagctccttccaggtgctcaggcagggtgcaggggctccatccttccacccagggcctcctccccagaggggcacgaaagctacagtcgttctctggtgcagccactgaatggggtgggaagatgggatttagttcgttcattaattaattcattcttttttttttttgagacggattctcgccctg

SEQ ID NO: 8411 - DNA, 153 bp, Homo sapiens
  source 1..153: mol_type = unassigned DNA
agcgagcaaatgagcttggtgatcgattaatttcctcatttttatccgcattcttggcattctcctgtccaagctgaggacacggcaaatgcgctgccgggattaccggctgaggctggctcgctccacgctgacgctggtgcccctgctggg

SEQ ID NO: 8412 - DNA, 3037 bp, Homo sapiens
  source 1..3037: mol_type = unassigned DNA
gcgtgaggaaagtaccaaacagcagcggagttttaaactttaaatagacaggtctgagtgcctgaacttgccttttcattttacttcatcctccaaggagttcaatcacttggcgtgacttcactacttttaagcaaaagagtggtgcccaggcaacatgggtgactggagcgccttaggcaaactccttgacaaggttcaagcctactcaactgctggagggaaggtgtggctgtcagtacttttcattttccgaatcctgctgctggggacagcggttgagtcagcctggggagatgagcagtctgcctttcgttgtaacactcagcaacctggttgtgaaaatgtctgctatgacaagtctttcccaatctctcatgtgcgcttctgggtcctgcagatcatatttgtgtctgtacccacactcttgtacctggctcatgtgttctatgtgatgcgaaaggaagagaaactgaacaagaaagaggaagaactcaaggttgcccaaactgatggtgtcaatgtggacatgcacttgaagcagattgagataaagaagttcaagtacggtattgaagagcatggtaaggtgaaaatgcgaggggggttgctgcgaacctacatcatcagtatcctcttcaagtctatctttgaggtggccttcttgctgatccagtggtacatctatggattcagcttgagtgctgtttacacttgcaaaagagatccctgcccacatcaggtggactgtttcctctctcgccccacggagaaaaccatcttcatcatcttcatgctggtggtgtccttggtgtccctggccttgaatatcattgaactcttctatgttttcttcaagggcgttaaggatcgggttaagggaaagagcgacccttaccatgcgaccagtggtgcgctgagccctgccaaagactgtgggtctcaaaaatatgcttatttcaatggctgctcctcaccaaccgctcccctctcgcctatgtctcctcctgggtacaagctggttactggcgacagaaacaattcttcttgccgcaattacaacaagcaagcaagtgagcaaaactgggctaattacagtgcagaacaaaatcgaatggggcaggcgggaagcaccatctctaactcccatgcacagccttttgatttccccgatgataaccagaattctaaaaaactagctgctggacatgaattacagccactagccattgtggaccagcgaccttcaagcagagccagcagtcgtgccagcagcagacctcggcctgatgacctggagatctagatacaggcttgaaagcatcaagattccactcaattgtggagaagaaaaaaggtgctgtagaaagtgcaccaggtgttaattttgatccggtggaggtggtactcaacagccttattcatgaggcttagaaaacacaaagacattagaatacctaggttcactgggggtgtatggggtagatgggtggagagggaggggataagagaggtgcatgttggtatttaaagtagtggattcaaagaacttagattataaataagagttccattaggtgatacatagataagggctttttctccccgcaaacacccctaagaatggttctgtgtatgtgaatgagcgggtggtaattgtggctaaatatttttgttttaccaagaaactgaaataattctggccaggaataaatacttcctgaacatcttaggtcttttcaacaagaaaaagacagaggattgtccttaagtccctgctaaaacattccattgttaaaatttgcactttgaaggtaagctttctaggcctgaccctccaggtgtcaatggacttgtgctactatatttttttattcttggtatcagtttaaaattcagacaaggcccacagaataagattttccatgcatttgcaaatacgtatattctttttccatccacttgcacaatatcattaccatcactttttcatcattcctcagctactactcacattcatttaatggtttctgtaaacatttttaagacagttgggatgtcacttaacattttttttttgagctaaagtcagggaatcaagccatgcttaatatttaacaatcacttatatgtgtgtcgaagagtttgttttgtttgtcatgtattggtacaagcagatacagtataaactcacaaacacagatttgaaaataatgcacatatggtgttcaaatttgaacctttctcatggatttttgtggtgtgggccaatatggtgtttacattatataattcctgctgtggcaagtaaagcacactttttttttctcctaaaatgtttttccctgtgtatcctattatggatactggttttgttaattatgattctttattttctctcctttttttaggatatagcagtaatgctattactgaaatgaatttcctttttctgaaatgtaatcattgatgcttgaatgatagaattttagtactgtaaacaggctttagtcattaatgtgagagacttagaaaaaatgcttagagtggactattaaatgtgcctaaatgaattttgcagtaactggtattcttgggttttcctacttaatacacagtaattcagaacttgtattctattatgagtttagcagtcttttggagtgaccagcaactttgatgtttgcactaagattttatttggaatgcaagagaggttgaaagaggattcagtagtacacatacaactaatttatttgaactatatgttgaagacatctaccagtttctccaaatgccttttttaaaactcatcacagaagattggtgaaaatgctgagtatgacacttttcttcttgcatgcatgtcagctacataaacagttttgtacaatgaaaattactaatttgtttgacattccatgttaaactacggtcatgttcagcttcattgcatgtaatgtagacctagtccatcagatcatgtgttctggagagtgttctttattcaataaagttttaatttagtataaacata

SEQ ID NO: 8413 - DNA, 1587 bp, Homo sapiens
  source 1..1587: mol_type = unassigned DNA
gggctgggctgacagtacctggtggcatagggcagacacgcctgcagacattctctgggaaagggcagcagcagccaggtgtgaatgaggcaggatgaactggacaggtttgtacaccttgctcagtggcgtgaaccggcattctactgccattggccgagtatggctctcggtcatcttcatcttcagaatcatggtgctggtggtggctgcagagagtgtgtggggtgatgagaaatcttccttcatctgcaacacactccagcctggctgcaacagcgtttgctatgaccaattcttccccatctcccatgtgcggctgtggtccctgcagctcatcctagtttccaccccagctctcctcgtggccatgcacgtggctcaccagcaacacatagagaagaaaatgctacggcttgagggccatggggaccccctacacctggaggaggtgaagaggcacaaggtccacatctcagggacactgtggtggacctatgtcatcagcgtggtgttccggctgttgtttgaggccgtcttcatgtatgtcttttatctgctctaccctggctatgccatggtgcggctggtcaagtgcgacgtctacccctgccccaacacagtggactgcttcgtgtcccgccccaccgagaaaaccgtcttcaccgtcttcatgctagctgcctctggcatctgcatcatcctcaatgtggccgaggtggtgtacctcatcatccgggcctgtgcccgccgagcccagcgccgctccaatccaccttcccgcaagggctcgggcttcggccaccgcctctcacctgaatacaagcagaatgagatcaacaagctgctgagtgagcaggatggctccctgaaagacatactgcgccgcagccctggcaccggggctgggctggctgaaaagagcgaccgctgctcggcctgctgatgccacataccaggcaacctcccatcccacccccgaccctgccctgggcgagcccctccttctcccctgccggtgcacaggcctctgcctgctggggattactcgatcaaaaccttccttccctggctacttcccttcctcccggggccttccttttgaggagctggaggggtggggagctagaggccacctatgccagtgctcaaggttactgggagtgtgggctgcccttgttgcctgcacccttccctcttccctctccctctctctgggaccactgggtacaagagatgggatgctccgacagcgtctccaattatgaaactaatcttaaccctgtgctgtcagataccctgtttctggagtcacatcagtgaggagggatgtgggtaagaggagcagagggcaggggtgctgtggacatgtgggtggagaagggagggtggccagcactagtaaaggaggaatagtgcttgctggccacaaggaaaaggaggaggtgtctggggtgagggagttagggagagagaagcaggcagataagttggagcaggggttggtcaaggccacctctgcctctagtccccaaggcctctctctgcctgaaatgttacacattaaacaggattttacagtaaatg

SEQ ID NO: 8414 - DNA, 1904 bp, Homo sapiens
  source 1..1904: mol_type = unassigned DNA
ctggtggcatagggcagacacgcctgcagacattctctgggaaagggcagcagcagccaggtgtggcagtgacagggaggtgtgaatgaggcaggatgaactggacaggtttgtacaccttgctcagtggcgtgaaccggcattctactgccattggccgagtatggctctcggtcatcttcatcttcagaatcatggtgctggtggtggctgcagagagtgtgtggggtgatgagaaatcttccttcatctgcaacacactccagcctggctgcaacagcgtttgctatgaccaattcttccccatctcccatgtgcggctgtggtccctgcagctcatcctagtttccaccccagctctcctcgtggccatgcacgtggctcaccagcaacacatagagaagaaaatgctacggcttgagggccatggggaccccctacacctggaggaggtgaagaggcacaaggtccacatctcagggacactgtggtggacctatgtcatcagcgtggtgttccggctgttgtttgaggccgtcttcatgtatgtcttttatctgctctaccctggctatgccatggtgcggctggtcaagtgcgacgtctacccctgccccaacacagtggactgcttcgtgtcccgccccaccgagaaaaccgtcttcaccgtcttcatgctagctgcctctggcatctgcatcatcctcaatgtggccgaggtggtgtacctcatcatccgggcctgtgcccgccgagcccagcgccgctccaatccaccttcccgcaagggctcgggcttcggccaccgcctctcacctgaatacaagcagaatgagatcaacaagctgctgagtgagcaggatggctccctgaaagacatactgcgccgcagccctggcaccggggctgggctggctgaaaagagcgaccgctgctcggcctgctgatgccacataccaggcaacctcccatcccacccccgaccctgccctgggcgagcccctccttctcccctgccggtgcacaggcctctgcctgctggggattactcgatcaaaaccttccttccctggctacttcccttcctcccggggccttccttttgaggagctggaggggtggggagctagaggccacctatgccagtgctcaaggttactgggagtgtgggctgcccttgttgcctgcacccttccctcttccctctccctctctctgggaccactgggtacaagagatgggatgctccgacagcgtctccaattatgaaactaatcttaaccctgtgctgtcagataccctgtttctggagtcacatcagtgaggagggatgtgggtaagaggagcagagggcaggggtgctgtggacatgtgggtggagaagggagggtggccagcactagtaaaggaggaatagtgcttgctggccacaaggaaaaggaggaggtgtctggggtgagggagttagggagagagaagcaggcagataagttggagcaggggttggtcaaggccacctctgcctctagtccccaaggcctctctctgcctgaaatgttacacattaaacaggattttacagtaaatgaagaggtggcttgtgtgtttgtcaagttctttctcctgcaacctctgacctcccccaggatgagctggccttggttttttactgattaagaaaggaacagggcaaaagaagtagttacttgagtagctgaagctgcaaatgaggaaatcactgtacttctgggccgcagagccagccccggagccattcctccctgttgcttttgttgttgtggttcttgtctttttcattgtctaataacagctttattgggatttagtttacatacctccttcctctgattttgaaaagattaaaaatgacaactccctctgaa

SEQ ID NO: 8415 - DNA, 484 bp, Homo sapiens
  source 1..484: mol_type = unassigned DNA
cagcagcagccaggtgtggcagtgacagggagacactatctgcagaagcacagggagcctgctgtagaaagacttctgtctcagatacattgtttcatcctacctatcctaccgctttggaacggtgtgaccttgaggagttacttatctgagcttcagcttcttcatctggaaaatgggataacaggcttcctaaatgggtcgaaagaaaaaatgtgtgaatgaggcaggatgaactggacaggtttgtacaccttgctcagtggcgtgaaccggcattctactgccattggccgagtatggctctcggtcatcttcatcttcagaatcatggtgctggtggtggctgcagagagtgtgtggggtgatgagaaatcttccttcatctgcaacacactccagcctggctgcaacagcgtttgctatgaccaattcttccccatctcccatgtgcggctgtggtccctgcagctcatcctagttt

SEQ ID NO: 8416 - DNA, 1637 bp, Homo sapiens
  source 1..1637: mol_type = unassigned DNA
atatgactccccagcaccgggcggtgatgaattgggacgcaggcgcggagcccagggaccactccccctgcacagacatgagaccataggggacctgtctgggtggcctcagggataggcgctccccaaggtgtgaatgaggcaggatgaactggacaggtttgtacaccttgctcagtggcgtgaaccggcattctactgccattggccgagtatggctctcggtcatcttcatcttcagaatcatggtgctggtggtggctgcagagagtgtgtggggtgatgagaaatcttccttcatctgcaacacactccagcctggctgcaacagcgtttgctatgaccaattcttccccatctcccatgtgcggctgtggtccctgcagctcatcctagtttccaccccagctctcctcgtggccatgcacgtggctcaccagcaacacatagagaagaaaatgctacggcttgagggccatggggaccccctacacctggaggaggtgaagaggcacaaggtccacatctcagggacactgtggtggacctatgtcatcagcgtggtgttccggctgttgtttgaggccgtcttcatgtatgtcttttatctgctctaccctggctatgccatggtgcggctggtcaagtgcgacgtctacccctgccccaacacagtggactgcttcgtgtcccgccccaccgagaaaaccgtcttcaccgtcttcatgctagctgcctctggcatctgcatcatcctcaatgtggccgaggtggtgtacctcatcatccgggcctgtgcccgccgagcccagcgccgctccaatccaccttcccgcaagggctcgggcttcggccaccgcctctcacctgaatacaagcagaatgagatcaacaagctgctgagtgagcaggatggctccctgaaagacatactgcgccgcagccctggcaccggggctgggctggctgaaaagagcgaccgctgctcggcctgctgatgccacataccaggcaacctcccatcccacccccgaccctgccctgggcgagcccctccttctcccctgccggtgcacaggcctctgcctgctggggattactcgatcaaaaccttccttccctggctacttcccttcctcccggggccttccttttgaggagctggaggggtggggagctagaggccacctatgccagtgctcaaggttactgggagtgtgggctgcccttgttgcctgcacccttccctcttccctctccctctctctgggaccactgggtacaagagatgggatgctccgacagcgtctccaattatgaaactaatcttaaccctgtgctgtcagataccctgtttctggagtcacatcagtgaggagggatgtgggtaagaggagcagagggcaggggtgctgtggacatgtgggtggagaagggagggtggccagcactagtaaaggaggaatagtgcttgctggccacaaggaaaaggaggaggtgtctggggtgagggagttagggagagagaagcaggcagataagttggagcaggggttggtcaaggccacctctgcctctagtccccaaggcctctctctgcctgaaatgttacacattaaacaggattttacagtaaa

SEQ ID NO: 8417 - DNA, 2840 bp, Homo sapiens
  source 1..2840: mol_type = unassigned DNA
aaacagacaagcccaaggacaaggaagcagctactggacccaagaaggaataaggtagaccctgattttggaacctgaagaccaaagtgcaagattagctctgctacttccatctgtggaccattgggcaggtatctctgggccttcacttactctttgtgaaatgaggacaggggcaatccctaccctaccaagtcattgggagtgaagacatgatgacacggtgattgtgaaaagattttgtcaatcgcaccagcattaagggtgcccatctccaggttcccccaggcctcaaggctcccaaggcctgagtgggcaggtagcacccaggtatagaccttccacgtgcagcacccaggacacagccagcatgaactgggcatttctgcagggcctgctgagtggcgtgaacaagtactccacagtgctgagccgcatctggctgtctgtggtgttcatctttcgtgtgctggtgtacgtggtggcagcggaggaggtgtgggacgatgagcagaaggactttgtctgcaacaccaagcagcccggctgccccaacgtctgctatgacgagttcttccccgtgtcccacgtgcgcctctgggccctacagctcatcctggtcacgtgcccctcactgctcgtggtcatgcacgtggcctaccgcgaggaacgcgagcgcaagcaccacctgaaacacgggcccaatgccccgtccctgtacgacaacctgagcaagaagcggggcggactgtggtggacgtacttgctgagcctcatcttcaaggccgccgtggatgctggcttcctctatatcttccaccgcctctacaaggattatgacatgccccgcgtggtggcctgctccgtggagccttgcccccacactgtggactgttacatctcccggcccacggagaagaaggtcttcacctacttcatggtgaccacagctgccatctgcatcctgctcaacctcagtgaagtcttctacctggtgggcaagaggtgcatggagatcttcggccccaggcaccggcggcctcggtgccgggaatgcctacccgatacgtgcccaccatatgtcctctcccagggagggcaccctgaggatgggaactctgtcctaatgaaggctgggtcggccccagtggatgcaggtgggtatccataacctgcgagatcagcagataagatcaacaggtcccccccacatgaggccacccaggaaaaaaggcaggggcagtggcatccttgccgtagcagggtggtgaggagggtggctgtgggggctcaggaagctcgcccaggggccaatgtgggaggttgggggtagtttggtccctgggtcctgagcctcaggggagggaggttgatagctactggggattttgtatatggcaacagtatatgtcaaacctcttaataaatatgattttcccagtactttgcagaccaggtggggagtggccgataggaaaacggggggcaggggggattaggtggacctcagagaggatgccaagactactcagtgagcacctgagcactggaacctcagatccaggctcacccatcaccccccaacacacacagtgtgtgcccccagaacatgatgggctgtgcccaaaggcagaggctactccaggggcctctgggttgtgcaaccacctggccaaagcaggaggagaggaattccaggagaccctgtgcccagcaggagtcagttctcagtgatcgtccatcacaggaatgagcgtgggttgggcctccctagccctgcccagcacaggtcccggataggtgagtcccctctgacggtgggagggtcacggctgagagcaagccagggatgggaatctgtcaaggtgcccaagaggcacatcctacaggccagggcccactgagagtgtctgagctgaaaggtcccttgtggatcctggagtctatggaatttcatgttctttttcactgatacaacttccccatcccatactcccccaccccaccaccactcagactttggcaactcccagaaccacacctccaccctaacatgcctctgagtcccaccaaatgcccactagacaattccctgggaggcccccaggcatctcatacccgccactcccaagctgacctcatcagctcacccagacctgcccccttgaagatgccccaccccatctcatgcaggacacagctattcacccagctgcccaagccaggggacgagacaagcctgacatccttgtccctcacaccccacacccccactggcaccaaatcccactgattccagtccctaaatgccacctgaatctgctcttcctctccttacaacaacctaactacctcctggacctcccccatctgccctccgctacagggatggagtgatttatctgtctatgcaactgaccatgtcattccacctgctttaaaatttcttccaccatcaccagccccatgccctcagcatggcccccgctgacctccccacctcatcccagcttcctccccttttctacctgcaagtaataccaaagggctcctggttccccaggcagacacgtcatgtggtgtcattcctcgtgcctttgtcatgctatttcctctggctagaatgcccttcccaccccctctgtgatcctccctcgaacctctaggacagctttacccatctctctaagtgccagcctcgcttgtccctctgccactctccccaaatcggaattgtcacttcccctgagtgtctccctatcagtctgtgagcccttaatgggcaggtcactgagtcatccaggtccctgctgccttcaataaatgcttgttagatgagt

SEQ ID NO: 8418 - DNA, 1808 bp, Homo sapiens
  source 1..1808: mol_type = unassigned DNA
acataactgggggtgtggagagcgcctcattgccactgcagtgactaaagctgggaagacgctggtcagttcacctgccccactggttgttttttaaacaaattctgatacaggcgacatcctcactgaccgagcaaagattgacattcgtatcatcactgtgcaccattggcttctaggcactccagtggggtaggagaaggaggtctgaaaccctcgcagagggatcttgccctcattctttgggtctgaaacactggcagtcgttggaaacaggactcagggataaaccagcgcaatggattgggggacgctgcacactttcatcgggggtgtcaacaaacactccaccagcatcgggaaggtgtggatcacagtcatctttattttccgagtcatgatcctcgtggtggctgcccaggaagtgtggggtgacgagcaagaggacttcgtctgcaacacactgcaaccgggatgcaaaaatgtgtgctatgaccactttttcccggtgtcccacatccggctgtgggccctccagctgatcttcgtctccaccccagcgctgctggtggccatgcatgtggcctactacaggcacgaaaccactcgcaagttcaggcgaggagagaagaggaatgatttcaaagacatagaggacattaaaaagcagaaggttcggatagaggggtcgctgtggtggacgtacaccagcagcatctttttccgaatcatctttgaagcagcctttatgtatgtgttttacttcctttacaatgggtaccacctgccctgggtgttgaaatgtgggattgacccctgccccaaccttgttgactgctttatttctaggccaacagagaagaccgtgtttaccatttttatgatttctgcgtctgtgatttgcatgctgcttaacgtggcagagttgtgctacctgctgctgaaagtgtgttttaggagatcaaagagagcacagacgcaaaaaaatcaccccaatcatgccctaaaggagagtaagcagaatgaaatgaatgagctgatttcagatagtggtcaaaatgcaatcacaggtttcccaagctaaacatttcaaggtaaaatgtagctgcgtcataaggagacttctgtcttctccagaaggcaataccaacctgaaagttccttctgtagcctgaagagtttgtaaatgactttcataataaatagacacttgagttaactttttgtaggatacttgctccattcatacacaacgtaatcaaatatgtggtccatctctgaaaacaagagactgcttgacaaaggagcattgcagtcactttgacaggttccttttaagtggactctctgacaaagtgggtactttctgaaaatttatataactgttgttgataaggaacatttatccaggaattgatacgtttattaggaaaagatatttttataggcttggatgtttttagttctgactttgaatttatataaagtatttttataatgactggtcttccttacctggaaaaacatgcgatgttagttttagaattacaccacaagtatctaaatttggaacttacaaagggtctatcttgtaaatattgttttgcattgtctgttggcaaatttgtgaactgtcatgatacgcttaaggtggaaagtgttcattgcacaatatatttttactgctttctgaatgtagacggaacagtgtggaagcagaaggcttttttaactcatccgtttgccaatcattgcaaacaactgaaatgtggatgtgattgcctcaataaagctcgtccccattgctt

SEQ ID NO: 8419 - DNA, 1927 bp, Homo sapiens
  source 1..1927: mol_type = unassigned DNA
acgagagcccgacagccggcggcgcccgagcccgacctgcctgcccagccggagcgaagggcgccgccccgcgcagagcccgcgccagggccgccggccgcagagcagttaaaacgtgcaggcaccagaaggcacttcctgtcggtgaagaagacctgtctccggtgtcacgggcatcctgtgttttgcaaacggggctgacctcccttcctggggagcaggaagggtcagggcgacatcctcactgaccgagcaaagattgacattcgtatcatcactgtgcaccattggcttctaggcactccagtggggtaggagaaggaggtctgaaaccctcgcagagggatcttgccctcattctttgggtctgaaacactggcagtcgttggaaacaggactcagggataaaccagcgcaatggattgggggacgctgcacactttcatcgggggtgtcaacaaacactccaccagcatcgggaaggtgtggatcacagtcatctttattttccgagtcatgatcctcgtggtggctgcccaggaagtgtggggtgacgagcaagaggacttcgtctgcaacacactgcaaccgggatgcaaaaatgtgtgctatgaccactttttcccggtgtcccacatccggctgtgggccctccagctgatcttcgtctccaccccagcgctgctggtggccatgcatgtggcctactacaggcacgaaaccactcgcaagttcaggcgaggagagaagaggaatgatttcaaagacatagaggacattaaaaagcagaaggttcggatagaggggtcgctgtggtggacgtacaccagcagcatctttttccgaatcatctttgaagcagcctttatgtatgtgttttacttcctttacaatgggtaccacctgccctgggtgttgaaatgtgggattgacccctgccccaaccttgttgactgctttatttctaggccaacagagaagaccgtgtttaccatttttatgatttctgcgtctgtgatttgcatgctgcttaacgtggcagagttgtgctacctgctgctgaaagtgtgttttaggagatcaaagagagcacagacgcaaaaaaatcaccccaatcatgccctaaaggagagtaagcagaatgaaatgaatgagctgatttcagatagtggtcaaaatgcaatcacaggtttcccaagctaaacatttcaaggtaaaatgtagctgcgtcataaggagacttctgtcttctccagaaggcaataccaacctgaaagttccttctgtagcctgaagagtttgtaaatgactttcataataaatagacacttgagttaactttttgtaggatacttgctccattcatacacaacgtaatcaaatatgtggtccatctctgaaaacaagagactgcttgacaaaggagcattgcagtcactttgacaggttccttttaagtggactctctgacaaagtgggtactttctgaaaatttatataactgttgttgataaggaacatttatccaggaattgatacgtttattaggaaaagatatttttataggcttggatgtttttagttctgactttgaatttatataaagtatttttataatgactggtcttccttacctggaaaaacatgcgatgttagttttagaattacaccacaagtatctaaatttggaacttacaaagggtctatcttgtaaatattgttttgcattgtctgttggcaaatttgtgaactgtcatgatacgcttaaggtggaaagtgttcattgcacaatatatttttactgctttctgaatgtagacggaacagtgtggaagcagaaggcttttttaactcatccgtttgccaatcattgcaaacaactgaaatgtggatgtgattgcctcaataaagctcgtccccattgctt

SEQ ID NO: 8420 - DNA, 1805 bp, Homo sapiens
  source 1..1805: mol_type = unassigned DNA
cgacgagagcccgacagccggcggcgcccgagcccgacctgcctgcccagccggagcgaagggcgccgccccgcgcagagcccgcgccagggccgccggccgcagagcaggcgacatcctcactgaccgagcaaagattgacattcgtatcatcactgtgcaccattggcttctaggcactccagtggggtaggagaaggaggtctgaaaccctcgcagagggatcttgccctcattctttgggtctgaaacactggcagtcgttggaaacaggactcagggataaaccagcgcaatggattgggggacgctgcacactttcatcgggggtgtcaacaaacactccaccagcatcgggaaggtgtggatcacagtcatctttattttccgagtcatgatcctcgtggtggctgcccaggaagtgtggggtgacgagcaagaggacttcgtctgcaacacactgcaaccgggatgcaaaaatgtgtgctatgaccactttttcccggtgtcccacatccggctgtgggccctccagctgatcttcgtctccaccccagcgctgctggtggccatgcatgtggcctactacaggcacgaaaccactcgcaagttcaggcgaggagagaagaggaatgatttcaaagacatagaggacattaaaaagcagaaggttcggatagaggggtcgctgtggtggacgtacaccagcagcatctttttccgaatcatctttgaagcagcctttatgtatgtgttttacttcctttacaatgggtaccacctgccctgggtgttgaaatgtgggattgacccctgccccaaccttgttgactgctttatttctaggccaacagagaagaccgtgtttaccatttttatgatttctgcgtctgtgatttgcatgctgcttaacgtggcagagttgtgctacctgctgctgaaagtgtgttttaggagatcaaagagagcacagacgcaaaaaaatcaccccaatcatgccctaaaggagagtaagcagaatgaaatgaatgagctgatttcagatagtggtcaaaatgcaatcacaggtttcccaagctaaacatttcaaggtaaaatgtagctgcgtcataaggagacttctgtcttctccagaaggcaataccaacctgaaagttccttctgtagcctgaagagtttgtaaatgactttcataataaatagacacttgagttaactttttgtaggatacttgctccattcatacacaacgtaatcaaatatgtggtccatctctgaaaacaagagactgcttgacaaaggagcattgcagtcactttgacaggttccttttaagtggactctctgacaaagtgggtactttctgaaaatttatataactgttgttgataaggaacatttatccaggaattgatacgtttattaggaaaagatatttttataggcttggatgtttttagttctgactttgaatttatataaagtatttttataatgactggtcttccttacctggaaaaacatgcgatgttagttttagaattacaccacaagtatctaaatttggaacttacaaagggtctatcttgtaaatattgttttgcattgtctgttggcaaatttgtgaactgtcatgatacgcttaaggtggaaagtgttcattgcacaatatatttttactgctttctgaatgtagacggaacagtgtggaagcagaaggcttttttaactcatccgtttgccaatcattgcaaacaactgaaatgtggatgtgattgcctcaataaagctcgtccccattgctt

SEQ ID NO: 8421 - DNA, 2131 bp, Homo sapiens
  source 1..2131: mol_type = unassigned DNA
ccgcagcccgcccgagccgcgtcagggcagaggcggggtggggcgcggttaaaaggcgcagcaggtgggagccggggccttcacccgaaacccgacgagagcccgacagccggcggcgcccgagcccgacctgcctgcccagccggagcgaagggcgccgccccgcgcagagcccgcgccagggccgccggccgcagagcagttaaaacgtgcaggcaccagaaggcacttcctgtcggtgaagaagacctgtctccggtgtcacgggcatcctgtgttttgcaaacggggctgacctcccttcctggggagcaggaagggtcagggaaggaaaagaagtacagaagatctggctaaacaatttctgtatggcgaaagaaaaattctaacttgtacgccctcttcatgcatctttaattcaatttgaatattccaggcgacatcctcactgaccgagcaaagattgacattcgtatcatcactgtgcaccattggcttctaggcactccagtggggtaggagaaggaggtctgaaaccctcgcagagggatcttgccctcattctttgggtctgaaacactggcagtcgttggaaacaggactcagggataaaccagcgcaatggattgggggacgctgcacactttcatcgggggtgtcaacaaacactccaccagcatcgggaaggtgtggatcacagtcatctttattttccgagtcatgatcctcgtggtggctgcccaggaagtgtggggtgacgagcaagaggacttcgtctgcaacacactgcaaccgggatgcaaaaatgtgtgctatgaccactttttcccggtgtcccacatccggctgtgggccctccagctgatcttcgtctccaccccagcgctgctggtggccatgcatgtggcctactacaggcacgaaaccactcgcaagttcaggcgaggagagaagaggaatgatttcaaagacatagaggacattaaaaagcagaaggttcggatagaggggtcgctgtggtggacgtacaccagcagcatctttttccgaatcatctttgaagcagcctttatgtatgtgttttacttcctttacaatgggtaccacctgccctgggtgttgaaatgtgggattgacccctgccccaaccttgttgactgctttatttctaggccaacagagaagaccgtgtttaccatttttatgatttctgcgtctgtgatttgcatgctgcttaacgtggcagagttgtgctacctgctgctgaaagtgtgttttaggagatcaaagagagcacagacgcaaaaaaatcaccccaatcatgccctaaaggagagtaagcagaatgaaatgaatgagctgatttcagatagtggtcaaaatgcaatcacaggtttcccaagctaaacatttcaaggtaaaatgtagctgcgtcataaggagacttctgtcttctccagaaggcaataccaacctgaaagttccttctgtagcctgaagagtttgtaaatgactttcataataaatagacacttgagttaactttttgtaggatacttgctccattcatacacaacgtaatcaaatatgtggtccatctctgaaaacaagagactgcttgacaaaggagcattgcagtcactttgacaggttccttttaagtggactctctgacaaagtgggtactttctgaaaatttatataactgttgttgataaggaacatttatccaggaattgatacgtttattaggaaaagatatttttataggcttggatgtttttagttctgactttgaatttatataaagtatttttataatgactggtcttccttacctggaaaaacatgcgatgttagttttagaattacaccacaagtatctaaatttggaacttacaaagggtctatcttgtaaatattgttttgcattgtctgttggcaaatttgtgaactgtcatgatacgcttaaggtggaaagtgttcattgcacaatatatttttactgctttctgaatgtagacggaacagtgtggaagcagaaggcttttttaactcatccgtttgccaatcattgcaaacaactgaaatgtggatgtgattgcctcaataaagctcgtccccattgctt

SEQ ID NO: 8422 - DNA, 1840 bp, Homo sapiens
  source 1..1840: mol_type = unassigned DNA
ttttctcttattttaaaaatcaagatatttgcccttctccaggaattgggcccctcttttcattctgaataataatattctgctctcctgtggaaatgcttaaagaattgaacatagaataaccatgagatccagcaatcccacatctagatacctaagagacttgaaagcagggtcttgaaaaaatagtagtataccctcactcacagtagtgttacaacagccaaaagctggaagcaacccagtgtccattgatagatgaatgggtaaacaaaatggggagcatccatacggtggaatagtattcagcctccaaaataaggaaatcctgtcacacgcagcaacatggatgaacctcgaggacattatgctgagtgaaataagccagttccagaaagacaaggataaaccagcgcaatggattgggggacgctgcacactttcatcgggggtgtcaacaaacactccaccagcatcgggaaggtgtggatcacagtcatctttattttccgagtcatgatcctcgtggtggctgcccaggaagtgtggggtgacgagcaagaggacttcgtctgcaacacactgcaaccgggatgcaaaaatgtgtgctatgaccactttttcccggtgtcccacatccggctgtgggccctccagctgatcttcgtctccaccccagcgctgctggtggccatgcatgtggcctactacaggcacgaaaccactcgcaagttcaggcgaggagagaagaggaatgatttcaaagacatagaggacattaaaaagcagaaggttcggatagaggggtcgctgtggtggacgtacaccagcagcatctttttccgaatcatctttgaagcagcctttatgtatgtgttttacttcctttacaatgggtaccacctgccctgggtgttgaaatgtgggattgacccctgccccaaccttgttgactgctttatttctaggccaacagagaagaccgtgtttaccatttttatgatttctgcgtctgtgatttgcatgctgcttaacgtggcagagttgtgctacctgctgctgaaagtgtgttttaggagatcaaagagagcacagacgcaaaaaaatcaccccaatcatgccctaaaggagagtaagcagaatgaaatgaatgagctgatttcagatagtggtcaaaatgcaatcacaggtttcccaagctaaacatttcaaggtaaaatgtagctgcgtcataaggagacttctgtcttctccagaaggcaataccaacctgaaagttccttctgtagcctgaagagtttgtaaatgactttcataataaatagacacttgagttaactttttgtaggatacttgctccattcatacacaacgtaatcaaatatgtggtccatctctgaaaacaagagactgcttgacaaaggagcattgcagtcactttgacaggttccttttaagtggactctctgacaaagtgggtactttctgaaaatttatataactgttgttgataaggaacatttatccaggaattgatacgtttattaggaaaagatatttttataggcttggatgtttttagttctgactttgaatttatataaagtatttttataatgactggtcttccttacctggaaaaacatgcgatgttagttttagaattacaccacaagtatctaaatttggaacttacaaagggtctatcttgtaaatattgttttgcattgtctgttggcaaatttgtgaactgtcatgatacgcttaaggtggaaagtgttcattgcacaatatatttttactgctttctgaatgtagacggaacagtgtggaagcagaa

SEQ ID NO: 8423 - DNA, 2243 bp, Homo sapiens
  source 1..2243: mol_type = unassigned DNA
ggggaacaatggggcccttgagggcccctcctccagcccccattgtgcttggtggtgagaggtggccctggctcggccacacaccctcggggaggaccagcatccaagcaggtggaagggctctgagggagactggaattttctggcctggagaaggacccgcccgcccgcccctatgaccaacatgagctggagcttcctgacgcggctgctggaggagatccacaaccactccaccttcgtgggcaaggtgtggctcacggtgctggtggtcttccgcatcgtgctgacggctgtgggcggcgaggccatctactcggacgagcaggccaagttcacttgcaacacgcggcagccaggctgcgacaacgtctgctatgacgccttcgcgcccctgtcgcacgtgcgcttctgggtcttccagattgtggtcatctccacgccctcggtcatgtacctgggctacgccgtgcaccgcctggcccgtgcgtctgagcaggagcggcgccgcgccctccgccgccgcccggggccacgccgcgcgccccgagcgcacctgccgcccccgcacgccggctggcctgagcccgccgacctgggcgaggaggagcccatgctgggcctgggcgaggaggaggaggaggaggagacgggggcagccgagggcgccggcgaggaagcggaggaggcaggcgcggaggaggcgtgcactaaggcggtcggcgctgacggcaaggcggcagggaccccgggcccgaccgggcaacacgatgggcggaggcgcatccagcgggagggcctgatgcgcgtgtacgtggcccagctggtggccagggcagctttcgaggtggccttcctggtgggccagtacctgctgtacggcttcgaggtgcgaccgttctttccctgcagccgccagccctgcccgcacgtggtggactgcttcgtgtcgcgccctactgaaaagacggtcttcctgctggttatgtacgtggtcagctgcctgtgcctgctgctcaacctctgtgagatggcccacctgggcttgggcagcgcgcaggacgcggtgcgcggccgccgcggccccccggcctccgcccccgcccccgcgccgcggcccccgccctgcgccttccctgcggcggccgctggcttggcctgcccgcccgactacagcctggtggtgcgggcggccgagcgcgctcgggcgcatgaccagaacctggcaaacctggccctgcaggcgctgcgcgacggggcagcggctggggaccgcgaccgggacagttcgccgtgcgtcggcctccctgcggcctcccgggggccccccagagcaggcgcccccgcgtcccggacgggcagtgctacctctgcgggcactgtcggggagcagggccggcccggcacccacgagcggccaggagccaagcccagggctggctccgagaagggcagtgccagcagcagggacgggaagaccaccgtgtggatctgagggcgctggcttgcgagctgggccagggaggaggagggttggggggctccggtggaaacctgcgaccccttctcctcagccttctccttagccggtggcctcaggcagactctgcccagaggggcagccaggctgctcagggaaggggctgaaagcggcagaggagtgccctggcttggtcaccactggggccaaggtggggtggagagaggcctaggagccagaaagggccctctgctgtggtctgaaccccagggggagtggggcattgactccacccctgtcctgagctggaataggtcctctgggatgccagctctcccctttgtgcttccctgcagcaacccatggagggcccagggtgcctggtatgggcatcagttggtgggggtgcgggggtgcgtgtccccattccctgcaacagcaaatggggctccttcttcagccctccccttcccagccccaaactgagacagactgggagctgggagcctggggtggacaggaccataccctctttgagcttctgcgatgccggccttccgttcctctgggaggcttgaagttctgcaaagatgttgatatgccttgcagcttggacccaatgggtggtggtcagggcctgggggcttggccatgctgggggaatggggctctgggttcctgcctgtggcctgtctgtcctcctccctaattcagacccagcctcaagaggaaagggagtaaaataaaactaacttgtttataa

SEQ ID NO: 8424 - DNA, 1116 bp, Homo sapiens
  source 1..1116: mol_type = unassigned DNA
atgtgtggcaggttcctgcggcggctgctggcggaggagagccggcgctccacccccgtggggcgcctcttgcttcccgtgctcctgggattccgccttgtgctgctggctgccagtgggcctggagtctatggtgatgagcagagtgaattcgtgtgtcacacccagcagccgggctgcaaggctgcctgcttcgatgccttccaccccctctccccgctgcgtttctgggtcttccaggtcatcttggtggctgtacccagcgccctctatatgggtttcactctgtatcacgtgatctggcactgggaattatcaggaaaggggaaggaggaggagaccctgatccagggacgggagggcaacacagatgtcccaggggctggaagcctcaggctgctctgggcttatgtggctcagctgggggctcggcttgtcctggagggggcagccctggggttgcagtaccacctgtatgggttccagatgcccagctcctttgcatgtcgccgagaaccttgccttggtagtataacctgcaatctgtcccgcccctctgagaagaccattttcctaaagaccatgtttggagtcagcggtttctgtctcttgtttacttttttggagcttgtgcttctgggtttggggagatggtggaggacctggaagcacaaatcttcctcttctaaatacttcctaacttcagagagcaccagaagacacaagaaagcaaccgatagcctcccagtggtggaaaccaaagagcaatttcaagaagcagttccaggaagaagcttagcccaggaaaaacaaagaccagttggacccagagatgcctgagttggagatgaactttggccaactttcctcatcaccatacttaaaatcctgtccaaggaggagcttattcaccattttctatacatgtgacatatgtagcagcataaccgacaactgggactgcgctgccttgactccacctctacatacaatgactcagctaaccagactaataaaagccatgtttgcaccattgctcagggaggcattgctttggggaattattcccagtgtcctccttacttatcgcaagtaataaaatccccctgggaaatc

SEQ ID NO: 8425 - DNA, 2889 bp, Homo sapiens
  source 1..2889: mol_type = unassigned DNA
gctcggccctggcctcgcaggctgccgcgccggagcgccaggtgcccgctgaagtagcaggaacagagccggtgttcggaccctcccctggcccccaacctgcggcggagagcggcgctgagacttctcctgggcgggcgagcgctggaggacctgcaggctgccaccccgccccgcccctcgtcccggcgtccgcgggatccagacccgaaccccggacggcgcccgaggttcgtgccctctctctagaccgcgccaactgccccatcggtcgggacgcgcttggatttctttccccatttcttctcttttaagtacaataaaaggaaagggggattcgaggattttttaaaaaattgcttctttaattgggaggcaattcactcccattctggaagtgcggcccggggaggggccaggagcgggaacgtgcccggtgctgcccagtctttgtctgctgcctccggatgcacagcgatgggggaatggaccatcttggagaggctgctagaagccgcggtgcagcagcactccactatgatcgggaggatcctgttgactgtggtggtgatcttccggatcctcattgtggccattgtgggggagacggtgtacgatgatgagcagaccatgtttgtgtgcaacaccctgcagcccggctgtaaccaggcctgctatgaccgcgccttccccatctcccacatacgttactgggtcttccagatcataatggtgtgtacccccagtctttgcttcatcacctactctgtgcaccagtccgccaagcagcgagaacgccgctactctacagtcttcctagccctggacagagacccccctgagtccataggaggtcctggaggaactgggggtgggggcagtggtgggggcaaacgagaagataagaagttgcaaaatgctattgtgaatggggtgctgcagaacacagagaacaccagtaaggagacagagccagattgtttagaggttaaggagctgactccacacccatcaggtctacgcactgcatcaaaatccaagctcagaaggcaggaaggcatctcccgcttctacattatccaagtggtgttccgaaatgccctggaaattgggttcctggttggccaatattttctctatggctttagtgtcccagggttgtatgagtgtaaccgctacccctgcatcaaggaggtggaatgttatgtgtcccggccaactgagaagactgtctttctagtgttcatgtttgctgtaagtggcatctgtgttgtgctcaacctggctgaactcaaccacctgggatggcgcaagatcaagctggctgtgcgaggggctcaggccaagagaaagtcaatctatgagattcgtaacaaggacctgccaagggtcagtgttcccaattttggcaggactcagtccagtgactctgcctatgtgtgagagggcaggtttcatgaaggtctgggggatggcaaggagccccaaggcagatgactgctcagacgtggctgtatccaccctcatttatgtgaccctcaccattaagatgtaggataagactggataaaagaagattttgcaccaatgggaaaggaggaaaagtggacccattttcacatatcacctaattggttctacagagacgattgggtagagtgatgaaatggatcaattagacttctttggtccctttctgtttatggcctagcctgatcctgataacactgaacttgcacagctaccaagtaggacttagccctgctgagctctttattctggtgaatggtgtgagttgagtacttcattgatataaaatttgtgacctatctcaacccatccctttatcctgagccatgggacaaacatccttgaggcactcttcatgtatctcccccaccagcatgcccctttccctcaatccaaaatagcatgccagctttttttttttttttttttttttttccagaatctggccttacattagacctaatatgttttatttgcaaacttagagggaattacatggggtgcttattggagaacggccatggcagaggttttcattagagccccatctgactggcccttagtcgtgatgaaaaccttaggaatgtctcaatatttccagttttctaactcaaactgcactggtgctgtttactagggatgggggatgggtgggagggagggaattgcaatatgcaactacaacacttttgtgagattgttgttgcacagttaggcacacggttacgagcttcaggatatttctgccttccagcttgtggactttggttaacattaaaaagattttttttggctaatatcaagagtgtctagctgagccacagcatttgtaactggtgtatctcactcattttcttacatagttttgttgtgcaacacagctgcacggtcattttgccatgatttgaatttacctgtgtgcttacaccagagaccttaatcatcccatgtcaatcctgatttattattttttcagttactctttgaaacacacacacatatacagacacacatacaaaattactggcttaaaagacctgcaactaaacactattggctaacgtgtgtttacggtgacttatttgagacatataccaaaggttcaaaaacctattgcattggactgtcaatatgttttcttctttttgctcttatttatttaagtgccatactgtacctttcatatccactgtgtatttagttaaaatattggccaagagaaacatctgggtaatgtgcttttatgaagccctttgttccctttgaattatcattatcatttttgatttagatatggacatggtgtaacacacaactaaggatttgtttaaaataaagttcttgcctttttttgtaaaa

SEQ ID NO: 8426 - DNA, 4170 bp, Homo sapiens
  source 1..4170: mol_type = unassigned DNA
gctttatttttcaattcttcctagtcccggttttgcatttctaatgacagtgaactgacaaagcgtgaaagtggtctaaggagcaaaacaaagccagcaagcctgcttctggtgtgccaagattaatcaatattccagaaacctcggggtttccccctcctccctgtgcggtttccattccccactcctcctttcccgggcacagactcctccccttttcttaagttgccctgatagtaacttgcagtttcagagcacatgcacactgtcagggctagcctgcctgcttacgcgcgctgcggattgttgctccgttgtacctgctggggaattcacctcgttactgcttgatatcttccaccccttacaaaatcagaaaagttgtgttttctaataccaaagaggaggtttggctttctgtgggtgattcccagacactgaagtgcaaagaagagaccctcctagaaaagtaaaatatgactaaaagcaatggagaagagcccaagatggggggcaggatggagagattccagcagggagtccgtaaacgcacacttttggccaagaagaaagtgcagaacattacaaaggaggatgttaaaagttacctgtttcggaatgcttttgtgctgctcacagtcaccgctgtcattgtgggtacaatccttggatttaccctccgaccatacagaatgagctaccgggaagtcaagtacttctcctttcctggggaacttctgatgaggatgttacagatgctggtcttaccacttatcatctccagtcttgtcacaggaatggcggcgctagatagtaaggcatcagggaagatgggaatgcgagctgtagtctattatatgactaccaccatcattgctgtggtgattggcataatcattgtcatcatcatccatcctgggaagggcacaaaggaaaacatgcacagagaaggcaaaattgtacgagtgacagctgcagatgccttcctggacttgatcaggaacatgttccctccaaatctggtagaagcctgctttaaacagtttaaaaccaactatgagaagagaagctttaaagtgcccatccaggccaacgaaacgcttgtgggtgctgtgataaacaatgtgtctgaggccatggagactcttacccgaatcacagaggagctggtcccagttccaggatctgtgaatggagtcaatgccctgggtctagttgtcttctccatgtgcttcggttttgtgattggaaacatgaaggaacaggggcaggccctgagagagttctttgattctcttaacgaagccatcatgagactggtagcagtaataatgtggtatgcccccgtgggtattctcttcctgattgctgggaagattgtggagatggaagacatgggtgtgattggggggcagcttgccatgtacaccgtgactgtcattgttggcttactcattcacgcagtcatcgtcttgccactcctctacttcttggtaacacggaaaaacccttgggtttttattggagggttgctgcaagcactcatcaccgctctggggacctcttcaagttctgccaccctacccatcaccttcaagtgcctggaagagaacaatggcgtggacaagcgcgtcaccagattcgtgctccccgtaggagccaccattaacatggatgggactgccctctatgaggctttggctgccattttcattgctcaagttaacaactttgaactgaacttcggacaaattattacaatcagcatcacagccacagctgccagtattggggcagctggaattcctcaggcgggcctggtcactatggtcattgtgctgacatctgtcggcctgcccactgacgacatcacgctcatcatcgcggtggactggttcctggatcgcctccggaccaccaccaacgtactgggagactccctgggagctgggattgtggagcacttgtcacgacatgaactgaagaacagagatgttgaaatgggtaactcagtgattgaagagaatgaaatgaagaaaccatatcaactgattgcacaggacaatgaaactgagaaacccatcgacagtgaaaccaagatgtagactaacataaagaaacactttcttgagcaccaggtgttaaaaaccattataaaatctttccatctcattacagctcattcgctccagcaagcccgtcatcttccctttcctcccttctgataagactggaaaatagtcctccaaaacacaagggaggattttgggtggccaaagtgtacaattttcatcccacaattgaaatttttaaatcatttcatgttagtcttaccgaataaggtaccaagatcacaaatagtgttgatcagatcttacaagtttatgtggcacacaatcctataaatgtgatttttttatataagttaaagagacaaatagtaggctaaaaacattttaaaatcaacttttgaaatttaaaaatctttcagaatacaattcagttttagtttcaaaatgttaacaacttgaattacaaccggttatcagttggacagtaagattttatccctttctcttctgactggtatacctatttcattagtagctaggtgcacatatacatctagcacagctgtgaggacagacagaaggcaaagtttccatgtggccttgagcaagtcccatctcacctctaggcctcagtgtcctcatctataaaatgagggacttccctagaagtcttcatggtctcttccagcccagacatcctgtgatgtcatgaaagcacctgccctctgtttcccctcagaacaccctgtaccatccatggagcacgaggccttcagaaaagacacttcaatgggagtgaacatttctaactaaggacaggatggctgtgtgtggtggtcaccaggtcctgtgagcaaagtgcaggttatgcaagtcgccaggcaggaggccattccaggagtgggattattcatcaaactctttgcccagttcatcccaatgggggaagtattcccttctttcctactctgggaagaatgtctcctgccactcctcaactgatgatagacttcgaaaacagatgagaagactagcagctagcaagggtgcttgtggtcacactgtggaacactaaagagctaggaaagagttgagcacaggcaacattacaaacaaaggatttgaaaacaccaagagtacaggtcttctttaaggaagaataaaaaagaagaggttcatttttctggctttttttttcacctgaaacactttttctcgagtccaaaatcattccccccgtgaagtctgcttaccaaaacataagacgacttatatatttgaaagaagtcaaatgaatgagctctctaatagaagtccatgagttgagtgggtatttcttatttgaaagtgtttttctttaatcaaaagtccttagaatgagggaaacaaaatatttatttgttttggaatcccacttatcaaatcattcaaaactttcagctggagtggggtttgcttttgttttgtttgtgtccataagagaaatggtagaagatgaatcagtatgaagacactgtcaatgaggttatgagaaaaaaacagcaggggcattagtttcaggcaaggcagctcccaggtttagagattaatttttaccccctaaggaatatccagtcaaagacgctgagtgggagctgtcaggcagtagcagctgtgtttgagtttctggctgaaaatggtgaagaatggacttaattatgctaacaaactgaaaaatctagacatagatcctctgatatacaattagagatatttttatatagaccccaagcattctgtgcataaaagttaacattaggctgtggtgcagtaaccatttaatgtcgaggctctatttcggaaatacactacaaatgttaaagtacgtggctgtcctcttaagacactagtagagcaaagacttaatcatatcaacttaattctgttacacaatatgtgttttttaatatactaaccatttcttatggaaaggtcctgtggggagcccatcctctcgccaagccatcacaggctctgcatacacatgcactcagtgtggactgggaagcattactttgtagatgtattttcaataaagaaaaaaatagttttacattaa

SEQ ID NO: 8427 - DNA, 784 bp, Homo sapiens
  source 1..784: mol_type = unassigned DNA
aaaacaaagccagcaagcctgcttctggtgtgccaagattaatcaatattccagaaacctcggggtttccccctcctccctgtgcggtttccattccccactcctcctttcccgggcacagactcctccccttttcttaagttgccctgatagtaacttgcagtttcagagcacatgcacactgtcagggctagcctgcctgcttacgcgcgctgcggattgttgctccgttgtacctgctggggaattcacctcgttactgcttgatatcttccaccccttacaaaatcagaaaagtcatttgcgaggagtcctttggtttccagttacctcccccacaggcgcacacgctggctgcttgcgttggcagcgacacacatccatgttgtgttttctaataccaaagaggaggtttggctttctgtgggtgattcccagacactgaagtgcaaagaagagaccctcctagaaaagtaaaatatgactaaaagcaatggagaagagcccaagatggggggcaggatggagagattccagcagggagtccgtaaacgcacacttttggccaagaagaaagtgcagaacattacaaaggaggatgttaaaagttacctgtttcggaatgcttttgtgctgctcacagtcaccgctgtcattgtgggtacaatccttggatttaccctccgaccatacagaatgagctaccgggaagtcaagtacttctcctttcctggggaacttctgatgaggatgttacagatgctggtcttaccacttatcatct

SEQ ID NO: 8428 - DNA, 583 bp, Homo sapiens
  source 1..583: mol_type = unassigned DNA
acatgcacactgtcagggctagcctgcctgcttacgcgcgctgcggattgttgctccgttgtacctgctggggaattcacctcgttactgcttgatatcttccaccccttacaaaatcagaaaagtcatttgcgaggagtcctttggtttccagttacctcccccacaggcgcacacgctggctgcttgcgttggcagcgacacacatccatgttgtgttttctaataccaaagaggaggtttggctttctgtgggtgattcccagacactgaagtgcaaagaagagaccctcctagaaaagtaaaatatgactaaaagcaatggagaagagcccaagatggggggcaggatggagagattccagcagggagtccgtaaacgcacacttttggccaagaagaaagtgcagaacattacaaaggaggatgttaaaagttacctgtttcggaatgcttttgtgctgctcacagtcaccgctgtcattgtgggtgagtcatttgattaaaaacaaaaaaacctgtatcttgtttctctggggcatctggctgcccggggaatattatcagatgaactagttgtagg

SEQ ID NO: 8429 - DNA, 1096 bp, Homo sapiens
  source 1..1096: mol_type = unassigned DNA; mol_type = unassigned DNA
acatgcacactgtcagggctagcctgcctgcttacgcgcgctgcggattgttgctccgttgtacctgctggggaattcacctcgttactgcttgatatcttccaccccttacaaaatcagaaaagttgtgttttctaataccaaagaggaggtttggctttctgtgggtgattcccagacactgaagtgcaaagaagagaccctcctagaaaagtaaaatatgactaaaagcaatggagaagagcccaagatggggggcaggatggagagattccagcagggagtccgtaaacgcacacttttggccaagaagaaagtgcagaacattacaaaggaggatgttaaaagttacctgtttcggaatgcttttgtgctgctcacagtcaccgctgtcattgtgggtgagtcatttgattaaaaacaaaaaaacctgtatcttgtttctctggggcatctggctgcccggggaatattatcagatgaactagttgtaggtatcaaaatggtagcctaggctttcctctgaacttgatgatttttctccataaaaatgactgttttggcttgtttggagcaatatatagtaaacacatcattaggcatcattaggcattatgcaaatcaattgtgtgaggaagaaaaataaataaaatattttcccatttcatgtaaggataaggaagtgatcatttaatcattaggcatgacaaagcaagcatgctagatttggccaaaatgtaattatatacaatgtcagttgcacttaaaactaatttatacaattagtacacctaaaatgacatgttggttccaaatagtaattatattctaactggtgctgacttgaagctgagtatcaacgcttaggcacagagaccgaatattttatgtgtttgcactctctcacccagcaactgggaaaggtagattggggaaaatgttaacacagatctctttcattcattgctttgcagagcctgccataaccagctatacctttttttgaatcatttccatctcttactaatttagcagggttgacagcaatctgtactaataaaatattattgttttgttttgtttattgatcttaaaa

SEQ ID NO: 8430 - DNA, 558 bp, Homo sapiens
  source 1..558: mol_type = unassigned DNA; mol_type = unassigned DNA
acactgtcagggctagcctgcctgcttacgcgcgctgcggattgttgctccgttgtacctgctggggaattcacctcgttactgcttgatatcttccaccccttacaaaatcagaaaagttgtgttttctaataccaaagaggaggtttggctttctgtgggtgattcccagacactgaagtgcaaagaagagaccctcctagaaaagtaaaatatgactaaaagcaatggagaagagcccaagatggggggcaggatggagagattccagcagggagtccgtaaacgcacacttttggccaagaagaaagtgcagaacattacaaaggaggatgttaaaagttacctgtttcggaatgcttttgtgctgctcacagtcaccgctgtcattgtggatgaaaaaactgaagcccaaatccttaccacacagctgatgaatactgagtgggattcaaatccaccattccggctccaggtgctcattcaccacactgttctgggtgctataacacccattctggctttactccagcaatttgctgagggtctgcctgaggt

SEQ ID NO: 8431 - DNA, 1137 bp, Homo sapiens
  source 1..1137: mol_type = unassigned DNA; mol_type = unassigned DNA
acactgtcagggctagcctgcctgcttacgcgcgctgcggattgttgctccgttgtacctgctggggaattcacctcgttactgcttgatatcttccaccccttacaaaatcagaaaagttgtgttttctaataccaaagaggaggtttggctttctgtgggtgattcccagacactgaagtgcaaagaagagaccctcctagaaaagtaaaatatgactaaaagcaatggagaagagcccaagatggggggcaggatggagagattccagcagggagtccgtaaacgcacacttttggccaagaagaaagtgcagaacattacaaaggaggatgttaaaagttacctgtttcggaatgcttttgtgctgctcacagtcaccgctgtcattgtggatgaaaaaactgaagcccaaatccttaccacacagctgatgaatactgagtgggattcaaatccaccattccggctccaggtgctcattcaccacactgttctgggtgctataacacccattctggctttactccagcaatttgctgagggtctgcctgaggtagcaacggaagagatggaaaagagaggtcgaactgaaagcccactggtgagacttggcaattgattcaatgagagaaggtggactgcagaccaatggcccgctttctggtttaggtggcagagtggctgatgatgccacatttgaaggtaggatacaggagaaagactggggccttgggggtgcacgagggtaagttcagtttggacctgttgagtttgtggggcgggatgccaccgaggtgcatatacaatggaagaagcttgctgcaaatcaagatttagaaggtattcctacaacctccaaactgaacgaagacagttctgtctttggatttcaagtgaataaggatcagtgaatcgggctatcctactgcataaatgagtctactctgtaagtgagtctattctcagaacagtttccgtaactctagggccctctccttcatgcttaaaagcactaatctttcagaaatgctgtagtggtgttctgtgcctggacgtaactgaccaagccagttaggtcagccaagcaggttaatcaatgtggtttgctatcagctgctggactgaactgacctg

SEQ ID NO: 8432 - DNA, 540 bp, Homo sapiens
  source 1..540: mol_type = unassigned DNA; mol_type = unassigned DNA
ggtgtctgtttatgccgggtccgctgttaattcggagttgagtcattcggggtggattgggggcagattgtggcgcgagatctagaaaaggatcaaggttgagcggatctgcttaaaagtgactgttgtgttttctaataccaaagaggaggtttggctttctgtgggtgattcccagacactgaagtgcaaagaagagaccctcctagaaaagtaaaatatgactaaaagcaatggagaagagcccaagatggggggcaggatggagagattccagcagggagtccgtaaacgcacacttttggccaagaagaaagtgcagaacattacaaaggaggatgttaaaagttacctgtttcggaatgcttttgtgctgctcacagtcaccgctgtcattgtgggtacaatccttggatttaccctccgaccatacagaatgagctaccgggaagtcaagtacttctcctttcctggggaacttctgatgaggatgttacagatgctggtcttaccacttatcatctccagtcttgtcacagg

SEQ ID NO: 8433 - DNA, 566 bp, Homo sapiens
  source 1..566: mol_type = unassigned DNA; mol_type = unassigned DNA
acactgcaaccttgaggtctggtattgtggctctccagtccttgattcctgctgagattatgcaatttgccaagagcttgcctggtgtggagcagcactgatttctcacccctggaggctataactcatgtctctttttctcccattctagttgtgttttctaataccaaagaggaggtttggctttctgtgggtgattcccagacactgaagtgcaaagaagagaccctcctagaaaagtaaaatatgactaaaagcaatggagaagagcccaagatggggggcaggatggagagattccagcagggagtccgtaaacgcacacttttggccaagaagaaagtgcagaacattacaaaggaggatgttaaaagttacctgtttcggaatgcttttgtgctgctcacagtcaccgctgtcattgtgggtacaatccttggatttaccctccgaccatacagaatgagctaccgggaagtcaagtacttctcctttcctggggaacttctgatgaggatgttacagatgctggtcttaccacttatcatctccagtcttgtcacagg

SEQ ID NO: 8434 - DNA, 414 bp, Homo sapiens
  source 1..414: mol_type = unassigned DNA; mol_type = unassigned DNA
cgtaaacgcacacttttggccaagaagaaagtgcagaacattacaaaggaggatgttaaaagttacctgtttcggaatgcttttgtgctgctcacagtcaccgctgtcattgtgggtacaatccttggatttaccctccgaccatacagaatgagctaccgggaagtcaagtacttctcctttcctggggaacttctgatgaggatgttacagatgctggtcttaccacttatcatctccagtcttgtcacagataacatctggttggacagcctattagctattgatgcaagaatgcttgttctcagaaccaccaggacttgagcgggagccttcttggaagcctcatcaagagcacatctctgacttggagaaggaatttccatagacactgcccgagcaggatgatttctg

SEQ ID NO: 8435 - DNA, 540 bp, Homo sapiens
  source 1..540: mol_type = unassigned DNA; mol_type = unassigned DNA
accattccggctccaggtgctcattcaccacactgttctgggtgctataacacccattctggctttactccagcaatttgctgagggtctgcctgaggtagcaacggaagagatggaaaagagaggtcgaactgaaagcccactggtgagacttggcaattgattcaatgagagaaggtggactgcagaccaatggcccgctttctggtttaggtggcagagtggctgatgatgccacatttgaaggtacaatccttggatttaccctccgaccatacagaatgagctaccgggaagtcaagtacttctcctttcctggggaacttctgatgaggatgttacagatgctggtcttaccacttatcatctccagtcttgtcacaggaatggcggcgctagatagtaaggcatcagggaagatgggaatgcgagctgtagtctattatatgactaccaccatcattgctgtggtgattggcataatcattgtcatcatcatccatcctgggaagggcacaaaggaaaacatgcacagagaag

SEQ ID NO: 8436 - DNA, 545 bp, Homo sapiens
  source 1..545: mol_type = unassigned DNA; mol_type = unassigned DNA
gtaagttcagtttggacctgttgagtttgtggggcgggatgccaccgaggtgcatatacaatggaagaagcttgctgcaaatcaagatttagaaggtattcctacaacctccaaactgaacgaagacagttctgtctttggatttcaagtgaataaggatcagtgaatcgggctatcctactgcataaatgagtctactctgtacaatccttggatttaccctccgaccatacagaatgagctaccgggaagtcaagtacttctcctttcctggggaacttctgatgaggatgttacagatgctggtcttaccacttatcatctccagtcttgtcacaggaatggcggcgctagatagtaaggcatcagggaagatgggaatgcgagctgtagtctattatatgactaccaccatcattgctgtggtgattggcataatcattgtcatcatcatccatcctgggaagggcacaaaggaaaacatgcacagagaaggcaaaattgtacgagtgacagctgcagatgccttcctggacttgatcagg

SEQ ID NO: 8437 - DNA, 567 bp, Homo sapiens
  source 1..567: mol_type = unassigned DNA; mol_type = unassigned DNA
actgacactgctgatgcctcaccattctagcctcggccttttcccttcaccttgtgagatttggggccaggttctcacaacatgaatggcggcgctagatagtaaggcatcagggaagatgggaatgcgagctgtagtctattatatgactaccaccatcattgctgtggtgattggcataatcattgtcatcatcatccatcctgggaagggcacaaaggaaaacatgcacagagaaggcaaaattgtacgagtgacagctgcagatgccttcctggacttgatcaggaacatgttccctccaaatctggtagaagcctgctttaaacagtttaaaaccaactatgagaagagaagctttaaagtgcccatccaggccaacgaaacgcttgtgggtgctgtgataaacaatgtgtctgaggccatggagactcttacccgaatcacagaggagctggtcccagttccaggatctgtgaatggagtcaatgccctgggtctagttgtcttctccatgtgcttcggttttgtgattggaaacatgaaggaacaggggcaggccctgag

SEQ ID NO: 8438 - DNA, 547 bp, Homo sapiens
  source 1..547: mol_type = unassigned DNA; mol_type = unassigned DNA
agaactaccaggacactcagctgatgtgccctatttcactgttctcagttctgccaccctacccatcaccttcaagtgcctggaagagaacaatggcgtggacaagcgcgtcaccagattcgtgctccccgtaggagccaccattaacatggatgggactgccctctatgaggctttggctgccattttcattgctcaagttaacaactttgaactgaacttcggacaaattattacaatcagcatcacagccacagctgccagtattggggcagctggaattcctcaggcgggcctggtcactatggtcattgtgctgacatctgtcggcctgcccactgacgacatcacgctcatcatcgcggtggactggttcctggatcgcctccggaccaccaccaacgtactgggagactccctgggagctgggattgtggagcacttgtcacgacatgaactgaagaacagagatgttgaaatgggtaactcagtgattgaagagaatgaaatgaagaaaccatatcaactgattgcacaggacaatgaa

SEQ ID NO: 8439 - DNA, 3832 bp, Homo sapiens
  source 1..3832: mol_type = unassigned DNA; mol_type = unassigned DNA
gctttatttttcaattcttcctagtcccggttttgcatttctaatgacagtgaactgacaaagcgtgaaagtggtctaaggagcaaaacaaagccagcaagcctgcttctggtgtgccaagattaatcaatattccagaaacctcggggtttccccctcctccctgtgcggtttccattccccactcctcctttcccgggcacagactcctccccttttcttaagttgccctgatagtaacttgcagtttcagagcacatgcacactgtcagggctagcctgcctgcttacgcgcgctgcggattgttgctccgttgtacctgctggggaattcacctcgttactgcttgatatcttccaccccttacaaaatcagaaaagttgtgttttctaataccaaagaggaggtttggctttctgtgggtgattcccagacactgaagtgcaaagaagagaccctcctagaaaagtaaaatatgactaaaagcaatggagaagagcccaagatggggggcaggatggagagattccagcagggagtccgtaaacgcacacttttggccaagaagaaagtgcagaacattacaaaggaggatgttaaaagttacctgtttcggaatgcttttgtgctgctcacagtcaccgctgtcattgtgggtacaatccttggatttaccctccgaccatacagaatgagctaccgggaagtcaagtacttctcctttcctggggaacttctgatgaggatgttacagatgctggtcttaccacttatcatctccagtcttgtcacaggaatggcggcgctagatagtaaggcatcagggaagatgggaatgcgagctgtagtctattatatgactaccaccatcattgctgtggtgattggcataatcattgtcatcatcatccatcctgggaagggcacaaaggaaaacatgcacagagaaggcaaaattgtacgagtgacagctgcagatgccttcctggacttgatcaggtatgcccccgtgggtattctcttcctgattgctgggaagattgtggagatggaagacatgggtgtgattggggggcagcttgccatgtacaccgtgactgtcattgttggcttactcattcacgcagtcatcgtcttgccactcctctacttcttggtaacacggaaaaacccttgggtttttattggagggttgctgcaagcactcatcaccgctctggggacctcttcaagttctgccaccctacccatcaccttcaagtgcctggaagagaacaatggcgtggacaagcgcgtcaccagattcgtgctccccgtaggagccaccattaacatggatgggactgccctctatgaggctttggctgccattttcattgctcaagttaacaactttgaactgaacttcggacaaattattacaatcagcatcacagccacagctgccagtattggggcagctggaattcctcaggcgggcctggtcactatggtcattgtgctgacatctgtcggcctgcccactgacgacatcacgctcatcatcgcggtggactggttcctggatcgcctccggaccaccaccaacgtactgggagactccctgggagctgggattgtggagcacttgtcacgacatgaactgaagaacagagatgttgaaatgggtaactcagtgattgaagagaatgaaatgaagaaaccatatcaactgattgcacaggacaatgaaactgagaaacccatcgacagtgaaaccaagatgtagactaacataaagaaacactttcttgagcaccaggtgttaaaaaccattataaaatctttccatctcattacagctcattcgctccagcaagcccgtcatcttccctttcctcccttctgataagactggaaaatagtcctccaaaacacaagggaggattttgggtggccaaagtgtacaattttcatcccacaattgaaatttttaaatcatttcatgttagtcttaccgaataaggtaccaagatcacaaatagtgttgatcagatcttacaagtttatgtggcacacaatcctataaatgtgatttttttatataagttaaagagacaaatagtaggctaaaaacattttaaaatcaacttttgaaatttaaaaatctttcagaatacaattcagttttagtttcaaaatgttaacaacttgaattacaaccggttatcagttggacagtaagattttatccctttctcttctgactggtatacctatttcattagtagctaggtgcacatatacatctagcacagctgtgaggacagacagaaggcaaagtttccatgtggccttgagcaagtcccatctcacctctaggcctcagtgtcctcatctataaaatgagggacttccctagaagtcttcatggtctcttccagcccagacatcctgtgatgtcatgaaagcacctgccctctgtttcccctcagaacaccctgtaccatccatggagcacgaggccttcagaaaagacacttcaatgggagtgaacatttctaactaaggacaggatggctgtgtgtggtggtcaccaggtcctgtgagcaaagtgcaggttatgcaagtcgccaggcaggaggccattccaggagtgggattattcatcaaactctttgcccagttcatcccaatgggggaagtattcccttctttcctactctgggaagaatgtctcctgccactcctcaactgatgatagacttcgaaaacagatgagaagactagcagctagcaagggtgcttgtggtcacactgtggaacactaaagagctaggaaagagttgagcacaggcaacattacaaacaaaggatttgaaaacaccaagagtacaggtcttctttaaggaagaataaaaaagaagaggttcatttttctggctttttttttcacctgaaacactttttctcgagtccaaaatcattccccccgtgaagtctgcttaccaaaacataagacgacttatatatttgaaagaagtcaaatgaatgagctctctaatagaagtccatgagttgagtgggtatttcttatttgaaagtgtttttctttaatcaaaagtccttagaatgagggaaacaaaatatttatttgttttggaatcccacttatcaaatcattcaaaactttcagctggagtggggtttgcttttgttttgtttgtgtccataagagaaatggtagaagatgaatcagtatgaagacactgtcaatgaggttatgagaaaaaaacagcaggggcattagtttcaggcaaggcagctcccaggtttagagattaatttttaccccctaaggaatatccagtcaaagacgctgagtgggagctgtcaggcagtagcagctgtgtttgagtttctggctgaaaatggtgaagaatggacttaattatgctaacaaactgaaaaatctagacatagatcctctgatatacaattagagatatttttatatagaccccaagcattctgtgcataaaagttaacattaggctgtggtgcagtaaccatttaatgtcgaggctctatttcggaaatacactacaaatgttaaagtacgtggctgtcctcttaagacactagtagagcaaagacttaatcatatcaacttaattctgttacacaatatgtgttttttaatatactaaccatttcttatggaaaggtcctgtggggagcccatcctctcgccaagccatcacaggctctgcatacacatgcactcagtgtggactgggaagcattactttgtagatgtattttcaataaagaaaaaaatagttttacatt

SEQ ID NO: 8440 - DNA, 3652 bp, Homo sapiens
  source 1..3652: mol_type = unassigned DNA; mol_type = unassigned DNA
ttgtgttttctaataccaaagaggaggtttggctttctgtgggtgattcccagacactgaagtgcaaagaagagaccctcctagaaaagtaaaatatgactaaaagcaatggagaagagcccaagatggggggcaggatggagagattccagcagggagtccgtaaacgcacacttttggccaagaagaaagtgcagaacattacaaaggaggatgttaaaagttacctgtttcggaatgcttttgtgctgctcacagtcaccgctgtcattgtgggtacaatccttggatttaccctccgaccatacagaatgagctaccgggaagtcaagtacttctcctttcctggggaacttctgatgaggatgttacagatgctggtcttaccacttatcatctccagtcttgtcacaggaatggcggcgctagatagtaaggcatcagggaagatgggaatgcgagctgtagtctattatatgactaccaccatcattgctgtggtgattggcataatcattgtcatcatcatccatcctgggaagggcacaaaggaaaacatgcacagagaaggcaaaattgtacgagtgacagctgcagatgccttcctggacttgatcaggaacatgttccctccaaatctggtagaagcctgctttaaacagtttaaaaccaactatgagaagagaagctttaaagtgcccatccaggccaacgaaacgcttgtgggtgctgtgataaacaatgtgtctgaggccatggagactcttacccgaatcacagaggagctggtcccagttccaggatctgtgaatggagtcaatgccctgggtctagttgtcttctccatgtgcttcggttttgtgattggaaacatgaaggaacaggggcaggccctgagagagttctttgattctcttaacgaagccatcatgagactggtagcagtaataatgtggtatgcccccgtgggtattctcttcctgattgctgggaagattgtggagatggaagacatgggtgtgattggggggcagcttgccatgtacaccgtgactgtcattgttggcttactcattcacgcagtcatcgtcttgccactcctctacttcttggtaacacggaaaaacccttgggtttttattggagggttgctgcaagcactcatcaccgctctggggacctcttcaagttctgccaccctacccatcaccttcaagtgcctggaagagaacaatggcgtggacaagcgcgtcaccagattcgtgctccccgtaggagccaccattaacatggatgggactgccctctatgaggctttggctgccattttcattgctcaagttaacaactttgaactgaacttcggacaaattattacaatcagggatcgcctccggaccaccaccaacgtactgggagactccctgggagctgggattgtggagcacttgtcacgacatgaactgaagaacagagatgttgaaatgggtaactcagtgattgaagagaatgaaatgaagaaaccatatcaactgattgcacaggacaatgaaactgagaaacccatcgacagtgaaaccaagatgtagactaacataaagaaacactttcttgagcaccaggtgttaaaaaccattataaaatctttccatctcattacagctcattcgctccagcaagcccgtcatcttccctttcctcccttctgataagactggaaaatagtcctccaaaacacaagggaggattttgggtggccaaagtgtacaattttcatcccacaattgaaatttttaaatcatttcatgttagtcttaccgaataaggtaccaagatcacaaatagtgttgatcagatcttacaagtttatgtggcacacaatcctataaatgtgatttttttatataagttaaagagacaaatagtaggctaaaaacattttaaaatcaacttttgaaatttaaaaatctttcagaatacaattcagttttagtttcaaaatgttaacaacttgaattacaaccggttatcagttggacagtaagattttatccctttctcttctgactggtatacctatttcattagtagctaggtgcacatatacatctagcacagctgtgaggacagacagaaggcaaagtttccatgtggccttgagcaagtcccatctcacctctaggcctcagtgtcctcatctataaaatgagggacttccctagaagtcttcatggtctcttccagcccagacatcctgtgatgtcatgaaagcacctgccctctgtttcccctcagaacaccctgtaccatccatggagcacgaggccttcagaaaagacacttcaatgggagtgaacatttctaactaaggacaggatggctgtgtgtggtggtcaccaggtcctgtgagcaaagtgcaggttatgcaagtcgccaggcaggaggccattccaggagtgggattattcatcaaactctttgcccagttcatcccaatgggggaagtattcccttctttcctactctgggaagaatgtctcctgccactcctcaactgatgatagacttcgaaaacagatgagaagactagcagctagcaagggtgcttgtggtcacactgtggaacactaaagagctaggaaagagttgagcacaggcaacattacaaacaaaggatttgaaaacaccaagagtacaggtcttctttaaggaagaataaaaaagaagaggttcatttttctggctttttttttcacctgaaacactttttctcgagtccaaaatcattccccccgtgaagtctgcttaccaaaacataagacgacttatatatttgaaagaagtcaaatgaatgagctctctaatagaagtccatgagttgagtgggtatttcttatttgaaagtgtttttctttaatcaaaagtccttagaatgagggaaacaaaatatttatttgttttggaatcccacttatcaaatcattcaaaactttcagctggagtggggtttgcttttgttttgtttgtgtccataagagaaatggtagaagatgaatcagtatgaagacactgtcaatgaggttatgagaaaaaaacagcaggggcattagtttcaggcaaggcagctcccaggtttagagattaatttttaccccctaaggaatatccagtcaaagacgctgagtgggagctgtcaggcagtagcagctgtgtttgagtttctggctgaaaatggtgaagaatggacttaattatgctaacaaactgaaaaatctagacatagatcctctgatatacaattagagatatttttatatagaccccaagcattctgtgcataaaagttaacattaggctgtggtgcagtaaccatttaatgtcgaggctctatttcggaaatacactacaaatgttaaagtacgtggctgtcctcttaagacactagtagagcaaagacttaatcatatcaacttaattctgttacacaatatgtgttttttaatatactaaccatttcttatggaaaggtcctgtggggagcccatcctctcgccaagccatcacaggctctgcatacacatgcactcagtgtggactgggaagcattactttgtagatgtattttcaataaagaaaaaaatagttttacatt

SEQ ID NO: 8441 - DNA, 4030 bp, Homo sapiens
  source 1..4030: mol_type = unassigned DNA; mol_type = unassigned DNA
gctttatttttcaattcttcctagtcccggttttgcatttctaatgacagtgaactgacaaagcgtgaaagtggtctaaggagcaaaacaaagccagcaagcctgcttctggtgtgccaagattaatcaatattccagaaacctcggggtttccccctcctccctgtgcggtttccattccccactcctcctttcccgggcacagactcctccccttttcttaagttgccctgatagtaacttgcagtttcagagcacatgcacactgtcagggctagcctgcctgcttacgcgcgctgcggattgttgctccgttgtacctgctggggaattcacctcgttactgcttgatatcttccaccccttacaaaatcagaaaagttgtgttttctaataccaaagaggaggtttggctttctgtgggtgattcccagacactgaagtgcaaagaagagaccctcctagaaaagtaaaatatgactaaaagcaatggagaagagcccaagatggggggcaggatggagagattccagcagggagtccgtaaacgcacacttttggccaagaagaaagtgcagaacattacaaaggaggatgttaaaagttacctgtttcggaatgcttttgtgctgctcacagtcaccgctgtcattgtgggaatggcggcgctagatagtaaggcatcagggaagatgggaatgcgagctgtagtctattatatgactaccaccatcattgctgtggtgattggcataatcattgtcatcatcatccatcctgggaagggcacaaaggaaaacatgcacagagaaggcaaaattgtacgagtgacagctgcagatgccttcctggacttgatcaggaacatgttccctccaaatctggtagaagcctgctttaaacagtttaaaaccaactatgagaagagaagctttaaagtgcccatccaggccaacgaaacgcttgtgggtgctgtgataaacaatgtgtctgaggccatggagactcttacccgaatcacagaggagctggtcccagttccaggatctgtgaatggagtcaatgccctgggtctagttgtcttctccatgtgcttcggttttgtgattggaaacatgaaggaacaggggcaggccctgagagagttctttgattctcttaacgaagccatcatgagactggtagcagtaataatgtggtatgcccccgtgggtattctcttcctgattgctgggaagattgtggagatggaagacatgggtgtgattggggggcagcttgccatgtacaccgtgactgtcattgttggcttactcattcacgcagtcatcgtcttgccactcctctacttcttggtaacacggaaaaacccttgggtttttattggagggttgctgcaagcactcatcaccgctctggggacctcttcaagttctgccaccctacccatcaccttcaagtgcctggaagagaacaatggcgtggacaagcgcgtcaccagattcgtgctccccgtaggagccaccattaacatggatgggactgccctctatgaggctttggctgccattttcattgctcaagttaacaactttgaactgaacttcggacaaattattacaatcagcatcacagccacagctgccagtattggggcagctggaattcctcaggcgggcctggtcactatggtcattgtgctgacatctgtcggcctgcccactgacgacatcacgctcatcatcgcggtggactggttcctggatcgcctccggaccaccaccaacgtactgggagactccctgggagctgggattgtggagcacttgtcacgacatgaactgaagaacagagatgttgaaatgggtaactcagtgattgaagagaatgaaatgaagaaaccatatcaactgattgcacaggacaatgaaactgagaaacccatcgacagtgaaaccaagatgtagactaacataaagaaacactttcttgagcaccaggtgttaaaaaccattataaaatctttccatctcattacagctcattcgctccagcaagcccgtcatcttccctttcctcccttctgataagactggaaaatagtcctccaaaacacaagggaggattttgggtggccaaagtgtacaattttcatcccacaattgaaatttttaaatcatttcatgttagtcttaccgaataaggtaccaagatcacaaatagtgttgatcagatcttacaagtttatgtggcacacaatcctataaatgtgatttttttatataagttaaagagacaaatagtaggctaaaaacattttaaaatcaacttttgaaatttaaaaatctttcagaatacaattcagttttagtttcaaaatgttaacaacttgaattacaaccggttatcagttggacagtaagattttatccctttctcttctgactggtatacctatttcattagtagctaggtgcacatatacatctagcacagctgtgaggacagacagaaggcaaagtttccatgtggccttgagcaagtcccatctcacctctaggcctcagtgtcctcatctataaaatgagggacttccctagaagtcttcatggtctcttccagcccagacatcctgtgatgtcatgaaagcacctgccctctgtttcccctcagaacaccctgtaccatccatggagcacgaggccttcagaaaagacacttcaatgggagtgaacatttctaactaaggacaggatggctgtgtgtggtggtcaccaggtcctgtgagcaaagtgcaggttatgcaagtcgccaggcaggaggccattccaggagtgggattattcatcaaactctttgcccagttcatcccaatgggggaagtattcccttctttcctactctgggaagaatgtctcctgccactcctcaactgatgatagacttcgaaaacagatgagaagactagcagctagcaagggtgcttgtggtcacactgtggaacactaaagagctaggaaagagttgagcacaggcaacattacaaacaaaggatttgaaaacaccaagagtacaggtcttctttaaggaagaataaaaaagaagaggttcatttttctggctttttttttcacctgaaacactttttctcgagtccaaaatcattccccccgtgaagtctgcttaccaaaacataagacgacttatatatttgaaagaagtcaaatgaatgagctctctaatagaagtccatgagttgagtgggtatttcttatttgaaagtgtttttctttaatcaaaagtccttagaatgagggaaacaaaatatttatttgttttggaatcccacttatcaaatcattcaaaactttcagctggagtggggtttgcttttgttttgtttgtgtccataagagaaatggtagaagatgaatcagtatgaagacactgtcaatgaggttatgagaaaaaaacagcaggggcattagtttcaggcaaggcagctcccaggtttagagattaatttttaccccctaaggaatatccagtcaaagacgctgagtgggagctgtcaggcagtagcagctgtgtttgagtttctggctgaaaatggtgaagaatggacttaattatgctaacaaactgaaaaatctagacatagatcctctgatatacaattagagatatttttatatagaccccaagcattctgtgcataaaagttaacattaggctgtggtgcagtaaccatttaatgtcgaggctctatttcggaaatacactacaaatgttaaagtacgtggctgtcctcttaagacactagtagagcaaagacttaatcatatcaacttaattctgttacacaatatgtgttttttaatatactaaccatttcttatggaaaggtcctgtggggagcccatcctctcgccaagccatcacaggctctgcatacacatgcactcagtgtggactgggaagcattactttgtagatgtattttcaataaagaaaaaaatagttttacatt

SEQ ID NO: 8442 - DNA, 4170 bp, Homo sapiens; identical to SEQ ID NO: 8426
  source 1..4170: mol_type = unassigned DNA; mol_type = unassigned DNA

SEQ ID NO: 8443 - DNA, 784 bp, Homo sapiens; identical to SEQ ID NO: 8427
  source 1..784: mol_type = unassigned DNA; mol_type = unassigned DNA

SEQ ID NO: 8444 - DNA, 583 bp, Homo sapiens; identical to SEQ ID NO: 8428
  source 1..583: mol_type = unassigned DNA; mol_type = unassigned DNA

SEQ ID NO: 8445 - DNA, 1096 bp, Homo sapiens; identical to SEQ ID NO: 8429
  source 1..1096: mol_type = unassigned DNA; mol_type = unassigned DNA

SEQ ID NO: 8446 - DNA, 558 bp, Homo sapiens; identical to SEQ ID NO: 8430
  source 1..558: mol_type = unassigned DNA; mol_type = unassigned DNA

SEQ ID NO: 8447 - DNA, 1137 bp, Homo sapiens; identical to SEQ ID NO: 8431
  source 1..1137: mol_type = unassigned DNA; mol_type = unassigned DNA

SEQ ID NO: 8448 - DNA, 540 bp, Homo sapiens; identical to SEQ ID NO: 8432
  source 1..540: mol_type = unassigned DNA; mol_type = unassigned DNA

SEQ ID NO: 8449 - DNA, 566 bp, Homo sapiens; identical to SEQ ID NO: 8433
  source 1..566: mol_type = unassigned DNA; mol_type = unassigned DNA

SEQ ID NO: 8450 - DNA, 414 bp, Homo sapiens; identical to SEQ ID NO: 8434
  source 1..414: mol_type = unassigned DNA; mol_type = unassigned DNA

SEQ ID NO: 8451 - DNA, 540 bp, Homo sapiens; identical to SEQ ID NO: 8435
  source 1..540: mol_type = unassigned DNA; mol_type = unassigned DNA

SEQ ID NO: 8452 - DNA, 545 bp, Homo sapiens; identical to SEQ ID NO: 8436
  source 1..545: mol_type = unassigned DNA; mol_type = unassigned DNA

SEQ ID NO: 8453 - DNA, 567 bp, Homo sapiens; identical to SEQ ID NO: 8437
  source 1..567: mol_type = unassigned DNA; mol_type = unassigned DNA

SEQ ID NO: 8454 - DNA, 547 bp, Homo sapiens; identical to SEQ ID NO: 8438
  source 1..547: mol_type = unassigned DNA; mol_type = unassigned DNA

SEQ ID NO: 8455 - DNA, 3832 bp, Homo sapiens; identical to SEQ ID NO: 8439
  source 1..3832: mol_type = unassigned DNA; mol_type = unassigned DNA

SEQ ID NO: 8456 - DNA, 3652 bp, Homo sapiens; identical to SEQ ID NO: 8440
  source 1..3652: mol_type = unassigned DNA; mol_type = unassigned DNA

SEQ ID NO: 8457 - DNA, 4030 bp, Homo sapiens; identical to SEQ ID NO: 8441
  source 1..4030: mol_type = unassigned DNA; mol_type = unassigned DNA

SEQ ID NO: 8458 - DNA, 3566 bp, Homo sapiens
  source 1..3566: mol_type = unassigned DNA; mol_type = unassigned DNA
gcggccctagtggctggtctttcctgtgcttgggatgttggccttgtagagttacttctgtaatctcaagacagaaactgacagctttgtttgatcaaaattgttacttcaccttgcacattttcaagagttctacaggtttaatgagcacagaaatctgggggaactttcactctccagggctccttcatagaggttctcaaatactccatcagcagaggggagccccagatggcaaaaggacacaggatatgtcatctttcaaatgaaccaataatccattatttgattcttctacctttgtcaaaattcctccagcaacgcctgcagaaaatcacaattcttgatacatagcttgttccaataaagcaccacagcatttctagtgactgcaggcccagctgtcaaactctttcaacttgatagagaatatgtacacaaaacctatagctgtcatcatacttaatagtgaaaaacagaatgttttccagctgacactggggacaaggtaacagtgtcagttcctgccgctcttattcaacacagaaattttagtcatcatactaagacacacaaaaaaaggaataaaaagccacgcagactggaaaggtagaaataaaactctccatatttgcagatgacatgattatctacatggaaaatgccaagtaatacacaaataacctcttaaaattaataggtgagtttgccaaggtcacaggatatgagatcaacatgagaaacacaatcacatttctgtatgctaacaacaaacatgtaaaaactgaaataaaaataataacagtttaaatctcttgagagcaaaggaaatatttaagtataaacctaacaaaacgtgataggatctgatgttgaaaaaatcacacaattctgatgaaagaagtgaaaaaaaaaaaactatttaaatagacagacataccatgttcgtgggttggaagattcaacataataaggatacaattctcaatttgatccataggttgattgcaattcctctcgaaataccaacatggctttttgtagaaacagacaagtttattctaaattttatgtgggaaggcacaagccctagaatactttaaacttgacaaagaagaataaagtgtgtggctgtaaaaccaaactgtaaaaaattaacagttcattgcttgcagtcgaaaaaatgaggaaaagatggacgatctaggaaactttcagggagctaaggtgtcggagagcaaagtatccttgtaaggaatgagacaagataaactccctcccccacacacagtattttcagagaactacattcttggtttcaacctgatgtcataggctgtgttctttgcaacggaagaagcaaagacttcaaagggagaaatcggaagatttcttttttcatcgtagggacttcacatcagcgtttccaaaaccgagtccatcgccttttccctctgcgcagcctctatcccttcctgtgtttcgcatctcaataaacgtccccgccaagtgacttcagcctgaaacatgcggcctcccggactcctctctgtgtcaccgacctcttgcgctcagttctccggagctgccggtttaacctcgcaagtcttcccggaacccgtgccctcctcctgggcagcgttaccaccacgagcgcctacctgagaggacgcctgttctcatccagcctccaccctgcagccgagcaatctccgtaaaacgaacacctggcttagtttctgctggaaaccgttgaatagtccccactgtcttctggaagggtctgggcagctcggcgtggcgtccacggccccaccaggcctctgcctcctgcaggtcccgctacttcgtcaccaaagcgcccgccgcgctcgcatctgctgtgaggctgtgctcgggccgctcccgccgagggaacggccctcccaaggctctgcgccccaattctcgctcgtttgccaagaggtagccgtgtcggggagctagagttctccggggactctctcctgcccctcgtggccctctgtggaaccctcgttttaggatctgcacgccgtttccagtcgcgcgcgcggcacggagaccgcccgctgtgccccgcgctgcgctctctccgcccctctcccgcgcaggcctccctgtgccagccggctgtcgacccaggttaggaagcccgaggtcggggcgttaccccaagggccctcccgcttcccctccgagggcagagaggcgtccgcgcccggacgcactgcgggaacacctggagcgccggcggagctcggctgtccccgcgggagggagcccgacgcgcatccttgggacccggacccggcgcccgcgcctcgggacggatttctgcctcggctgcaggcgcagcgcgcagacctgagcctgccccgcggaaccggggctcgagtcccggcccgagcgcggcgtcggggccagcggagaggggcggaagccgcaagggaccctcggcgcctcggcctggccgcgatgaagtccccgcccctcctcagcccgtgtctctcctggaagagaatggcgggcatctttttcctgccatttatctcatcaggttttgctcctcggtttaagcaggaagagaacttcatgcttggaagagcgcatccgtcccagcctaggtttaattggtctcatctgacccctctggagctgaagaatcgatctgtgggacttggaactgaaagcacaggtcggggtaagccccacttcacactggagggccacaagttcctgatcttcgggggctccatccactatttccgggtgcccagggagtactggagggaccgcctgctgaagctgaaggcctgtggcttcaatactgtcaccacctatgttccgtggaacctgcatgagccagaaagaggcaaatttgacttctctgggaacctggacctggaggccttcgtcctgatggccgcagagatcgggctgtgggtgattctgcgtccaggccgctacatctgcagtgagatggacctcgggggcttgcccagctggctcctgcaagacccccggttactgttgaggacaaccaacaagagcttcattgaagcagttgagaagtattttgaccacctgattcccagagtgattcctctccagtaccgccaggcaggccctgtcatcgcggtgcaagtggagaatgagtatggctcattcaataaggataaaacatacatgccgtatctccacaaggccctgctgagaagagggattgtggagcttctcttgacctctgatggtgagaaacatgtgctgagtggccacaccaaaggagtgttggccgccatcaatttgcaaaaacttcaccaggatactttcaatcagcttcataaagtccagggagccagtatagatgcaggactgctctcagatgcctcacaagcagcaacttcttcctccttatagttcttatctgtgattcttccataattttgtccttctaagcttctgatgcactgaattatgtaaagtgcattcccttcaccagcttgtgcaccctattctgtaactgataataaatggttggtattgca

SEQ ID NO: 8459 - DNA, 2583 bp, Homo sapiens
  source 1..2583: mol_type = unassigned DNA; mol_type = unassigned DNA
atgaagtccccgcccctcctcagcccgtgtctctcctggaagagaatggcgggcatctttttcctgccatttatctcatcaggttttgctcctcggtttaagcaggaagagaacttcatgcttggaagagcgcatccgtcccagcctaggtttaattggtctcatctgacccctctggagctgaagaatcgatctgtgggacttggaactgaaagcacaggtcggggtaagccccacttcacactggagggccacaagttcctgatcttcgggggctccatccactatttccgggtgcccagggagtactggagggaccgcctgctgaagctgaaggcctgtggcttcaatactgtcaccacctatgttccgtggaacctgcatgagccagaaagaggcaaatttgacttctctgggaacctggacctggaggccttcgtcctgatggccgcagagatcgggctgtgggtgattctgcgtccaggccgctacatctgcagtgagatggacctcgggggcttgcccagctggctcctgcaagacccccggttactgttgaggacaaccaacaagagcttcattgaagcagttgagaagtattttgaccacctgattcccagagtgattcctctccagtaccgccaggcaggccctgtcatcgcggtgcaagtggagaatgagtatggctcattcaataaggataaaacatacatgccgtatctccacaaggccctgctgagaagagggattgtggagcttctcttgacctctgatggtgagaaacatgtgctgagtggccacaccaaaggagtgttggccgccatcaatttgcaaaaacttcaccaggatactttcaatcagcttcataaagtccagagagataagccccttctgattatggaatactgggtcggctggttcgacagatggggagataagcaccatgttaaagatgcaaaggaggttgaacatgctgtgtctgaattcatcaaatatgagatctccttcaatgtatatatgttccatggtggaaccaactttggtttcatgaacggggccacatatttcgggaagcactcgggcattgtcaccagctatgactatgatgcagtgctcacggaggctggagattacacagaaaaatatctgaagcttcaaaaactctttcaatctgtctcagcaactcccctgccccgagtacccaaacttcctcccaaggctgtgtatccccccgtgagaccgtcgctgtacctcccgctgtgggacgccctatcctacttaaatgagccagtcaggtcgcgtcagcccgtcaacatggagaaccttcccataaacaatgggagcggccagtcctacgggcttgtcctgtatgagaagtccatctgctccggaggccgcctccgtgcccacgctcatgacgtggcacaggtgtttttggatgagacaatgatagggattctgaatgagaataataaggacctgcacattcctgaactcagggactgccgatacctgaggatcctggtggagaatcaaggacgagtcaatttttcatggcaaatacagaatgagcagaaaggaataactggatctgtcagcatcaataactcttccctggagggctttaccatctattccctggagatgaaaatgagcttctttgagaggctccgctctgccacctggaagcctgtcccagacagccaccagggcccggccttctactgtgggaccttgaaggctggcccttctcccaaggacaccttcctgagcctgctgaactggaattatggatttgtgttcatcaatggacgtaaccttgggcgatattggaatattgggcctcagaaaacactgtaccttcctggagtttggcttcatccagaagacaatgaggtcatcttgtttgagaagatgatgagtggctcagatatcaaatctacagacaagcccacgctgtaaaactgtgtctgaacatttttttttttttttgagatggagtctcactttgtcgcccaggctggagtgcagtggcacaatctctgctcactgcaagctcagcctctcgggttcacgccattctcctgcctcagcctccccagcagctgggactacaggtgcacgccaccacgcctggctaattttttgtatttttagtagagatggggtttcaccaagttagccaggatggtcccaatctcctgaccttgtgatctgctctcctcagcctcccaaagtactgggattacaggcgtgagccaccactcccggccgtgaacatattttttgggttgctggagttcatctataagtcatttttgaggaataagatttatgttaagactatcaaacacagtgttgcctacaatagcaaaaatgtgaaaataacaacaacaacaaaacagcagaggaattgttatgtattttgtagtctatctatatgatgcctatttttaggctttaaaaagtcttcaaaatctttaatgactgatttatctagttaaatgcttaatccttagcaggctcttattctttaattaaacgtgcctttgagtagatgtgaataaaataaaaacaagtttc

SEQ ID NO: 8460 - DNA, 430 bp, Homo sapiens
  source 1..430: mol_type = unassigned DNA
agggagccaagatggcgccaccgcactccagcctgggcgccagagtgagactccgtctcgaaaaaaaacaaaaacccagaaagactgaatatttggatggaagttttaccagaagcacaaatgccgttcacaggcacatgtatgcaacgaggaaagctaatttacaggcatcccattgaactgtgggaaatgctaggaaacttttaagaagcaaggaattataaggtaccgccaggcaggccctgtcatcgcggtgcaagtggagaatgagtatggctcattcaataaggataaaacatacatgccgtatctccacaaggtaagagggccttggtttggccccatgtttacatgcctccttcctcctctgtgcgtttctgattcctggatgcatgagtgatcgggctggacactgtgcattctgagaatg

SEQ ID NO: 8461 - DNA, 3293 bp, Homo sapiens
  source 1..3293: mol_type = unassigned DNA
cgccaccgcactccagcctgggcgccagagtgagactccgtctcgaaaaaaaacaaaaacccagaaagactgaatatttggatggaagttttaccagaagcacaaatgccgttcacaggcacatgtatgcaacgaggaaagctaatttacaggcatcccattgaactgtgggaaatgctaggaaacttttaagaagcaaggaattataaggtaccgccaggcaggccctgtcatcgcggtgcaagtggagaatgagtatggctcattcaataaggataaaacatacatgccgtatctccacaaggccctgctgagaagagggattgtggagcttctcttgacctctgatggtgagaaacatgtgctgagtggccacaccaaaggagtgttggccgccatcaatttgcaaaaacttcaccaggatactttcaatcagcttcataaagtccagagagataagccccttctgattatggaatactgggtcggctggttcgacagatggggagataagcaccatgttaaagatgcaaaggaggttgaacatgctgtgtctgaattcatcaaatatgagatctccttcaatgtatatatgttccatggtggaaccaactttggtttcatgaacggggccacatatttcgggaagcactcgggcattgtcaccagctatggcaagtgtcgctggtgtagtagcctctccagcatgggcggtgctggggctttacagaggaggctccggaagcctgttctggcaccactgggttcttgacctataatctatgctgagtactgaagattttcctatctactttccttccttctgtatgttcataatgccccaacaggctgtcattgcagtagacagggctttccgggacttagagctccgcttcacacatctggtatactgccctgttggcttgaacctctgaagagaggcagggtaggaacggtgactgctgtaaaggcacagacctgcacggccgggcgatacagactgagcaaagaaaagagtacccgttgaaggggtgtccactcttttggcttccctgggccacactggaagaagaagaattgtcttgggccacacatgaaatacactaacactaatgatagctgatgagcttaaaaaaaaaacacaaaatgttttaagaaagtttatgaatttgtgttgggctgcattcaaagccatcctgggccgcctgtagcccatgagctgtgggttgaacaagtttgcattagaaagtgaagaagtgggggcaagcccagtgtcatggcttgacactggaagccagtggaaggtgcccaggaagagttgtggggaatgtccttagactggcatcacacacccacgtgggatggaaggtgtcttccttttgtctcactcacggtggccctggccatctcctgccagcggtgctgaaacagggcctcctgcagagactgcatggctggtgactggccctggtgtcttgcagactatgatgcagtgctcacggaggctggagattacacagaaaaatatctgaagcttcaaaaactctttcaatctgtctcaggtactcagcacccatttaacttacgggccagccctcctcatgtggagtctctgttctgtggaaaagtgaggaaggcgtgggtctcccttgtgggcagcagttacaccaagctcctgagaacaagggcaaccttaacttcgaaccctggggttaaaatctgtgtgattttttaaaatcagggtttctaagcattttataagcctcagtttcttcactgaagcataaagatagtaaccttggtctcctgtgatgactgcgaagattgagttactctttgtaaagctcttataccatggatgacatagtaacccccaatatgaaaggaaaagccatgctggataggcatggggggcttagagaaggcagtggtcatctcaggcactttttgccctgtgccccatctccattgcagcaactcccctgccccgagtacccaaacttcctcccaaggctgtgtatccccccgtgagaccgtcgctgtacctcccgctgtgggacgccctatcctacttaaatgagccagtcaggtcgcgtcagcccgtcaacatggagaaccttcccataaacaatgggagcggccagtcctacgggcttgtcctgtatgagaagtccatctgctccggaggccgcctccgtgcccacgctcatgacgtggcacaggtgtttttggatgagacaatgatagggattctgaatgagaataataaggacctgcacattcctgaactcagggaataactggatctgtcagcatcaataactcttccctggagggctttaccatctattccctggagatgaaaatgagcttctttgagaggctccgctctgccacctggaagcctgtcccagacagccaccagggcccggccttctactgtgggaccttgaaggctggcccttctcccaaggacaccttcctgagcctgctgaactggaattatggatttgtgttcatcaatggacgtaaccttgggcgatattggaatattgggcctcagaaaacactgtaccttcctggagtttggcttcatccagaagacaatgaggtcatcttgtttgagaagatgatgagtggctcagatatcaaatctacagacaagcccacgctgtaaaactgtgtctgaacatttttttttttttttgagatggagtctcactttgtcgcccaggctggagtgcagtggcacaatctctgctcactgcaagctcagcctctcgggttcacgccattctcctgcctcagcctccccagcagctgggactacaggtgcacgccaccacgcctggctaattttttgtatttttagtagagatggggtttcaccaagttagccaggatggtcccaatctcctgaccttgtgatctgctctcctcagcctcccaaagtactgggattacaggcgtgagccaccactcccggccgtgaacatattttttgggttgctggagttcatctataagtcatttttgaggaataagatttatgttaagactatcaaacacagtgttgcctacaatagcaaaaatgtgaaaataacaacaacaacaaaacagcagaggaattgttatgtattttgtagtctatctatatgatgcctatttttaggctttaaaaagtcttcaaaatctttaatgactgatttatctagttaaatgcttaatccttagcaggctcttattctttaattaaacgtgcctttgagtagatgtgaataaaataaaaacaa

SEQ ID NO: 8462 - DNA, 2577 bp, Homo sapiens
  source 1..2577: mol_type = unassigned DNA
gccagagtgagactccgtctcgaaaaaaaacaaaaacccagaaagactgaatatttggatggaagttttaccagaagcacaaatgccgttcacaggcacatgtatgcaacgaggaaagctaatttacaggcatcccattgaactgtgggaaatgctaggaaacttttaagaagcaaggaattataaggtaccgccaggcaggccctgtcatcgcggtgcaagtggagaatgagtatggctcattcaataaggataaaacatacatgccgtatctccacaaggccctgctgagaagagggattgtggagcttctcttgacctctgatggtgagaaacatgtgctgagtggccacaccaaaggaggtacacatttagagttagttcacaggagaacagggctctcagccagcccgtgtaaatcttgaacacactgcagagaaaaccaagtgcatctcgatacctccctttcccgtgtccactgggatggatcctggagttcgatgttacaataaatgaggactcaaggttaaggctcagggccactcacagctccctatcttggccttgctcctgccgtctttaaacacagcagcactggagctcctctgttctcaggacgcctttccatctcccatagtttttctgtggcaagaaatctgcattggtgctgcgcctggcttgggatcagggccatctccactaacttgggaaaccacagggagaaccagaagatgggtgttgtgtcaggaaccccgcctagatccggttccattcctgggatcctaccgcccaaggctctgtgtggacacttaggagatcctagagaattaagtggcaggaagattctggacggactcatcagatggcaatagtgagggacacgcccgggagtgagcaggggagcggggcgagctgctgccggcggctgccgttctgcctccttagtagtggctcttccaaggaagcctggcacactggaacacgtgctgagcttggggccaggaagcctgtgtcccgtttccagtctaatcatgtcagggagccttggcctggctcacttctctgcacagagtgtggttaatttcaacagtgggtgtcctcgcaagtgtcagggatgtggcgatggccgtggcagccctttggatgtggcagagtggggtccagacagcatctcgccatcctcactgctgagcatgggttcctcctgcgtgcgtccgggccgggggcgcattccttcccttccctgacagcacttgtctcatgcctcagctgggtctctctcttctttatgcagtgttggccgccatcaatttgcaaaaacttcaccaggatactttcaatcagcttcataaagtccagccagtcaggtcgcgtcagcccgtcaacatggagaaccttcccataaacaatgggagcggccagtcctacgggcttgtcctgtatgagaagtccatctgctccggaggccgcctccgtgcccacgctcatgacgtggcacaggtgtttttggatgagacaatgatagggattctgaatgagaataataaggacctgcacattcctgaactcagggaataactggatctgtcagcatcaataactcttccctggagggctttaccatctattccctggagatgaaaatgagcttctttgagaggctccgctctgccacctggaagcctgtcccagacagccaccagggcccggccttctactgtgggaccttgaaggctggcccttctcccaaggacaccttcctgagcctgctgaactggaattatggatttgtgttcatcaatggacgtaaccttgggcgatattggaatattgggcctcagaaaacactgtaccttcctggagtttggcttcatccagaagacaatgaggtcatcttgtttgagaagatgatgagtggctcagatatcaaatctacagacaagcccacgctgtaaaactgtgtctgaacatttttttttttttttgagatggagtctcactttgtcgcccaggctggagtgcagtggcacaatctctgctcactgcaagctcagcctctcgggttcacgccattctcctgcctcagcctccccagcagctgggactacaggtgcacgccaccacgcctggctaattttttgtatttttagtagagatggggtttcaccaagttagccaggatggtcccaatctcctgaccttgtgatctgctctcctcagcctcccaaagtactgggattacaggcgtgagccaccactcccggccgtgaacatattttttgggttgctggagttcatctataagtcatttttgaggaataagatttatgttaagactatcaaacacagtgttgcctacaatagcaaaaatgtgaaaataacaacaacaacaaaacagcagaggaattgttatgtattttgtagtctatctatatgatgcctatttttaggctttaaaaagtcttcaaaatctttaatgactgatttatctagttaaatgcttaatccttagcaggctcttattctttaattaaacgtgcctttgagtagatgtgaataaaataaaaacaagtttca

SEQ ID NO: 8463 - DNA, 1279 bp, Homo sapiens
  source 1..1279: mol_type = unassigned DNA
tgttaaagatgcaaagggttgaacatgctgtgtctgaattcatcaaatatgagatctccttcaatgtatatatgttccatggtggaaccaactttggtttcatgaacggggccacatatttcgggaagcactcgggcattgtcaccagctatgactatgatgcagtgctcacggaggctggagattacacagaaaaatatctgaagcttcaaaaactctttcaatctgtctcagcaactcccctgccccgagtacccaaacttcctcccaaggctgtgtatccccccgtgagaccgtcgctgtacctcccgctgtgggacgccctatcctacttaaatgagccagtcaggtcgcgtcagcccgtcaacatggagaaccttcccataaacaatgggagcggccagtcctacgggcttgtcctgtatgagaagtccatctgctccggaggccgcctccgtgcccacgctcatgacgtggcacaggtgtttttggatgagacaatgatagggattctgaatgagaataataaggacctgcacattcctgaactcagggaataactggatctgtcagcatcaataactcttccctggagggctttaccatctattccctggagatgaaaatgagcttctttgagaggctccgctctgccacctggaagcctgtcccagacagccaccagggcccggccttctactgtgggaccttgaaggctggcccttctcccaaggacaccttcctgagcctgctgaactggaattatggatttgtgttcatcaatggacgtaaccttgggcgatattggaatattgggcctcagaaaacactgtaccttcctggagtttggcttcatccagaagacaatgaggtcatcttgtttgagaagatgatgagtggctcagatatcaaatctacagacaagcccacgctgtaaaactgtgtctgaacatttttttttttttttgagatggagtctcactttgtcgcccaggctggagtgcagtggcacaatctctgctcactgcaagctcagcctctcgggttcacgccattctcctgcctcagcctccccagcagctgggactacaggtgcacgccaccacgcctggctaattttttgtatttttagtagagatggggtttcaccaagttagccaggatggtcccaatctcctgaccttgtgatctgctctcctcagcctcccaaagtactgggattacaggcgtgagccaccactcccggccgtgaacatattttttgggttgctggagttca

SEQ ID NO: 8464 - DNA, 1965 bp, Homo sapiens
  source 1..1965: mol_type = unassigned DNA
ttggtttcatgaacggggccacatatttcgggaagcactcgggcattgtcaccagctatggcaagtgtcgctggtgtagtagcctctccagcatgggcggtgctggggctttacagaggaggctccggaagcctgttctggcaccactgggttcttgacctataatctatgctgagtactgaagattttcctatctactttccttccttctgtatgttcataatgccccaacaggctgtcattgcagtagacagggctttccgggacttagagctccgcttcacacatctggtatactgccctgttggcttgaacctctgaagagaggcagggtaggaacggtgactgctgtaaaggcacagacctgcacggccgggcgatacagactgagcaaagaaaagagtacccgttgaaggggtgtccactcttttggcttccctgggccacactggaagaagaagaattgtcttgggccacacatgaaatacactaacactaatgatagctgatgagcttaaaaaaaaaacacaaaatgttttaagaaagtttatgaatttgtgttgggctgcattcaaagccatcctgggccgcctgtagcccatgagctgtgggttgaacaagtttgcattagaaagtgaagaagtgggggcaagcccagtgtcatggcttgacactggaagccagtggaaggtgcccaggaagagttgtggggaatgtccttagactggcatcacacacccacgtgggatggaaggtgtcttccttttgtctcactcacggtggccctggccatctcctgccagcggtgctgaaacagggcctcctgcagagactgcatggctggtgactggccctggtgtcttgcagactatgatgcagtgctcacggaggctggagattacacagaaaaatatctgaagcttcaaaaactctttcaatctgtctcaggtactcagcacccatttaacttacgggccagccctcctcatgtggagtctctgttctgtggaaaagtgaggaaggcgtgggtctcccttgtgggcagcagttacaccaagctcctgagaacaagggcaaccttaacttcgaaccctggggttaaaatctgtgtgattttttaaaatcagggtttctaagcattttataagcctcagtttcttcactgaagcataaagatagtaaccttggtctcctgtgatgactgcgaagattgagttactctttgtaaagctcttataccatggatgacatagtaacccccaatatgaaaggaaaagccatgctggataggcatggggggcttagagaaggcagtggtcatctcaggcactttttgccctgtgccccatctccattgcagcaactcccctgccccgagtacccaaacttcctcccaaggctgtgtatccccccgtgagaccgtcgctgtacctcccgctgtgggacgccctatcctacttaaatgagccagtcaggtcgcgtcagcccgtcaacatggagaaccttcccataaacaatgggagcggccagtcctacgggcttgtcctgtatgagaagtccatctgctccggaggccgcctccgtgcccacgctcatgacgtggcacaggtgtttttggatgagacaatgatagggattctgaatgagaataataaggacctgcacattcctgaactcagggactgccgatacctgaggatcctggtggagaatcaaggacgagtcaatttttcatggcaaatacagaatgagcagaaaggaataactggatctgtcagcatcaataactcttccctggagggctttaccatctattccctggagatgaaaatgagcttctttgagaggctccgctctgccacctggaagcctgtcccagacagccaccagggcccggccttctactgtgggaccttgaaggctggcccttctcccaaggacaccttcctgagcctgctggtaggt

SEQ ID NO: 8465 - DNA, 3862 bp, Homo sapiens
  source 1..3862: mol_type = unassigned DNA
ttggtttcatgaacggggccacatatttcgggaagcactcgggcattgtcaccagctatggcaagtgtcgctggtgtagtagcctctccagcatgggcggtgctggggctttacagaggaggctccggaagcctgttctggcaccactgggttcttgacctataatctatgctgagtactgaagattttcctatctactttccttccttctgtatgttcataatgccccaacaggctgtcattgcagtagacagggctttccgggacttagagctccgcttcacacatctggtatactgccctgttggcttgaacctctgaagagaggcagggtaggaacggtgactgctgtaaaggcacagacctgcacggccgggcgatacagactgagcaaagaaaagagtacccgttgaaggggtgtccactcttttggcttccctgggccacactggaagaagaagaattgtcttgggccacacatgaaatacactaacactaatgatagctgatgagcttaaaaaaaaaacacaaaatgttttaagaaagtttatgaatttgtgttgggctgcattcaaagccatcctgggccgcctgtagcccatgagctgtgggttgaacaagtttgcattagaaagtgaagaagtgggggcaagcccagtgtcatggcttgacactggaagccagtggaaggtgcccaggaagagttgtggggaatgtccttagactggcatcacacacccacgtgggatggaaggtgtcttccttttgtctcactcacggtggccctggccatctcctgccagcggtgctgaaacagggcctcctgcagagactgcatggctggtgactggccctggtgtcttgcagactatgatgcagtgctcacggaggctggagattacacagaaaaatatctgaagcttcaaaaactctttcaatctgtctcaggtactcagcacccatttaacttacgggccagccctcctcatgtggagtctctgttctgtggaaaagtgaggaaggcgtgggtctcccttgtgggcagcagttacaccaagctcctgagaacaagggcaaccttaacttcgaaccctggggttaaaatctgtgtgattttttaaaatcagggtttctaagcattttataagcctcagtttcttcactgaagcataaagatagtaaccttggtctcctgtgatgactgcgaagattgagttactctttgtaaagctcttataccatggatgacatagtaacccccaatatgaaaggaaaagccatgctggataggcatggggggcttagagaaggcagtggtcatctcaggcactttttgccctgtgccccatctccattgcagcaactcccctgccccgagtacccaaacttcctcccaaggctgtgtatccccccgtgagaccgtcgctgtacctcccgctgtgggacgccctatcctacttaaatgaggtgcgtgctgcctggccacaggaggcggagtggccattggagggatgggggagggattccttcaggaaactttttattaggaagtgggaaaacaaatcctctgcatttcattcaaatttagaactgtgggacaagagccaccagctccttccgggtggactgtgaaggggtttgaccttggagtcagtgtgcaggggaggggcagcaggacgtcggaggatcccgggttcccgcttagatgaacctgtctggagatgctcttgtttggactgtgtggtccttacggaatccacgtaggaaaagctgctgagctggaatcgggagactagcttctgcccgtgcttcaccagcagctgggcctgaacttcctgggtcactgctcccccttttccatcagccttcctgtcctattttgaagaaaggtgaaagctgtttggaactgaaactgtagcccttggattcacattggttttacctctgctatcactattttagagaaaaggtagtgactggtacactaaagaaactacatttatttaatgtaactaaatttaatttaatgaaataaacatttgcttggtgcctcattcattgctagacttcaactattttagaatacaatttatttactctttttttttcttgagacagggtcttgcttggtggctgtggctggaatgcggtggcacaatcatggctcactgcagccttgaactcctgggctgaagcaatcctccggcctcagcctcttgagtagctgggattacaggagggcaccaccacgcccagctacatttttaagttttttgtagatgtgggtctcactatgttgcccaggctgctctcaaactcctggcctcaagtgatgcacctgctgcggcctcccaaagtgctgggattacaggcgtgagcccctgcgccccatccatttcctctgttaatcagttcttaggattataacgattgctccctcatcaccatgccctgcatttccctgagtttccttcctgggcagtggagacgtaagcacagagcagtgtcacatggcatctgtttcatcatttcccatttgaagaacccttggggaccattaggcaggaccaaatgacagggtcttaggaaggaggatcctgactgctcagcccttggacttctgctcttgccatttctcctcatagccagtcaggtcgcgtcagcccgtcaacatggagaaccttcccataaacaatgggagcggccagtcctacgggcttgtcctgtatgagaagtccatctgctccggaggccgcctccgtgcccacgctcatgacgtggcacaggtgtttttggatgagacaatgatagggattctgaatgagaataataaggacctgcacattcctgaactcagggaataactggatctgtcagcatcaataactcttccctggagggctttaccatctattccctggagatgaaaatgagcttctttgagaggctccgctctgccacctggaagcctgtcccagacagccaccagggcccggccttctactgtgggaccttgaaggctggcccttctcccaaggacaccttcctgagcctgctgaactggaattatggatttgtgttcatcaatggacgtaaccttgggcgatattggaatattgggcctcagaaaacactgtaccttcctggagtttggcttcatccagaagacaatgaggtcatcttgtttgagaagatgatgagtggctcagatatcaaatctacagacaagcccacgctgtaaaactgtgtctgaacatttttttttttttttgagatggagtctcactttgtcgcccaggctggagtgcagtggcacaatctctgctcactgcaagctcagcctctcgggttcacgccattctcctgcctcagcctccccagcagctgggactacaggtgcacgccaccacgcctggctaattttttgtatttttagtagagatggggtttcaccaagttagccaggatggtcccaatctcctgaccttgtgatctgctctcctcagcctcccaaagtactgggattacaggcgtgagccaccactcccggccgtgaacatattttttgggttgctggagttcatctataagtcatttttgaggaataagatttatgttaagactatcaaacacagtgttgcctacaatagcaaaaatgtgaaaataacaacaacaacaaaacagcagaggaattgttatgtattttgtagtctatctatatgatgcctatttttaggctttaaaaagtcttcaaaatctttaatgactgatttatctagttaaatgcttaatccttagcaggctcttattctttaattaaacgtgcctttgagtagatgtgaataaaataaaaacaagtttc

SEQ ID NO: 8466 - DNA, 3900 bp, Homo sapiens
  source 1..3900: mol_type = unassigned DNA
attggccaagggcttcctggccccaacccacctcccgcctccagggcgccgcttaaagtgtgcggagcaggtgccttgggtggagccacaactttgcgcgagtgtcttggttgagcgcagcgcccattcattgcccgcgagcgtccatccatctgtccggccgactgtccagcgaaaggggctccaggccgggcgcagccgccacccgggggaccgaggccaggagaggggccaagagcgcggctgacccttgcgggccggggcaggggacggtggccgcggccatgcagtcctgtgccagggcgtgggggctgcgcctgggccgcggggtcgggggcggccgccgcctggctgggggatcggggccgtgctgggcgccgcggagccgggacagcagcagtggcggcggggacagcgccgcggctggggcctcgcgcctcctggagcgccttctgcccagacacgacgacttcgctcggaggcacatcggccctggggacaaagaccagagagagatgctgcagaccttggggctggcgagcattgatgaattgatcgagaagacggtccctgccaacatccgtttgaaaagacccttgaaaatggaagaccctgtttgtgaaaatgaaatccttgcaactctgcatgccatttcaagcaaaaaccagatctggagatcgtatattggcatgggctattataactgctcagtgccacagacgattttgcggaacttactggagaactcaggatggatcacccagtatactccataccagcctgaggtgtctcaggggaggctggagagtttactcaactaccagaccatggtgtgtgacatcacaggcctggacatggccaatgcatccctgctggatgaggggactgcagccgcagaggcactgcagctgtgctacagacacaacaagaggaggaaatttctcgttgatccccgttgccacccacagacaatagctgttgtccagactcgagccaaatatactggagtcctcactgagctgaagttaccctgtgaaatggacttcagtggaaaagatgtcagtggagtgttgttccagtacccagacacggaggggaaggtggaagactttacggaactcgtggagagagctcatcagagtgggagcctggcctgctgtgctactgaccttttagctttgtgcatcttgaggccacctggagaatttggggtagacatcgccctgggcagctcccagagatttggagtgccactgggctatgggggaccccatgcagcattttttgctgtccgagaaagcttggtgagaatgatgcctggaagaatggtgggggtaacaagagatgccactgggaaagaagtgtatcgtcttgctcttcaaaccagggagcaacacattcggagagacaaggctaccagcaacatctgtacagctcaggccctcttggcgaatatggctgccatgtttgcaatctaccatggttcccatgggctggagcatattgctaggagggtacataatgccactttgattttgtcagaaggtctcaagcgagcagggcatcaactccagcatgacctgttctttgataccttgaagattcagtgtggctgctcagtgaaggaggtcttgggcagggccgctcagcggcagatcaattttcggctttttgaggatggcacacttggtatttctcttgatgaaacagtcaatgaaaaagatctggacgatttgttgtggatctttggttgtgagtcatctgcagaactggttgctgaaagcatgggagaggagtgcagaggtattccagggtctgtgttcaagaggaccagcccgttcctcacccatcaagtgttcaacagctaccactctgaaacaaacattgtccggtacatgaagaaactggaaaataaagacatttcccttgttcacagcatgattccactgggatcctgcaccatgaaactgaacagttcgtctgaactcgcacctatcacatggaaagaatttgcaaacatccacccctttgtgcctctggatcaagctcaaggatatcagcagcttttccgagagcttgagaaggatttgtgtgaactcacaggttatgaccaggtctgtttccagccaaacagcggagcccagggagaatatgctggactggccactatccgagcctacttaaaccagaaaggagaggggcacagaacggtttgcctcattccgaaatcagcacatgggaccaacccagcaagtgcccacatggcaggcatgaagattcagcctgtggaggtggataaatatgggaatatcgatgcagttcacctcaaggccatggtggataagcacaaggagaacctagcagctatcatgattacatacccatccaccaatggggtgtttgaagagaacatcagtgacgtgtgtgacctcatccatcaacatggaggacaggtctacctagacggggcaaatatgaatgctcaggtgggaatctgtcgccctggagacttcgggtctgatgtctcgcacctaaatcttcacaagaccttctgcattccccacggaggaggtggtcctggcatggggcccatcggagtgaagaaacatctcgccccgtttttgcccaatcatcccgtcatttcactaaagcggaatgaggatgcctgtcctgtgggaaccgtcagtgcggccccatggggctccagttccatcttgcccatttcctgggcttatatcaagatgatgggaggcaagggtcttaaacaagccacggaaactgcgatattaaatgccaactacatggccaagcgattagaaacacactacagaattcttttcaggggtgcaagaggttatgtgggtcatgaatttattttggacacgagacccttcaaaaagtctgcaaatattgaggctgtggatgtggccaagagactccaggattatggatttcacgcccctaccatgtcctggcctgtggcagggaccctcatggtggagcccactgagtcggaggacaaggcagagctggacagattctgtgatgccatgatcagcattcggcaggaaattgctgacattgaggagggccgcatcgaccccagggtcaatccgctgaagatgtctccacactccctgacctgcgttacatcttcccactgggaccggccttattccagagaggtggcagcattcccactccccttcgtgaaaccagagaacaaattctggccaacgattgcccggattgatgacatatatggagatcagcacctggtttgtacctgcccacccatggaagtttatgagtctccattttctgaacaaaagagggcgtcttcttagtcctctgtccctaagtttaaaggactgatttgatgcctctccccagagcatttgataagcaagaaagatttcatctcccaccccagcctcaagtaggagttttatatactgtgtatatctctgtaatctctgtcaaggtaaatgtaaatacagtagctggagggagtcgaagctgatggttggaagacggatttgctttggtattctgcttccacatgtgccagttgcctggattgggagccattttgtgttttgcgtagaaagttttaggaactttaacttttaatgtggcaagtttgcagatgtcatagaggctatcctggagacttaatagacatttttttgttccaaaagagtccatgtggactgtgccatctgtgggaaatcccagggcaaatgtttacattttgtataccctgaagaactctttttcctctaatatgcctaatctgtaatcacatttctgagtgttctcctctttttctgtgtgaggtttttttttttttaatctgcatttattagtattctaataaaagcatcttgatcggaagaa

SEQ ID NO: 8467 - DNA, 878 bp, Homo sapiens
  source 1..878: mol_type = unassigned DNA
actccctgacctgcgttacatcttcccactgggaccggccttattccagagaggtggcagcattcccactcacggagtctcgctctgttgcccaggctggagtgcagtggcatgatcctgggttcacgccattctcctacctcagcctcccgctgggactacaggcgcctgccaccatgcccggcccttcgtgaaaccagagaacaaattctggccaacgattgcccggattgatgacatatatggagatcagcacctggtttgtacctgcccacccatggaagtttatgagtctccattttctgaacaaaagagggcgtcttcttagtcctctgtccctaagtttaaaggactgatttgatgcctctccccagagcatttgataagcaagaaagatttcatctcccaccccagcctcaagtaggagttttatatactgtgtatatctctgtaatctctgtcaaggtaaatgtaaatacagtagctggagggagtcgaagctgatggttggaagacggatttgctttggtattctgcttccacatgtgccagttgcctggattgggagccattttgtgttttgcgtagaaagttttaggaactttaacttttaatgtggcaagtttgcagatgtcatagaggctatcctggagacttaatagacatttttttgttccaaaagagtccatgtggactgtgccatctgtgggaaatcccagggcaaatgtttacattttgtataccctgaagaactctttttcctctaatatgcctaatctgtaatcacatttctgagtgttctcctctttttctgtgtgaggtttttttttttttaatctgcatttattagtattctaataaaagcatcttgatcggaa

SEQ ID NO: 8468 - DNA, 1559 bp, Homo sapiens
  source 1..1559: mol_type = unassigned DNA
atagaggacatttctgtgaacaccatggatgtggctctgcctgcttttcctctgaggggagaaggcagcaccggccagccatggccttcacactggagggtgcttccaagctcttgacttttgcttttggcccttgcctttgtggtaggtgggaatctgtcgccctggagacttcgggtctgatgtctcgcacctaaatcttcacaagaccttctgcattccccacggaggaggtggtcctggcatggggcccatcggagtgaagaaacatctcgccccgtttttgcccaatcatcccgtcatttcactaaagcggaatgaggatgcctgtcctgtgggaaccgtcagtgcggccccatggggctccagttccatcttgcccatttcctgggcttatatcaagatgatgggaggcaagggtcttaaacaagccacggaaactgcgatattaaatgccaactacatggccaagcgattagaaacacactacagaattcttttcaggggtgcaagaggttatgtgggtcatgaatttattttggacacgagacccttcaaaaagtctgcaaatattgaggctgtggatgtggccaagagactccaggattatggatttcacgcccctaccatgtcctggcctgtggcagggaccctcatggtggagcccactgagtcggaggacaaggcagagctggacagattctgtgatgccatgatcagcattcggcaggaaattgctgacattgaggagggccgcatcgaccccagggtcaatccgctgaagatgtctccacactccctgacctgcgttacatcttcccactgggaccggccttattccagagaggtggcagcattcccactccccttcgtgaaaccagagaacaaattctggccaacgattgcccggattgatgacatatatggagatcagcacctggtttgtacctgcccacccatggaagtttatgagtctccattttctgaacaaaagagggcgtcttcttagtcctctgtccctaagtttaaaggactgatttgatgcctctccccagagcatttgataagcaagaaagatttcatctcccaccccagcctcaagtaggagttttatatactgtgtatatctctgtaatctctgtcaaggtaaatgtaaatacagtagctggagggagtcgaagctgatggttggaagacggatttgctttggtattctgcttccacatgtgccagttgcctggattgggagccattttgtgttttgcgtagaaagttttaggaactttaacttttaatgtggcaagtttgcagatgtcatagaggctatcctggagacttaatagacatttttttgttccaaaagagtccatgtggactgtgccatctgtgggaaatcccagggcaaatgtttacattttgtataccctgaagaactctttttcctctaatatgcctaatctgtaatcacatttctgagtgttctcctctttttctgtgtgaggtttttttttttttaatctgcatttattagtattctaataaaagcatcttgatcggaa

SEQ ID NO: 8469 - DNA, 1852 bp, Homo sapiens
  source 1..1852: mol_type = unassigned DNA
gagagccgaacctgagactgccaggaatggtgtcacattaaaagtgcctcattcttttggggctgatcaggcccttgactcgatatttgcggagcccagggagaatatgctggactggccactatccgagcctacttaaaccagaaaggagaggggcacagaacggtttgcctcattccgaaatcagcacatgggaccaacccagcaagtgcccacatggcaggcatgaagattcagcctgtggaggtggataaatatgggaatatcgatgcagttcacctcaaggccatggtggataagcacaaggagaacctagcagctatcatgattacatacccatccaccaatggggtgtttgaagagaacatcagtgacgtgtgtgacctcatccatcaacatggaggacaggtctacctagacggggcaaatatgaatgctcaggtgggaatctgtcgccctggagacttcgggtctgatgtctcgcacctaaatcttcacaagaccttctgcattccccacggaggaggtggtcctggcatggggcccatcggagtgaagaaacatctcgccccgtttttgcccaatcatcccgtcatttcactaaagcggaatgaggatgcctgtcctgtgggaaccgtcagtgcggccccatggggctccagttccatcttgcccatttcctgggcttatatcaagatgatgggaggcaagggtcttaaacaagccacggaaactgcgatattaaatgccaactacatggccaagcgattagaaacacactacagaattcttttcaggggtgcaagaggttatgtgggtcatgaatttattttggacacgagacccttcaaaaagtctgcaaatattgaggctgtggatgtggccaagagactccaggattatggatttcacgcccctaccatgtcctggcctgtggcagggaccctcatggtggagcccactgagtcggaggacaaggcagagctggacagattctgtgatgccatgatcagcattcggcaggaaattgctgacattgaggagggccgcatcgaccccagggtcaatccgctgaagatgtctccacactccctgacctgcgttacatcttcccactgggaccggccttattccagagaggtggcagcattcccactccccttcgtgaaaccagagaacaaattctggccaacgattgcccggattgatgacatatatggagatcagcacctggtttgtacctgcccacccatggaagtttatgagtctccattttctgaacaaaagagggcgtcttcttagtcctctgtccctaagtttaaaggactgatttgatgcctctccccagagcatttgataagcaagaaagatttcatctcccaccccagcctcaagtaggagttttatatactgtgtatatctctgtaatctctgtcaaggtaaatgtaaatacagtagctggagggagtcgaagctgatggttggaagacggatttgctttggtattctgcttccacatgtgccagttgcctggattgggagccattttgtgttttgcgtagaaagttttaggaactttaacttttaatgtggcaagtttgcagatgtcatagaggctatcctggagacttaatagacatttttttgttccaaaagagtccatgtggactgtgccatctgtgggaaatcccagggcaaatgtttacattttgtataccctgaagaactctttttcctctaatatgcctaatctgtaatcacatttctgagtgttctcctctttttctgtgtgaggtttttttttttttaatctgcatttattagtattctaataaaagcatcttgatcggaa

SEQ ID NO: 8470 - DNA, 2046 bp, Homo sapiens
  source 1..2046: mol_type = unassigned DNA
atcacatctgccctgtgtgatgggtactgttactatccccattttacacatctctcaggcacataggcacagggagatgaagttacttgtgatgtgagtggtttcctgaagcacggcatattcattttcttgtcctcaaaatgaaaaaacctcaaataggctaggacttgtttttcagaagccaggaaaacagaagagcagtctttgcctttcttcttggaagagagcggagatagctgcagctgactcagtgcgggtgacgaggaacggggtgactcaggtcttcggagcccagggagaatatgctggactggccactatccgagcctacttaaaccagaaaggagaggggcacagaacggtttgcctcattccgaaatcagcacatgggaccaacccagcaagtgcccacatggcaggcatgaagattcagcctgtggaggtggataaatatgggaatatcgatgcagttcacctcaaggccatggtggataagcacaaggagaacctagcagctatcatgattacatacccatccaccaatggggtgtttgaagagaacatcagtgacgtgtgtgacctcatccatcaacatggaggacaggtctacctagacggggcaaatatgaatgctcaggtgggaatctgtcgccctggagacttcgggtctgatgtctcgcacctaaatcttcacaagaccttctgcattccccacggaggaggtggtcctggcatggggcccatcggagtgaagaaacatctcgccccgtttttgcccaatcatcccgtcatttcactaaagcggaatgaggatgcctgtcctgtgggaaccgtcagtgcggccccatggggctccagttccatcttgcccatttcctgggcttatatcaagatgatgggaggcaagggtcttaaacaagccacggaaactgcgatattaaatgccaactacatggccaagcgattagaaacacactacagaattcttttcaggggtgcaagaggttatgtgggtcatgaatttattttggacacgagacccttcaaaaagtctgcaaatattgaggctgtggatgtggccaagagactccaggattatggatttcacgcccctaccatgtcctggcctgtggcagggaccctcatggtggagcccactgagtcggaggacaaggcagagctggacagattctgtgatgccatgatcagcattcggcaggaaattgctgacattgaggagggccgcatcgaccccagggtcaatccgctgaagatgtctccacactccctgacctgcgttacatcttcccactgggaccggccttattccagagaggtggcagcattcccactccccttcgtgaaaccagagaacaaattctggccaacgattgcccggattgatgacatatatggagatcagcacctggtttgtacctgcccacccatggaagtttatgagtctccattttctgaacaaaagagggcgtcttcttagtcctctgtccctaagtttaaaggactgatttgatgcctctccccagagcatttgataagcaagaaagatttcatctcccaccccagcctcaagtaggagttttatatactgtgtatatctctgtaatctctgtcaaggtaaatgtaaatacagtagctggagggagtcgaagctgatggttggaagacggatttgctttggtattctgcttccacatgtgccagttgcctggattgggagccattttgtgttttgcgtagaaagttttaggaactttaacttttaatgtggcaagtttgcagatgtcatagaggctatcctggagacttaatagacatttttttgttccaaaagagtccatgtggactgtgccatctgtgggaaatcccagggcaaatgtttacattttgtataccctgaagaactctttttcctctaatatgcctaatctgtaatcacatttctgagtgttctcctctttttctgtgtgaggtttttttttttttaatctgcatttattagtattctaataaaagcatcttgatcgg

SEQ ID NO: 8471 - DNA, 3298 bp, Homo sapiens
  source 1..3298: mol_type = unassigned DNA
gtcttttgtggttccctgaaaatcgagctctggggtgaaaatgaaatccttgcaactctgcatgccatttcaagcaaaaaccagatctggagatcgtatattggcatgggctattataactgctcagtgccacagacgattttgcggaacttactggagaactcaggatggatcacccagtatactccataccagcctgaggtgtctcaggggaggctggagagtttactcaactaccagaccatggtgtgtgacatcacaggcctggacatggccaatgcatccctgctggatgaggggactgcagccgcagaggcactgcagctgtgctacagacacaacaagaggaggaaatttctcgttgatccccgttgccacccacagacaatagctgttgtccagactcgagccaaatatactggagtcctcactgagctgaagttaccctgtgaaatggacttcagtggaaaagatgtcagtggagtgttgttccagtacccagacacggaggggaaggtggaagactttacggaactcgtggagagagctcatcagagtgggagcctggcctgctgtgctactgaccttttagctttgtgcatcttgaggccacctggagaatttggggtagacatcgccctgggcagctcccagagatttggagtgccactgggctatgggggaccccatgcagcattttttgctgtccgagaaagcttggtgagaatgatgcctggaagaatggtgggggtaacaagagatgccactgggaaagaagtgtatcgtcttgctcttcaaaccagggagcaacacattcggagagacaaggctaccagcaacatctgtacagctcaggccctcttggcgaatatggctgccatgtttgcaatctaccatggttcccatgggctggagcatattgctaggagggtacataatgccactttgattttgtcagaaggtctcaagcgagcagggcatcaactccagcatgacctgttctttgataccttgaagattcagtgtggctgctcagtgaaggaggtcttgggcagggccgctcagcggcagatcaattttcggctttttgaggatggcacacttggtatttctcttgatgaaacagtcaatgaaaaagatctggacgatttgttgtggatctttggttgtgagtcatctgcagaactggttgctgaaagcatgggagaggagtgcagaggtattccagggtctgtgttcaagaggaccagcccgttcctcacccatcaagtgttcaacagctaccactctgaaacaaacattgtccggtacatgaagaaactggaaaataaagacatttcccttgttcacagcatgattccactgggatcctgcaccatgaaactgaacagttcgtctgaactcgcacctatcacatggaaagaatttgcaaacatccacccctttgtgcctctggatcaagctcaaggatatcagcagcttttccgagagcttgagaaggatttgtgtgaactcacaggttatgaccaggtctgtttccagccaaacagcggagcccagggagaatatgctggactggccactatccgagcctacttaaaccagaaaggagaggggcacagaacggtttgcctcattccgaaatcagcacatgggaccaacccagcaagtgcccacatggcaggcatgaagattcagcctgtggaggtggataaatatgggaatatcgatgcagttcacctcaaggccatggtggataagcacaaggagaacctagcagctatcatgattacatacccatccaccaatggggtgtttgaagagaacatcagtgacgtgtgtgacctcatccatcaacatggaggacaggtctacctagacggggcaaatatgaatgctcaggtgggaatctgtcgccctggagacttcgggtctgatgtctcgcacctaaatcttcacaagaccttctgcattccccacggaggaggtggtcctggcatggggcccatcggagtgaagaaacatctcgccccgtttttgcccaatcatcccgtcatttcactaaagcggaatgaggatgcctgtcctgtgggaaccgtcagtgcggccccatggggctccagttccatcttgcccatttcctgggcttatatcaagatgatgggaggcaagggtcttaaacaagccacggaaactgcgatattaaatgccaactacatggccaagcgattagaaacacactacagaattcttttcaggggtgcaagaggttatgtgggtcatgaatttattttggacacgagacccttcaaaaagtctgcaaatattgaggctgtggatgtggccaagagactccaggattatggatttcacgcccctaccatgtcctggcctgtggcagggaccctcatggtggagcccactgagtcggaggacaaggcagagctggacagattctgtgatgccatgatcagcattcggcaggaaattgctgacattgaggagggccgcatcgaccccagggtcaatccgctgaagatgtctccacactccctgacctgcgttacatcttcccactgggaccggccttattccagagaggtggcagcattcccactccccttcgtgaaaccagagaacaaattctggccaacgattgcccggattgatgacatatatggagatcagcacctggtttgtacctgcccacccatggaagtttatgagtctccattttctgaacaaaagagggcgtcttcttagtcctctgtccctaagtttaaaggactgatttgatgcctctccccagagcatttgataagcaagaaagatttcatctcccaccccagcctcaagtaggagttttatatactgtgtatatctctgtaatctctgtcaaggtaaatgtaaatacagtagctggagggagtcgaagctgatggttggaagacggatttgctttggtattctgcttccacatgtgccagttgcctggattgggagccattttgtgttttgcgtagaaagttttaggaactttaacttttaatgtggcaagtttgcagatgtcatagaggctatcctggagacttaatagacatttttttgttccaaaagagtccatgtggactgtgccatctgtgggaaatcccagggcaaatgtttacattttgtataccctgaagaactctttttcctctaatatgcctaatctgtaatcacatttctgagtgttctcctctttttctgtgtgaggtttttttttttttaatctgcatttattagtattctaataaaa

SEQ ID NO: 8472 - DNA, 1796 bp, Homo sapiens
  source 1..1796: mol_type = unassigned DNA; mol_type = unassigned DNA
ataaatattgaatgagtaaatgaaagccagaagacctaaccgtgatccctttcttcttgtctttgcaagcggagcccagggagaatatgctggactggccactatccgagcctacttaaaccagaaaggagaggggcacagaacggtttgcctcattccgaaatcagcacatgggaccaacccagcaagtgcccacatggcaggcatgaagattcagcctgtggaggtggataaatatgggaatatcgatgcagttcacctcaaggccatggtggataagcacaaggagaacctagcagctatcatgattacatacccatccaccaatggggtgtttgaagagaacatcagtgacgtgtgtgacctcatccatcaacatggaggacaggtctacctagacggggcaaatatgaatgctcaggtgggaatctgtcgccctggagacttcgggtctgatgtctcgcacctaaatcttcacaagaccttctgcattccccacggaggaggtggtcctggcatggggcccatcggagtgaagaaacatctcgccccgtttttgcccaatcatcccgtcatttcactaaagcggaatgaggatgcctgtcctgtgggaaccgtcagtgcggccccatggggctccagttccatcttgcccatttcctgggcttatatcaagatgatgggaggcaagggtcttaaacaagccacggaaactgcgatattaaatgccaactacatggccaagcgattagaaacacactacagaattcttttcaggggtgcaagaggttatgtgggtcatgaatttattttggacacgagacccttcaaaaagtctgcaaatattgaggctgtggatgtggccaagagactccaggattatggatttcacgcccctaccatgtcctggcctgtggcagggaccctcatggtggagcccactgagtcggaggacaaggcagagctggacagattctgtgatgccatgatcagcattcggcaggaaattgctgacattgaggagggccgcatcgaccccagggtcaatccgctgaagatgtctccacactccctgacctgcgttacatcttcccactgggaccggccttattccagagaggtggcagcattcccactccccttcgtgaaaccagagaacaaattctggccaacgattgcccggattgatgacatatatggagatcagcacctggtttgtacctgcccacccatggaagtttatgagtctccattttctgaacaaaagagggcgtcttcttagtcctctgtccctaagtttaaaggactgatttgatgcctctccccagagcatttgataagcaagaaagatttcatctcccaccccagcctcaagtaggagttttatatactgtgtatatctctgtaatctctgtcaaggtaaatgtaaatacagtagctggagggagtcgaagctgatggttggaagacggatttgctttggtattctgcttccacatgtgccagttgcctggattgggagccattttgtgttttgcgtagaaagttttaggaactttaacttttaatgtggcaagtttgcagatgtcatagaggctatcctggagacttaatagacatttttttgttccaaaagagtccatgtggactgtgccatctgtgggaaatcccagggcaaatgtttacattttgtataccctgaagaactctttttcctctaatatgcctaatctgtaatcacatttctgagtgttctcctctttttctgtgtgaggtttttttttttttaatctgca

SEQ ID NO: 8473 - DNA, 2674 bp, Homo sapiens
  source 1..2674: mol_type = unassigned DNA
ctcgctttgtctcccaggctgcagtgcagtggtgccatctcggctcactgcaaccaccaccttccaggttcaagcaattctctcactcagtctcccgagtagctggaactacaggcacccgcccctacacctggctaatttttgtaatttttttttcgtagagacagggtttcaccatgtcggccaggctggttttgaactcctgacctcaagtgatttgcctgcctcagcctcccaacgtgctgggattacaggtgtgagccaatgagcccagctccacctctttcatgtttattcattctataagaagcagagcagttcgtagactgtcttcaggggctattaattactggagctattcttcacaggcttgagaagttatgcttgctctgagtctctataagtggattcatttttgctgagagtgaggaaagtgggttaagaagaaggagtacatcattatctcatgagtagatactttcctggaaggaaattcatcagttggtggaccgtggaatttgggaagccccggaggaatattggtctatttattaaaacgctgacttaatggtttattcctgatgatggttgtgtggtcagtagctcattctggggagctactggcagcctggacctagagaagaagcctgtttatgaactacaggtcgaatatccctaatctgaaaatctaaaactttttctaaaaatttatatttatttttttgagacagggtcttgcccctattacccaggctggagtgcagttgtgtgatcgcggctcactgcagcctcgacttcccaggctcaggtgattctatttttagtagggctagggtttggccatgttgccctggctggtctggaactcctgatctaaaacgatctgcccacctcagcctcccaaagtgctgggattaccagcatgagtcactgtgcctggcctgaaaatccaaaacttttgggtgcccacatgaggctcaaataaagatctgtaatttcaaataagggatatgtcattggtagaacaaagtgaactgggtcgcacagactttggcctcattaactccttgttacttacggtatactgtttgacgtcgcgtatttctaattctttgtttgcagcctgaaaccaaaacatcaaaaggtccttcaaagaaacataaaattctgtatgtgtcttatggatatatgtttaatatatccatacctatatatacgcaaaagtaattatttgatgttgagggtaaagttgctgaaaagtgtcaatggctctagaaatattttgtataaaaggatcaggactatacaacacatttaactgttgcaagtagattttatgtccgcagaatagaaataatctcatccccagacacctccggtcatatgttcagtaatgccccccacctgccattagccataatcaggttcacaggtgtgtagtgagctgaagataagacacatcggcacagtgtgctaaacatttttatttgtaataagactaaatgaaacctttattgccaataataaacttacccggtgcccatggcttcttggtcctcgctgatacacataaaaagctgatgcacttatttattaaattacttattcatttgtttgggtaaaacaataagctgatgctaatcttgggctgaaacaactttcctgaacaggttatgtgggtcatgaatttattttggacacgagacccttcaaaaagtctgcaaatattgaggctgtggatgtggccaagagactccaggattatggatttcacgcccctaccatgtcctggcctgtggcagggaccctcatggtggagcccactgagtcggaggacaaggcagagctggacagattctgtgatgccatgatcagcattcggcaggaaattgctgacattgaggagggccgcatcgaccccagggtcaatccgctgaagatgtctccacactccctgacctgcgttacatcttcccactgggaccggccttattccagagaggtggcagcattcccactccccttcgtgaaaccagagaacaaattctggccaacgattgcccggattgatgacatatatggagatcagcacctggtttgtacctgcccacccatggaagtttatgagtctccattttctgaacaaaagagggcgtcttcttagtcctctgtccctaagtttaaaggactgatttgatgcctctccccagagcatttgataagcaagaaagatttcatctcccaccccagcctcaagtaggagttttatatactgtgtatatctctgtaatctctgtcaaggtaaatgtaaatacagtagctggagggagtcgaagctgatggttggaagacggatttgctttggtattctgcttccacatgtgccagttgcctggattgggagccattttgtgttttgcgtagaaagttttaggaactttaacttttaatgtggcaagtttgcagatgtcatagaggctatcctggagacttaatagacatttttttgttccaaaagagtccatgtggactgtgccatctgtgggaaatcccagggcaaatgtttacattttgtataccctgaagaactctttttcctctaatatgcctaatctgtaatcacatttctgagtgttctcctctttttctgtgtgaggtttttttttttttaatc

SEQ ID NO: 8474 - DNA, 3279 bp, Homo sapiens
  source 1..3279: mol_type = unassigned DNA
gatttcaatgaggttcccacaaggctttgtagtcgcaaaacacagaggtgactcttttaactcagaggcactttcctctgccttgcgttttaattttagagcattgatgaattgatcgagaagacggtccctgccaacatccgtttgaaaagacccttgaaaatggaagaccctgtttgatcacccagtatactccataccagcctgaggtgtctcaggggaggctggagagtttactcaactaccagaccatggtgtgtgacatcacaggcctggacatggccaatgcatccctgctggatgaggggactgcagccgcagaggcactgcagctgtgctacagacacaacaagaggaggaaatttctcgttgatccccgttgccacccacagacaatagctgttgtccagactcgagccaaatatactggagtcctcactgagctgaagttaccctgtgaaatggacttcagtggaaaagatgtcagtggagtgttgttccagtacccagacacggaggggaaggtggaagactttacggaactcgtggagagagctcatcagagtgggagcctggcctgctgtgctactgaccttttagctttgtgcatcttgaggccacctggagaatttggggtagacatcgccctgggcagctcccagagatttggagtgccactgggctatgggggaccccatgcagcattttttgctgtccgagaaagcttggtgagaatgatgcctggaagaatggtgggggtaacaagagatgccactgggaaagaagtgtatcgtcttgctcttcaaaccagggagcaacacattcggagagacaaggctaccagcaacatctgtacagctcaggccctcttggcgaatatggctgccatgtttgcaatctaccatggttcccatgggctggagcatattgctaggagggtacataatgccactttgattttgtcagaaggtctcaagcgagcagggcatcaactccagcatgacctgttctttgataccttgaagattcagtgtggctgctcagtgaaggaggtcttgggcagggccgctcagcggcagatcaattttcggctttttgaggatggcacacttggtatttctcttgatgaaacagtcaatgaaaaagatctggacgatttgttgtggatctttggttgtgagtcatctgcagaactggttgctgaaagcatgggagaggagtgcagaggtattccagggtctgtgttcaagaggaccagcccgttcctcacccatcaagtgttcaacagctaccactctgaaacaaacattgtccggtacatgaagaaactggaaaataaagacatttcccttgttcacagcatgattccactgggatcctgcaccatgaaactgaacagttcgtctgaactcgcacctatcacatggaaagaatttgcaaacatccacccctttgtgcctctggatcaagctcaaggatatcagcagcttttccgagagcttgagaaggatttgtgtgaactcacaggttatgaccaggtctgtttccagccaaacagcggagcccagggagaatatgctggactggccactatccgagcctacttaaaccagaaaggagaggggcacagaacggtttgcctcattccgaaatcagcacatgggaccaacccagcaagtgcccacatggcaggcatgaagattcagcctgtggaggtggataaatatgggaatatcgatgcagttcacctcaaggccatggtggataagcacaaggagaacctagcagctatcatgattacatacccatccaccaatggggtgtttgaagagaacatcagtgacgtgtgtgacctcatccatcaacatggaggacaggtctacctagacggggcaaatatgaatgctcaggtgggaatctgtcgccctggagacttcgggtctgatgtctcgcacctaaatcttcacaagaccttctgcattccccacggaggaggtggtcctggcatggggcccatcggagtgaagaaacatctcgccccgtttttgcccaatcatcccgtcatttcactaaagcggaatgaggatgcctgtcctgtgggaaccgtcagtgcggccccatggggctccagttccatcttgcccatttcctgggcttatatcaagatgatgggaggcaagggtcttaaacaagccacggaaactgcgatattaaatgccaactacatggccaagcgattagaaacacactacagaattcttttcaggggtgcaagaggttatgtgggtcatgaatttattttggacacgagacccttcaaaaagtctgcaaatattgaggctgtggatgtggccaagagactccaggattatggatttcacgcccctaccatgtcctggcctgtggcagggaccctcatggtggagcccactgagtcggaggacaaggcagagctggacagattctgtgatgccatgatcagcattcggcaggaaattgctgacattgaggagggccgcatcgaccccagggtcaatccgctgaagatgtctccacactccctgacctgcgttacatcttcccactgggaccggccttattccagagaggtggcagcattcccactccccttcgtgaaaccagagaacaaattctggccaacgattgcccggattgatgacatatatggagatcagcacctggtttgtacctgcccacccatggaagtttatgagtctccattttctgaacaaaagagggcgtcttcttagtcctctgtccctaagtttaaaggactgatttgatgcctctccccagagcatttgataagcaagaaagatttcatctcccaccccagcctcaagtaggagttttatatactgtgtatatctctgtaatctctgtcaaggtaaatgtaaatacagtagctggagggagtcgaagctgatggttggaagacggatttgctttggtattctgcttccacatgtgccagttgcctggattgggagccattttgtgttttgcgtagaaagttttaggaactttaacttttaatgtggcaagtttgcagatgtcatagaggctatcctggagacttaatagacatttttttgttccaaaagagtccatgtggactgtgccatctgtgggaaatcccagggcaaatgtttacattttgtataccctgaagaactctttttcctctaatatgcctaatctgtaatcacatttctgagtgttctcctctttttctgtgtgaggtttttttttttttaa

SEQ ID NO: 8475 - DNA, 2009 bp, Homo sapiens
  source 1..2009: mol_type = unassigned DNA
ttcagcatgaaagtggttagtgagaaatataataggaaacaagattgaccgtaaaccaaattgttacagctggctgacacacacgtcgtagttccttttgttcttcactgtattttggtatagttttgaaatttttcataataacaaaaggctattttcaatgcgtggtcctgagcaaggatatagaaagctccatctttgggtaggagtggttgagctgtagtgcacaaactggatgctgttgctttgattgttttgattgttcaagaccttttgactccagcagagctccttgatgagcttctctcagcgtctggacagtgaccatgtgtcacgtgctggtgaacccctggccagggcccaataaatattgaatgagtaaatgaaagccagaagacctaaccgtgatccctttcttcttgtctttgcaagcggagcccagggagaatatgctggactggccactatccgagcctacttaaaccagaaaggagaggggcacagaacggtttgcctcattccgaaatcagcacatgggaccaacccagcaagtgcccacatggcaggcatgaagattcagcctgtggaggtggataaatatgggaatatcgatgcagttcacctcaaggccatggtggataagcacaaggagaacctagcagctatcatgattacatacccatccaccaatggggtgtttgaagagaacatcagtgacgtgtgtgacctcatccatcaacatggaggacaggtctacctagacggggcaaatatgaatgctcaggtgggaatctgtcgccctggagacttcgggtctgatgtctcgcacctaaatcttcacaagaccttctgcattccccacggaggaggtggtcctggcatggggcccatcggagtgaagaaacatctcgccccgtttttgcccaatcatcccgtcatttcactaaagcggaatgaggatgcctgtcctgtgggaaccgtcagtgcggccccatggggctccagttccatcttgcccatttcctgggcttatatcaagatgatgggaggcaagggtcttaaacaagccacggaaactgcgatattaaatgccaactacatggccaagcgattagaaacacactacagaattcttttcaggggtgcaagaggatttcacgcccctaccatgtcctggcctgtggcagggaccctcatggtggagcccactgagtcggaggacaaggcagagctggacagattctgtgatgccatgatcagcattcggcaggaaattgctgacattgaggagggccgcatcgaccccagggtcaatccgctgaagatgtctccacactccctgacctgcgttacatcttcccactgggaccggccttattccagagaggtggcagcattcccactccccttcgtgaaaccagagaacaaattctggccaacgattgcccggattgatgacatatatggagatcagcacctggtttgtacctgcccacccatggaagtttatgagtctccattttctgaacaaaagagggcgtcttcttagtcctctgtccctaagtttaaaggactgatttgatgcctctccccagagcatttgataagcaagaaagatttcatctcccaccccagcctcaagtaggagttttatatactgtgtatatctctgtaatctctgtcaaggtaaatgtaaatacagtagctggagggagtcgaagctgatggttggaagacggatttgctttggtattctgcttccacatgtgccagttgcctggattgggagccattttgtgttttgcgtagaaagttttaggaactttaacttttaatgtggcaagtttgcagatgtcatagaggctatcctggagacttaatagacatttttttgttccaaaagagtccatgtggactgtgccatctgtgggaaatcccagggcaaatgtttacattttgtataccctgaagaactctttttcctctaatatgcctaatctgtaatcaca

SEQ ID NO: 8476 - DNA, 1614 bp, Homo sapiens
  source 1..1614: mol_type = unassigned DNA
aatggagaatgactggggtgagggaagggacccaggccggagcccagggagaatatgctggactggccactatccgagcctacttaaaccagaaaggagaggggcacagaacggtttgcctcattccgaaatcagcacatgggaccaacccagcaagtgcccacatggcaggcatgaagattcagcctgtggaggtggataaatatgggaatatcgatgcagttcacctcaaggccatggtggataagcacaaggagaacctagcagctatcatgattacatacccatccaccaatggggtgtttgaagagaacatcagtgacgtgtgtgacctcatccatcaacatggaggacaggtctacctagacggggcaaatatgaatgctcaggtgggaatctgtcgccctggagacttcgggtctgatgtctcgcacctaaatcttcacaagaccttctgcattccccacggaggaggtggtcctggcatggggcccatcggagtgaagaaacatctcgccccgtttttgcccaatcatcccgtcatttcactaaagcggaatgaggatgcctgtcctgtgggaaccgtcagtgcggccccatggggctccagttccatcttgcccatttcctgggcttatatcaagatgatgggaggcaagggtcttaaacaagccacggaaactgcgatattaaatgccaactacatggccaagcgattagaaacacactacagaattcttttcaggggtgcaagaggttatgtgggtcatgaatttattttggacacgagacccttcaaaaagtctgcaaatattgaggctgtggatgtggccaagagactccaggattatggatttcacgcccctaccatgtcctggcctgtggcagggaccctcatggtggagcccactgagtcggaggacaaggcagagctggacagattctgtgatgccatgatcagcattcggcaggaaattgctgacattgaggagggccgcatcgaccccagggtcaatccgctgaagatgtctccacactccctgacctgcgttacatcttcccactgggaccggccttattccagagaggtggcagcattcccactccccttcgtgaaaccagagaacaaattctggccaacgattgcccggattgatgacatatatggagatcagcacctggtttgtacctgcccacccatggaagtttatgagtctccattttctgaacaaaagagggcgtcttcttagtcctctgtccctaagtttaaaggactgatttgatgcctctccccagagcatttgataagcaagaaagatttcatctcccaccccagcctcaagtaggagttttatatactgtgtatatctctgtaatctctgtcaaggtaaatgtaaatacagtagctggagggagtcgaagctgatggttggaagacggatttgctttggtattctgcttccacatgtgccagttgcctggattgggagccattttgtgttttgcgtagaaagttttaggaactttaacttttaatgtggcaagtttgcagatgtcatagaggctatcctggagacttaatagacatttttttgttccaaaagagtccatgtg

SEQ ID NO: 8477 - DNA, 762 bp, Homo sapiens
  source 1..762: mol_type = unassigned DNA
ctaatcttgggctgaaacaactttcctgaacaggttatgtgggtcatgaatttattttggacacgagacccttcaaaaagtctgcaaatattgaggctgtggatgtggccaagagactccaggattatggatttcacgcccctaccatgtcctggcctgtggcagggaccctcatggtggagcccactgagtcggaggacaaggcagagctggacagattctgtgatgccatgatcagcattcggcaggaaattgctgacattgaggagggccgcatcgaccccagggtcaatccgctgaaggtgcgtaggccctggaacattgcttgaaatgttccttaaactagaaaatgatgtctggacagtgtaccagcaactcccgaactctcaactgaggatgatactcttccctagaataagatgtctccacactccctgacctgcgttacatcttcccactgggaccggccttattccagagaggtggcagcattcccactccccttcgtgaaaccagagaacaaattctggccaacgattgcccggattgatgacatatatggagatcagcacctggtttgtacctgcccacccatggaagtttatgagtctccattttctgaacaaaagagggcgtcttcttagtcctctgtccctaagtttaaaggactgatttgatgcctctccccagagcatttgataagcaagaaagatttcatctcccaccccagcctcaagtaggagttttatatactgtgtatat

SEQ ID NO: 8478 - DNA, 2727 bp, Homo sapiens
  source 1..2727: mol_type = unassigned DNA
atttttagtagagacggagtttcaccgtgttagccaggatggtcttgatctcctgacctcgtgacccgcccacctccgcctcccaaagtcctgggattacaggcttgagccactgcgcccggcccgttttgttttctttttgtagaaagaataaaaatattgttttgatcaggttttggaacgtttgaaaaacagagaaaaatgggactcacatacaactgttaagattttgtgtgtattccttgcaaacgtagtttacagagggtgtgcagagtccctagatatactggagtcctcactgagctgaagttaccctgtgaaatggacttcagtggaaaagatgtcagtggagtgttgttccagtacccagacacggaggggaaggtggaagactttacggaactcgtggagagagctcatcagagtgggagcctggcctgctgtgctactgaccttttagctttgtgcatcttgaggccacctggagaatttggggtagacatcgccctgggcagctcccagagatttggagtgccactgggctatgggggaccccatgcagcattttttgctgtccgagaaagcttggtgagaatgatgcctggaagaatggtgggggtaacaagagatgccactgggaaagaagtgtatcgtcttgctcttcaaaccagggagcaacacattcggagagacaaggctaccagcaacatctgtacagctcaggccctcttggcgaatatggctgccatgtttgcaatctaccatggttcccatgggctggagcatattgctaggagggtacataatgccactttgattttgtcagaaggtctcaagcgagcagggcatcaactccagcatgacctgttctttgataccttgaagattcagtgtggctgctcagtgaaggaggtcttgggcagggccgctcagcggcagatcaattttcggctttttgaggatggcacacttggtatttctcttgatgaaacagtcaatgaaaaagatctggacgatttgttgtggatctttggttgtgagtcatctgcagaactggttgctgaaagcatgggagaggagtgcagaggtattccagggtctgtgttcaagaggaccagcccgttcctcacccatcaagtgttcaacagctaccactctgaaacaaacattgtccggtacatgaagaaactggaaaataaagacatttcccttgttcacagcatgattccactgggatcctgcaccatgaaactgaacagttcgtctgaactcgcacctatcacatggaaagaatttgcaaacatccacccctttgtgcctctggatcaagctcaaggatatcagcagcttttccgagagcttgagaaggatttgtgtgaactcacaggttatgaccaggtctgtttccagccaaacagcggagcccagggagaatatgctggactggccactatccgagcctacttaaaccagaaaggagaggggcacagaacggtttgcctcattccgaaatcagcacatgggaccaacccagcaagtgcccacatggcaggcatgaagattcagcctgtggaggtggataaatatgggaatatcgatgcagttcacctcaaggccatggtggataagcacaaggagaacctagcagctatcatgattacatacccatccaccaatggggtgtttgaagagaacatcagtgacgtgtgtgacctcatccatcaacatggaggacaggtctacctagacggggcaaatatgaatgctcaggtgggaatctgtcgccctggagacttcgggtctgatgtctcgcacctaaatcttcacaagaccttctgcattccccacggaggaggtggtcctggcatggggcccatcggagtgaagaaacatctcgccccgtttttgcccaatcatcccgtcatttcactaaagcggaatgaggatgcctgtcctgtgggaaccgtcagtgcggccccatggggctccagttccatcttgcccatttcctgggcttatatcaagatgatgggaggcaagggtcttaaacaagccacggaaactgcgatattaaatgccaactacatggccaagcgattagaaacacactacagaattcttttcaggggtgcaagaggttatgtgggtcatgaatttattttggacacgagacccttcaaaaagtctgcaaatattgaggctgtggatgtggccaagagactccaggattatggatttcacgcccctaccatgtcctggcctgtggcagggaccctcatggtggagcccactgagtcggaggacaaggcagagctggacagattctgtgatgccatgatcagcattcggcaggaaattgctgacattgaggagggccgcatcgaccccagggtcaatccgctgaagatgtctccacactccctgacctgcgttacatcttcccactgggaccggccttattccagagaggtggcagcattcccactccccttcgtgaaaccagagaacaaattctggccaacgattgcccggattgatgacatatatggagatcagcacctggtttgtacctgcccacccatggaagtttatgagtctccattttctgaacaaaagagggcgtcttcttagtcctctgtccctaagtttaaaggactgatttgatgcctctccccagagcatttgataagcaagaaagatttcatctcccaccccagcctcaagtag

SEQ ID NO: 8479 - DNA, 2828 bp, Homo sapiens
  source 1..2828: mol_type = unassigned DNA
agagttttccttttcttttaaaaagaaccctaattaggcgatttcaatgaggttcccacaaggctttgtagtcgcaaaacacagaggtgactcttttaactcagaggcactttcctctgccttgcgttttaattttagagcattgatgaattgatcgagaagacggtccctgccaacatccgtttgaaaagacccttgaaaatggaagaccctgtttgtgaaaatgaaatccttgcaactctgcatgccatttcaagcaaaaaccagatctggagatcgtatattggcatgggctattataactgctcagtgccacagacgattttgcggaacttactggagaactcaggatggatcacccagtatactccataccagcctgaggtgtctcaggggaggctggagagtttactcaactaccagaccatggtgtgtgacatcacaggcctggacatggccaatgcatccctgctggatgaggggactgcagccgcagaggcactgcagctgtgctacagacacaacaagaggaggaaatttctcgttgatccccgttgccacccacagacaatagctgttgtccagactcgagccaaatatactggagtcctcactgagctgaagttaccctgtgaaatggacttcagtggaaaagatgtcagtggagtgttgttccagtacccagacacggaggggaaggtggaagactttacggaactcgtggagagagctcatcagagtgggagcctggcctgctgtgctactgaccttttagctttgtgcatcttgaggccacctggagaatttggggtagacatcgccctgggcagctcccagagatttggagtgccactgggctatgggggaccccatgcagcattttttgctgtccgagaaagcttggtgagaatgatgcctggaagaatggtgggggtaacaagagatgccactgggaaagaagtgtatcgtcttgctcttcaaaccagggagcaacacattcggagagacaaggctaccagcaacatctgtacagctcaggccctcttggcgaatatggctgccatgtttgcaatctaccatggttcccatgggctggagcatattgctaggagggtacataatgccactttgattttgtcagaaggtctcaagcgagcagggcatcaactccagcatgacctgttctttgataccttgaagattcagtgtggctgctcagtgaaggaggtcttgggcagggccgctcagcggcagatcaattttcggctttttgaggatggcacacttggtatttctcttgatgaaacagtcaatgaaaaagatctggacgatttgttgtggatctttggttgtgagtcatctgcagaactggttgctgaaagcatgggagaggagtgcagaggtattccagggtctgtgttcaagaggaccagcccgttcctcacccatcaagtgttcaacagctaccactctgaaacaaacattgtccggtacatgaagaaactggaaaataaagacatttcccttgttcacagcatgattccactgggatcctgcaccatgaaactgaacagttcgtctgaactcgcacctatcacatggaaagaatttgcaaacatccacccctttgtgcctctggatcaagctcaaggatatcagcagcttttccgagagcttgagaaggatttgtgtgaactcacaggttatgaccaggtctgtttccagccaaacagcggagcccagggagaatatgctggactggccactatccgagcctacttaaaccagaaaggagaggggcacagaacggtttgcctcattccgaaatcagcacatgggaccaacccagcaagtgcccacatggcaggcatgaagattcagcctgtggaggtggataaatatgggaatatcgatgcagttcacctcaaggccatggtacttgtcttctccttagcagatgggagaggccgggatggggagtgctggtggggatcagggacttgatggattatgtaaatgtcttctcttgcattctaatgaaaagtctgcagttcttcctttgaccagagtctactctacccctcccatcaccaacagggagaaatccccgttttctaattccagcttgtgtaaaaaactgaatgaattattcatggtggtagtaagagtactccttgcagaacctgcctgcctctttctgcccaatcttccctctccttctcgccttccccacttaataatcaaaatggcagtcacacttacacatcttcgtgtcaggaattgtaacacaaatgtcagctttgcaaatatccatgactgtgccagccccatcatgctgaattcctggcatcatgcagcttggtttccaccaacccccactctcaacctcccaacctccaggaagaagttgcttagcaaccgtatctgcttcccaccagcggactggcagctgcatcttaagcgggaaggaaaccagtggaatagcaatgtgattttgatggtggtgttattaggcatggagactgtgaactctgtgcagttgccttctaaaggaagctgaaaatccacaatgctgcacctctcttcgatccacctctacccttccattgctccacaaagcttttttccaacaagtgttccaggccagtagttgaaattattaagtccctccattatagtaatataggacatgacttccctggccacccccatgttctcaaacatgcctgctctgatatgctggccaggaaaacaaacagggatgtgacttttatatatgcttgccttctgtaaaaggaaagaataaagaagacttttatttacagaaa

SEQ ID NO: 8480 - DNA, 386 bp, Homo sapiens
  source 1..386: mol_type = unassigned DNA
tctttgcaagcggagcccagggagaatatgctggactggccactatccgagcctacttaaaccagaaaggagaggggcacagaacggtttgcctcattccgaaatcagcacatgggaccaacccagcaagtgcccacatggcaggcatgaagattcagcctgtggaggtggataaatatgggaatatcgatgcagttcacctcaaggccatggaagaagttgcttagcaaccgtatctgcttcccaccagcggactggcagctgcatcttaagcgggaaggaaaccagtggaatagcaatgtgattttgatggtggtgttattaggcatggagactgtgaactctgtgcagttgccttctaaaggaagctgaaaatccacaatgct

SEQ ID NO: 8481 - DNA, 420 bp, Homo sapiens
  source 1..420: mol_type = unassigned DNA
ttctctcagcgtctggacagtgaccatgtgtcacgtgctggtgaacccctggccagggcccaataaatattgaatgagtaaatgaaagccagaagacctaaccgtgatccctttcttcttgtctttgcaagcggagcccagggagaatatgctggactggccactatccgagcctacttaaaccagaaaggagaggggcacagaacggtttgcctcattccgaaatcagcacatgggaccaacccagcaagtgcccacatggcaggcatgaagattcagcctgtggaggtggataaatatgggaatatcgatgcagttcacctcaaggccatggtacttgtcttctccttagcagatgggagaggccgggatggggagtgctggtggggatcagggacttgatggattatgtaaatgtct

SEQ ID NO: 8482 - DNA, 652 bp, Homo sapiens
  source 1..652: mol_type = unassigned DNA
tggagtcctcactgagctgaagttaccctgtgaaatggacttcagtggaaaagatgtcagtggagtgttgttccagtacccagacacggaggggaaggtggaagactttacggaactcgtggagagagctcatcagagtgggagatgccactgggaaagaagtgtatcgtcttgctcttcaaaccagggagcaacacattcggagagacaaggctaccagcaacatctgtacagctcaggccctcttggcgaatatggctgccatgtttgcaatctaccatggttcccatgggctggagcatattgctaggagggtacataatgccactttgattttgtcagaaggtctcaagcgagcagggcatcaactccagcatgacctgttctttgataccttgaagattcagtgtggctgctcagtgaaggaggtcttgggcagggccgctcagcggcagatcaattttcggctttttgaggatggcacacttggtatttctcttgatgaaacagtcaatgaaaaagatctggacgatttgttgtggatctttggttgtgagtcatctgcagaactggttgctgaaagcatgggagaggagtgcagaggtattccagggtctgtgttcaagaggaccagcccgttcctcacccatca

SEQ ID NO: 8483 - DNA, 620 bp, Homo sapiens
  source 1..620: mol_type = unassigned DNA
aacaagagtctagtagaatttatctctttattattctgtgacatgtcaatggctgaggagcaggtttctatatgagagtttgggggatctcctatcttgtgtaggtctcaagcgagcagggcatcaactccagcatgacctgttctttgataccttgaagattcagtgtggctgctcagtgaaggaggtcttgggcagggccgctcagcggcagatcaattttcggctttttgaggatggcacacttggtatttctcttgatgaaacagtcaatgaaaaagatctggacgatttgttgtggatctttggttgtgagtcatctgcagtaagtaaaataaaaacatgcgttcctcatcataactattggaggtggtagcaaaagtagcttatcccctgagtgtgagggagaaggggcccaagtgtgacactggtagcttgttgttaaaattattccactgactatcccttgctagtcactgctgacagctggaggtcactgctgtagggctccagccagtattatgcacccaggctagttggaaagattgttaatggtgtttcattgaaagtgcctctaggctggggatggtggctcatgcctgtaatcccagcactttggg

SEQ ID NO: 8484 - DNA, 553 bp, Homo sapiens
  source 1..553: mol_type = unassigned DNA
acttcctttctagagcctggcctgctgtgctactgaccttttagctttgtgcatcttgaggccacctggagaatttggggtagacatcgccctgggcagctcccagagatttggagtgccactgggctatgggggaccccatgcagcattttttgctgtccgagaaagcttggtgagaatgatgcctggaagaatggtgggggtaacaagagatgccactgggaaagaagtgtatcgtcttgctcttcaaaccagggagcaacacattcggagagacaaggctaccagcaacatctgtacagctcaggccctcttggcgaatatggctgccatgtttgcaatctaccatggttcccatgggctggagcatattgctaggagggtacataatgccactttgattttgtcagaaggtctcaagcgagcagggcatcaactccagcatgacctgttctttgataccttgaagattcagtgtggctgctcagtgaaggaggtcttgggcagggccgctcagcggcagatcaattttcggctttttgaggatggcaca

SEQ ID NO: 8485 - DNA, 626 bp, Homo sapiens
  source 1..626: mol_type = unassigned DNA
aaaatgaatgctgtcttactggaaaagaaacgttaattaattttcccttataaaccgaaagcacgattgttctttgttgtctgtctttccagatatactggagtcctcactgagctgaagttaccctgtgaaatggacttcagtggaaaagatgtcagtggagtgttgttccagtacccagacacggaggggaaggtggaagactttacggaactcgtggagagagctcatcagagtgggagcctggcctgctgtgctactgaccttttagctttgtgcatcttgaggccacctggagaatttggggtagacatcgccctgggcagctcccagagatttggagtgccactgggctatgggggaccccatgcagcattttttgctgtccgagaaagcttggtgagaatgatgcctggaagaatggtgggggtaacaagagatgccactgggaaagaagtgtatcgtcttgctcttcaaaccagggagcaacacattcggagagacaaggctaccagcaacatctgtacagctcaggccctcttggcgaatatggctgccatgtttgcaatctaccatggttcccatgggctggagcatattgctaggagggtacataatgccacttt

SEQ ID NO: 8486 - DNA, 600 bp, Homo sapiens
  source 1..600: mol_type = unassigned DNA
tgaccccccacctccctcccggacggggtggctgccgggcggagacgttcctcacctcccagacggggtcgcggccaggcagaggtgctcctcacatcccagaccgggcggcggggcagaggcgctccccacatctcagacgatgggcggccgggcagagacgctcctcacttcctagatgggatggcggcccggaagaggcgctcctcacttcctaggtgaaaatgaaatccttgcaactctgcatgccatttcaagcaaaaaccagatctggagatcgtatattggcatgggctattataactgctcagtgccacagacgattttgcggaacttactggagaactcaggatggatcacccagtatactccataccagcctgaggtgtctcaggggaggctggagagtttactcaactaccagaccatggtgtgtgacatcacaggcctggacatggccaatgcatccctgctggatgaggggactgcagccgcagaggcactgcagctgtgctacagacacaacaagaggaggaaatttctcgttgatccccgttgccacccacagacaatagctgttgtccagactcgagccaaata

SEQ ID NO: 8487 - DNA, 401 bp, Homo sapiens
  source 1..401: mol_type = unassigned DNA
gggctcctcacttccccgtaggggcggcggggcagaggcgcccctcacctcccagacagggcggctggccgggcaggggctgaccccccacctccctcccggacggggtggctgccgggcggagacgttcctcacctcccagacggggtcgcggccaggcagaggtgaaaatgaaatccttgcaactctgcatgccatttcaagcaaaaaccagatctggagatcgtatattggcatgggctattataactgctcagtgccacagacgattttgcggaacttactggagaactcaggatggatcacccagtatactccataccagcctgaggtgtctcaggggaggctggagagtttactcaactaccagaccatggtgtgtgacatcacaggcctggaca

SEQ ID NO: 8488 - DNA, 4971 bp, Homo sapiens
  source 1..4971: mol_type = unassigned DNA
aaaggctgccagggccgcaggctgccaagccctgccctgcccaaggcgcatagagcatggcccgaggcgctgagggaggccgtggggacgcgggttggggcctgcgtggcgccctggcggccgtggcgctgctctcggcgctcaacgctgcgggcacggtgttcgcgctgtgccagtggcgcgggctgagctcggcgctgcgggctttggaggcgcagcggggccgggagcagcgcgaggacagtgccctgcgctccttcctggccgagttgagccgcgcgccgcgcggggcgtccgcaccaccccaagacccggccagctcagctcgcaacaagcgcagccacagcggcgagcccgcgccgcatatccgcgccgagagccatgacatgctgatgatgatgacctactccatggtgccgatccgagtgatggtggacctgtgcaacagcaccaagggcatctgcctcacaggaccttctggaccaccaggacctccgggagccggcgggttgccaggacacaacggattggatggacagcctggtcctcagggcccaaaaggagaaaaaggagcaaatggaaaaagaggaaaaatggggatacctggagctgcaggaaatccaggggaaaggggagaaaagggagaccatggtgaactgggcctgcagggaaatgagggcccaccagggcagaagggagaaaagggtgacaaaggagatgtgtccaacgacgtgctcctggcaggtgccaaaggtgaccaaggcccacccggtccacctgggcccccaggccctccaggtcctccagggccccctggaagcagaagagccaaaggccctcggcagccaagcatgttcaacggccagtgcccaggtgagacttgtgccataccaaatgatgataccttggttggaaaagctgatgagaaagccagtgaacaccattccccacaagcagaatccatgatcacttccattggaaacccagtgcaagtactgaaagtgacagagacatttgggacttggataagagagtctgctaacaagagtgatgaccggatttgggtgacagagcatttttcaggcatcatggttaaggaattcaaggatcagccctcacttctgaatggcagttacacgttcatccaccttccatactatttccatggctgtgggcacgttgtttacaacaactctctctactaccacaaagggggttctaataccctagtgagatttgaatttggccaggaaacatcccaaactctgaagcttgaaaatgccttgtattttgatcgaaaatacctttttgcaaattccaaaacttacttcaatctagctgtagatgaaaagggcctttggattatctatgcgtcaagtgtggacggctcgagcattcttgtagcacaactggatgagaggacattctcagtggtgcaacacgtcaataccacgtaccctaaatccaaggctggcaacgccttcattgcccgaggaatcctctatgtcacagacaccaaagatatgagggtcacatttgcctttgatttgttaggagggaaacagatcaatgcaaactttgatttaagaacttcccagtctgttcttgccatgttagcatacaacatgagagatcagcatttatattcatgggaagatggccatttaatgctttatcctgtgcagtttttgtcaactaccttaaatcagtgatgtgctgcattcggctcccttcagcaaatttcaggggttttctgggaccagttctcccccaacaggaaacttgtttttttaacgtcagccagatatttagaaaataacctcaaaagtgtttatatggtcagtgagccccgcttagtgaaatagcaacagattggaagttgaaatggctgagatttggtgatctccccacagctggctctgcaagttacctctttctccttgggccttagtttccccattggtaatctgaattggctaagatgattggggagattttctgtacctgtaggtaatttggtgattcttggtggctgctcttctcacaacttttatgtatctgcttctgtcgtttagcttttttagccacatgctgaccaaatttacctttgagttgataagtccagtggcttgagtagtgaatccctcagtgctgacttatatcttgttctttgaaaaaatgcattgactctttaagacatctaaagtatcacattatccataatttattgcttttctttgcatctgcacctgccaccacagaataaccattaccctcagctgctgattgggcagctctgagattagcaaaagccagggacagctacatgttcaggtttttttttttttttttttttcaataagctattttttttcttttcttattttaaatagagagagagtcttgctatgtttcccaggctggtcttgaactcctggggctcaagtgatcctcctgccttggcctcccaaaatgctggattacaggcatgtgtgcctggcccaggtttcttaataaaacagaatcatgatcttccaggttccccccagtttctgatcatgttgatttgtagctgtggatcatgaacactgaatcctcagatcactctgacttcttatgcttctcctgtggatccactatcaaagtactaaatgctgtgtaagtagacgttaatctggctggaaccatgggaagcactttgcagtgttcagaagagaggctccatttgtggctattatgtagaactgggccagagccagtccattgcctgtttttttaaataaggttttactgagcacagccacactcatttgtttatgcagtacggcctgacattgcttttgctctgcaacagcagagtcgagtcattgcaacaaagagcatatggccccacagtgcctaaaatattgaccagctacccctttatggaaaaagattgctgactcctgataaagaatataaagtgagcctgattcttgaaaaaatcagaaccagagcctgttttgttttgttctaaactaagaagccgcataggatgtgacttgcgttttgagtagaggggaaggctgataacggcgtaagatgaagtggccctccacaaaggctggttaggggacagttctttctctaacatagttttaaaggatgtgatctggtccccttggatgccaggagagaatccagttgaacttgctcctaaatgctcttaaatatgcatattttctgccaactcacttctttaaacatctttcagcccagcgctgcggccccgggaagggccactgcgaatagagaggaagctggaaaagttcctggggctctgcagccaggaaggggaaccagggcaaatcttatgtaaagatttttcagcaacttgtcccaatttgtgtgtattctgaaactttctctttgggaccaaattcattctcaatggccctgagttcaatatattattaacagcagtattttaaaacttagggttgaactgggcatggtggcacataactgcaatcccagctactttggaggcagggatgggaggatcacttgaggccaggatctcaggaccagcctagagagatcccatctctaaaaaataaaatataagaaaataaaacttaggggatatacagatttaaatattcaaatctccctgctcccctgaaagtccccaggcagctgtcaatgacttgtttgttgtgttctcaatatgatggctatttgaaacttcacctacttttcattagattggttgtaccatgtcaccttagcttttaaaaatactcttttcagattcacgttctctaacaaagagtctcatgttcaagatcaatatgtctaataagtgctggtgtccttttaaagtatttaaatatatatgttgctgttgctgaatacaggagaccaggttaggaatatagtttcataataatagtacatacaatactaattgtatataaggtagcaaccaaaagaggttgttaattagcacatattccttttagaaaaatgtttcagaaacctcagtcttgatatctgagctatctgggctcccttacttgtgagtaagggatcatgctcaccactggagaagcttacaccgggactttttttcttttttcttttttttttgctatgacagagtaatgctaacgtaaggacaactgagtttgatcagtgtttaatcgcagtgggtaatcttatctgattgtctttaaaagtgaaaaggattaagattttattctttcttgtaaacattacttgattttttaaagaagttttgggctcactgctaaaatagagtatacaactgaatgtttttaagtcaagatactgttttaggagtttaccctctcatttataaccaaagttgctctaaaacactttccaaatatctgcacttctgatgtcagaatcaaaccagataattctctaattcttctttaatctaaagtagatagcttcccactggaaagtaaacaaaaccatccctcccaacctcaaagctaggccacactctatttcaaggcattttctttcagctgataaggtgtcctcctgaagccaagtaggtggttctggtctccaagtatcgttaagcacaggtgctatgacagaaaaagttctggggtggaagttttaagatgaggagttctgatcttaggcatcttaacagtcacaaggtgaaaagtcaaatgaaacagtacaattcttgatgagtgaggtgtcatcttccaaccacacagaggacgttttggctatgatcatctgatggcaagtgaaggagaaatgagtgatagggctttgcgttttcatccagatgctgtggccctgtgtttcacagcattaagagccataatttccaacctgcacagatcctgaacaacaaatgaataacgatgaatgtctttttggttgtaatttaacaagtcaaataaaataatcattgctgagcacaatcacatgttgaaa

SEQ ID NO: 8489 - DNA, 2088 bp, Homo sapiens
  source 1..2088: mol_type = unassigned DNA
gtgccagtggcgcgggctgagctcggcgctgcgggctttggaggcgcagcggggccgggagcagcgcgaggacagtgccctgcgctccttcctggccgagttgagccgcgcgccgcgcggggcgtccgcaccaccccaagacccggccagctcagctcgcaacaagcgcagccacagcggcgagcccgcgccgcatatccgcgccgagagccatgacatgctgatgatgatgacctactccatggtgccgatccgagtgatggtggacctgtgcaacagcaccaagggcatctgcctcacaggaccttctggaccaccaggacctccgggagccggcgggttgccaggacacaacggattggatggacagcctggtcctcagggcccaaaaggagaaaaaggagcaaatggaaaaagaggaaaaatgggtatttttggcaactcttctaattaatttccctgttatttatctccatgattgcatttgggtcgactaaaactgtgtgcagcaggggtaaggtgtttcatctctgcacagtttaaggccggtttaactcttacctagaagccattgcgttccgggataccaagggtatacttcttggtcccaccttgacagatgtttatttcaaactggagaagccgtctcctgggaactgactcgcacccttctgctgcagatgggaggtggaaggagcaggagcccacagccctgggaggggcattctgtgggccgtgtgacagctggtgctggtgcatgctctttcgaggctcagctcctgccttgccctctattgcctcctcctgcccagcgaatctgtgtttggttgaaaatcaatgaactgatgttggcccctggtaaggcatttcttggctagaggaatagctcaaactgcttgagtggaaaggcagcatcctggcctccctgtggccggcactcaggtcaaagggtctcctcttcaggggctacaggataactatgaagatatggctggcatctcggaggagcttcctttgccctgttatgagcaggccatcaccactggagaaaaggcccagaagcaccaaggcacgagatgtgcccagggagcagtaagaatcaggggctggtgcagggcctggcaggaggctggggcacaaaggggaagattctgaagggctctgagcaccagtcctggggagccggggtcagggcagatccacctgaagaaagctggcacatgctgtggtgggagctcaaagacagagggtaagaaactactcaggaggctcctacgaaggcctggctctcagccacccgtcaaagccactgctgagggcagagggaggttgttttcagccggagactccactgcaccatcttattttcaacctcttggctctgctacccaaactcacttggactggccctggacgagaagaaatggtagaaaattcttccagacagcaattactcctttggtcacctccactcttattctcattagcaattgaagtaagggccagtggagagggaaaaattgtcgagcacctctgacacttggcagtgcctacctgcttgtgttccagagggcagcttcagagaaaacgggcacacaccgtccaagccagctcaatcctcagaaggccagtaattaccattggaattacacagcagcaatggatcgttcatataggataataattataattatacatgagcatcgctgtagaataatgatgcctattggcttatcctgggaagactccaaaaatgtgattcagtcctgaggcctcggcaatgggcatgatgagggcaggctcaggggcaggagggcaccctgctagagctgggtgtggggcacgtaggaaaggggtggttttcaaaaaggcttgagacagatccctggccttgaggatgtgcttcgcatgcagcctgcaacccagggagtgcagaaaagaaaaagtgcatttgtttatggagcacatatttgtgtggcaggtaccattctagatgctggagattcagaaataagcccccctcctccaccttcacgaggcttacatcctagctgggagagacggataataaataagataaataaatag

SEQ ID NO: 8490 - DNA, 1042 bp, Homo sapiens
  source 1..1042: mol_type = unassigned DNA
gccctgcgctccttcctggccgagttgagccgcgcgccgcgcggggcgtccgcaccaccccaagacccggccagctcagctcgcaacaagcgcagccacagcggcgagcccgcgccgcatatccgcgccgagagccatgacatgctgatgatgatgacctactccatggtgccggaccttctggaccaccaggacctccgggagccggcgggttgccaggacacaacggattggatggacagcctggtcctcagggcccaaaaggagaaaaaggagcaaatggaaaaagaggaaaaatgggtatttttggcaactcttctaattaatttccctgttatttatctccatgattgcatttgggtcgactaaaactgtgtgcagcaggggtaaggtgtttcatctctgcacagtttaaggccggtttaactcttacctagaagccattgcgttccgggataccaagggtatacttcttggtcccaccttgacagatgtttatttcaaactggagaagccgtctcctgggaactgactcgcacccttctgctgcagatgggaggtggaaggagcaggagcccacagccctgggaggggcattctgtgggccgtgtgacagctggtgctggtgcatgctctttcgaggctcagctcctgccttgccctctattgcctcctcctgcccagcgaatctgtgtttggttgaaaatcaatgaactgatgttggcccctggtaaggcatttcttggctagaggaatagctcaaactgcttgagtggaaaggcagcatcctggcctccctgtggccggcactcaggtcaaagggtctcctcttcaggggctacaggataactatgaagatatggctggcatctcggaggagcttcctttgccctgttatgagcaggccatcaccactggagaaaaggcccagaagcaccaaggcacgagatgtgcccagggagcagtaagaatcaggggctggtgcagggcctggcaggaggctggggcacaaaggggaagattctgaagggctctgagcacc

SEQ ID NO: 8491 - DNA, 1059 bp, Homo sapiens
  source 1..1059: mol_type = unassigned DNA
agctcagctcgcaacaagcgcagccacagcggcgagcccgcgccgcatatccgcgccgagagccatgacatgctgatgatgatgacctactccatggtgccggtaggcggggtctctgttccccgtggcgccccggccagatccgagtgatggtggacctgtgcaacagcaccaagggcatctgcctcacaggaccttctggaccaccaggacctccgggagccggcgggttgccaggacacaacggattggatggacagcctggtcctcagggcccaaaaggagaaaaaggagcaaatggaaaaagaggaaaaatgggtatttttggcaactcttctaattaatttccctgttatttatctccatgattgcatttgggtcgactaaaactgtgtgcagcaggggtaaggtgtttcatctctgcacagtttaaggccggtttaactcttacctagaagccattgcgttccgggataccaagggtatacttcttggtcccaccttgacagatgtttatttcaaactggagaagccgtctcctgggaactgactcgcacccttctgctgcagatgggaggtggaaggagcaggagcccacagccctgggaggggcattctgtgggccgtgtgacagctggtgctggtgcatgctctttcgaggctcagctcctgccttgccctctattgcctcctcctgcccagcgaatctgtgtttggttgaaaatcaatgaactgatgttggcccctggtaaggcatttcttggctagaggaatagctcaaactgcttgagtggaaaggcagcatcctggcctccctgtggccggcactcaggtcaaagggtctcctcttcaggggctacaggataactatgaagatatggctggcatctcggaggagcttcctttgccctgttatgagcaggccatcaccactggagaaaaggcccagaagcaccaaggcacgagatgtgcccagggagcagtaagaatcaggggctggtgcagggcctggcaggaggctggggcacaaaggggaagattctgaagggctctgagcac

SEQ ID NO: 8492 - DNA, 984 bp, Homo sapiens
  source 1..984: mol_type = unassigned DNA
tcaaacttcggtggttctgaaagaaagaaaggctgggcaggcaacccgcctaacagagcttattatcagtgtggcttacaggaccacttcaaaaaggactgcccaaacaataagctgccccctcgtccatgtcccttgtgccagggggatcactggaaggcacactgcccccgagggcgaaggttcactgggccagaggccactaaccagatggtaccacaacaggactgagggtgcccggggcaggcaccaacccatgccatcaccatcacagagagccccagatccgagtgatggtggacctgtgcaacagcaccaagggcatctgcctcacaggaccttctggaccaccaggacctccgggagccggcgggttgccaggacacaacggattggatggacagcctggtcctcagggcccaaaaggagaaaaaggagcaaatggaaaaagaggaaaaatgggtatttttggcaactcttctaattaatttccctgttatttatctccatgattgcatttgggtcgactaaaactgtgtgcagcaggggtaaggtgtttcatctctgcacagtttaaggccggtttaactcttacctagaagccattgcgttccgggataccaagggtatacttcttggtcccaccttgacagatgtttatttcaaactggagaagccgtctcctgggaactgactcgcacccttctgctgcagatgggaggtggaaggagcaggagcccacagccctgggaggggcattctgtgggccgtgtgacagctggtgctggtgcatgctctttcgaggctcagctcctgccttgccctctattgcctcctcctgcccagcgaatctgtgtttggttgaaaatcaatgaactgatgttggcccctggtaaggcatttcttggctagaggaatagctcaaactgcttgagtggaaaggcagcatcctggcctccctgtggccggcactcaggtcaaagg

SEQ ID NO: 8493 - DNA, 2029 bp, Homo sapiens
  source 1..2029: mol_type = unassigned DNA
accattgtgtatgattcgttgttgactgcagcatcactaggtgggacatcactgcgttttccttgaacttccgcgggttctcctaaagttacttggtgactttttatgattgctttctgctcgtctgaataaaggatgagcccagggcctgctgcccactgtctgctctgatgaccctctctcccctgcagatccgagtgatggtggacctgtgcaacagcaccaagggcatctgcctcacaggaccttctggaccaccaggacctccgggagccggcgggttgccaggacacaacggattggatggacagcctggtcctcagggcccaaaaggagaaaaaggagcaaatggaaaaagaggaaaaatgggtatttttggcaactcttctaattaatttccctgttatttatctccatgattgcatttgggtcgactaaaactgtgtgcagcaggggtaaggtgtttcatctctgcacagtttaaggccggtttaactcttacctagaagccattgcgttccgggataccaagggtatacttcttggtcccaccttgacagatgtttatttcaaactggagaagccgtctcctgggaactgactcgcacccttctgctgcagatgggaggtggaaggagcaggagcccacagccctgggaggggcattctgtgggccgtgtgacagctggtgctggtgcatgctctttcgaggctcagctcctgccttgccctctattgcctcctcctgcccagcgaatctgtgtttggttgaaaatcaatgaactgatgttggcccctggtaaggcatttcttggctagaggaatagctcaaactgcttgagtggaaaggcagcatcctggcctccctgtggccggcactcaggtcaaagggtctcctcttcaggggctacaggataactatgaagatatggctggcatctcggaggagcttcctttgccctgttatgagcaggccatcaccactggagaaaaggcccagaagcaccaaggcacgagatgtgcccagggagcagtaagaatcaggggctggtgcagggcctggcaggaggctggggcacaaaggggaagattctgaagggctctgagcaccagtcctggggagccggggtcagggcagatccacctgaagaaagctggcacatgctgtggtgggagctcaaagacagagggtaagaaactactcaggaggctcctacgaaggcctggctctcagccacccgtcaaagccactgctgagggcagagggaggttgttttcagccggagactccactgcaccatcttattttcaacctcttggctctgctacccaaactcacttggactggccctggacgagaagaaatggtagaaaattcttccagacagcaattactcctttggtcacctccactcttattctcattagcaattgaagtaagggccagtggagagggaaaaattgtcgagcacctctgacacttggcagtgcctacctgcttgtgttccagagggcagcttcagagaaaacgggcacacaccgtccaagccagctcaatcctcagaaggccagtaattaccattggaattacacagcagcaatggatcgttcatataggataataattataattatacatgagcatcgctgtagaataatgatgcctattggcttatcctgggaagactccaaaaatgtgattcagtcctgaggcctcggcaatgggcatgatgagggcaggctcaggggcaggagggcaccctgctagagctgggtgtggggcacgtaggaaaggggtggttttcaaaaaggcttgagacagatccctggccttgaggatgtgcttcgcatgcagcctgcaacccagggagtgcagaaaagaaaaagtgcatttgtttatggagcacatatttgtgtggcaggtaccattctagatgctggagattcagaaataagcccccctcctccaccttcacgaggcttacatcctagctgggagagacggataataaataagataaataaatag

SEQ ID NO: 8494 - DNA, 4584 bp, Homo sapiens
  source 1..4584: mol_type = unassigned DNA
accattgtgtatgattcgttgttgactgcagcatcactagatccgagtgatggtggacctgtgcaacagcaccaagggcatctgcctcacaggaccttctggaccaccaggacctccgggagccggcgggttgccaggacacaacggattggatggacagcctggtcctcagggcccaaaaggagaaaaaggagcaaatggaaaaagaggaaaaatggggatacctggagctgcaggaaatccaggggaaaggggagaaaagggagaccatggtgaactgggcctgcagggaaatgagggcccaccagggcagaagggagaaaagggtgacaaaggagatgtgtccaacgacgtgctcctggcaggtgccaaaggtgaccaaggcccacccggtccacctgggcccccaggccctccaggtcctccagggccccctggaagcagaagagccaaaggccctcggcagccaagcatgttcaacggccagtgcccaggtgagacttgtgccataccaaatgatgataccttggttggaaaagctgatgagaaagccagtgaacaccattccccacaagcagaatccatgatcacttccattggaaacccagtgcaagtactgaaagtgacagagacatttgggacttggataagagagtctgctaacaagagtgatgaccggatttgggtgacagagcatttttcaggcatcatggttaaggaattcaaggatcagccctcacttctgaatggcagttacacgttcatccaccttccatactatttccatggctgtgggcacgttgtttacaacaactctctctactaccacaaagggggttctaataccctagtgagatttgaatttggccaggaaacatcccaaactctgaagcttgaaaatgccttgtattttgatcgaaaatacctttttgcaaattccaaaacttacttcaatctagctgtagatgaaaagggcctttggattatctatgcgtcaagtgtggacggctcgagcattcttgtagcacaactggatgagaggacattctcagtggtgcaacacgtcaataccacgtaccctaaatccaaggctggcaacgccttcattgcccgaggaatcctctatgtcacagacaccaaagatatgagggtcacatttgcctttgatttgttaggagggaaacagatcaatgcaaactttgatttaagaacttcccagtctgttcttgccatgttagcatacaacatgagagatcagcatttatattcatgggaagatggccatttaatgctttatcctgtgcagtttttgtcaactaccttaaatcagtgatgtgctgcattcggctcccttcagcaaatttcaggggttttctgggaccagttctcccccaacaggaaacttgtttttttaacgtcagccagatatttagaaaataacctcaaaagtgtttatatggtcagtgagccccgcttagtgaaatagcaacagattggaagttgaaatggctgagatttggtgatctccccacagctggctctgcaagttacctctttctccttgggccttagtttccccattggtaatctgaattggctaagatgattggggagattttctgtacctgtaggtaatttggtgattcttggtggctgctcttctcacaacttttatgtatctgcttctgtcgtttagcttttttagccacatgctgaccaaatttacctttgagttgataagtccagtggcttgagtagtgaatccctcagtgctgacttatatcttgttctttgaaaaaatgcattgactctttaagacatctaaagtatcacattatccataatttattgcttttctttgcatctgcacctgccaccacagaataaccattaccctcagctgctgattgggcagctctgagattagcaaaagccagggacagctacatgttcaggtttttttttttttttttttttcaataagctattttttttcttttcttattttaaatagagagagagtcttgctatgtttcccaggctggtcttgaactcctggggctcaagtgatcctcctgccttggcctcccaaaatgctggattacaggcatgtgtgcctggcccaggtttcttaataaaacagaatcatgatcttccaggttccccccagtttctgatcatgttgatttgtagctgtggatcatgaacactgaatcctcagatcactctgacttcttatgcttctcctgtggatccactatcaaagtactaaatgctgtgtaagtagacgttaatctggctggaaccatgggaagcactttgcagtgttcagaagagaggctccatttgtggctattatgtagaactgggccagagccagtccattgcctgtttttttaaataaggttttactgagcacagccacactcatttgtttatgcagtacggcctgacattgcttttgctctgcaacagcagagtcgagtcattgcaacaaagagcatatggccccacagtgcctaaaatattgaccagctacccctttatggaaaaagattgctgactcctgataaagaatataaagtgagcctgattcttgaaaaaatcagaaccagagcctgttttgttttgttctaaactaagaagccgcataggatgtgacttgcgttttgagtagaggggaaggctgataacggcgtaagatgaagtggccctccacaaaggctggttaggggacagttctttctctaacatagttttaaaggatgtgatctggtccccttggatgccaggagagaatccagttgaacttgctcctaaatgctcttaaatatgcatattttctgccaactcacttctttaaacatctttcagcccagcgctgcggccccgggaagggccactgcgaatagagaggaagctggaaaagttcctggggctctgcagccaggaaggggaaccagggcaaatcttatgtaaagatttttcagcaacttgtcccaatttgtgtgtattctgaaactttctctttgggaccaaattcattctcaatggccctgagttcaatatattattaacagcagtattttaaaacttagggttgaactgggcatggtggcacataactgcaatcccagctactttggaggcagggatgggaggatcacttgaggccaggatctcaggaccagcctagagagatcccatctctaaaaaataaaatataagaaaataaaacttaggggatatacagatttaaatattcaaatctccctgctcccctgaaagtccccaggcagctgtcaatgacttgtttgttgtgttctcaatatgatggctatttgaaacttcacctacttttcattagattggttgtaccatgtcaccttagcttttaaaaatactcttttcagattcacgttctctaacaaagagtctcatgttcaagatcaatatgtctaataagtgctggtgtccttttaaagtatttaaatatatatgttgctgttgctgaatacaggagaccaggttaggaatatagtttcataataatagtacatacaatactaattgtatataaggtagcaaccaaaagaggttgttaattagcacatattccttttagaaaaatgtttcagaaacctcagtcttgatatctgagctatctgggctcccttacttgtgagtaagggatcatgctcaccactggagaagcttacaccgggactttttttcttttttcttttttttttgctatgacagagtaatgctaacgtaaggacaactgagtttgatcagtgtttaatcgcagtgggtaatcttatctgattgtctttaaaagtgaaaaggattaagattttattctttcttgtaaacattacttgattttttaaagaagttttgggctcactgctaaaatagagtatacaactgaatgtttttaagtcaagatactgttttaggagtttaccctctcatttataaccaaagttgctctaaaacactttccaaatatctgcacttctgatgtcagaatcaaaccagataattctctaattcttctttaatctaaagtagatagcttcccactggaaagtaaacaaaaccatccctcccaacctcaaagctaggccacactctatttcaaggcattttctttcagctgataaggtgtcctcctgaagccaagtaggtggttctggtctccaagtatcgttaagcacaggtgctatgacagaaaaagttctggggtggaagttttaagatgaggagttctgatcttaggcatcttaacagtcacaaggtgaaaagtcaaatgaaacagtacaattcttgatgagtgaggtgtcatcttccaaccacacagaggacgttttggctatgatcatctgatggcaagtgaaggagaaatgagtgatagggctttgcgttttcatccagatgctgtggccctgtgtttcacagcattaagagccataatttccaacctgcacagatcctgaacaacaaatgaataacgatgaatgtctttttggttgtaatttaacaagtcaaataaaataatcattgctgagcacaatcaca

SEQ ID NO: 8495 - DNA, 591 bp, Homo sapiens
  source 1..591: mol_type = unassigned DNA
acttggtgactttttatgattgctttctgctcgtctgaataaaggatgagcccagggcctgctgcccactgtctgctctgatgaccctctctcccctgcagatccgagtgatggtggacctgtgcaacagcaccaagggcatctgcctcacaggacctccgggagccggcgggttgccaggacacaacggattggatggacagcctggtcctcagggcccaaaaggagaaaaaggagcaaatggaaaaagaggaaaaatgggtatttttggcaactcttctaattaatttccctgttatttatctccatgattgcatttgggtcgactaaaactgtgtgcagcaggggtaaggtgtttcatctctgcacagtttaaggccggtttaactcttacctagaagccattgcgttccgggataccaagggtatacttcttggtcccaccttgacagatgtttatttcaaactggagaagccgtctcctgggaactgactcgcacccttctgctgcagatgggaggtggaaggagcaggagcccacagccctgggaggggcattctgtgggccgtgtgacagctggtgctggtgca

SEQ ID NO: 8496 - DNA, 571 bp, Homo sapiens
  source 1..571: mol_type = unassigned DNA
ggtgactttttatgattgctttctgctcgtctgaataaaggatgagcccagggcctgctgcccactgtctgctctgatgaccctctctcccctgcagatccgagtgatggtggacctgtgcaacagcaccaagggcatctgcctcacaggaccttctggaccaccaggacctccgggagccggcgggttgccaggacacaacggattggatggacagcctggtcctcagggcccaaaaggagaaaaaggagcaaatggaaaaagaggaaaaatggggatacctggagctgcaggaaatccaggggaaaggggagaaaagggagaccatggtgaactgggcctgcagggaaatgagggcccaccagggcagaagggagaaaagggtgacaaaggagatgtgtccaacgacgtgctcctggcaggtgccaaaggtgaccaaggcccacccggtccacctgggcccccaggccctccaggtcctccagggccccctggaagcagaagagccaaaggccctcggcagccaagcatgttcaacggccagtgcccaggtgagacttgtgccatacca

SEQ ID NO: 8497 - DNA, 1676 bp, Homo sapiens
  source 1..1676: mol_type = unassigned DNA
tgatggtggacctgtgcaacagcaccaagggcatctgcctcacaggaccttctggaccaccaggacctccgggagccggcgggttgccaggacacaacggattggatggacagcctggtcctcagggcccaaaaggagaaaaaggagcaaatggaaaaagaggaaaaatggggatacctggagctgcaggaaatccaggggaaaggggagaaaagggagaccatggtgaactgggcctgcagggaaatgagggcccaccagggcagaagggagaaaagggtgacaaaggagatgtgtccaacgacgtgctcctggcaggtgccaaaggtgaccaaggcccacccggtccacctgggcccccaggccctccaggtcctccagggccccctggaagcagaagagccaaaggccctcggcagccaagcatgttcaacggccagtgcccaggtgagacttgtgccataccaaatgatgataccttggttggaaaagctgatgagaaagccagtgaacaccattccccacaagcagaatccatgatcacttccattggaaacccagtgcaagtactgaaagtgacagagacatttgggacttggataagagagtctgctaacaagagtgatgaccggatttgggtgacagagcatttttcaggcatcatggttaaggaattcaaggatcagccctcacttctgaatggcagttacacgttcatccaccttccatactatttccatggctgtgggcacgttgtttacaacaactctctctactaccacaaagggggttctaataccctagtgagatttgaatttggccaggaaacatcccaaactctgaagcttgaaaatgccttgtattttgatcgaaaatacctttttgcaaattccaaaacttacttcaatctagctgtagatgaaaagggcctttggattatctatgcgtcaagtgtggacggctcgagcattcttgtagcacaactggatgagaggacattctcagtggtgcaacacgtcaataccacgtaccctaaatccaaggctggcaacgccttcattgcccgaggaatcctctatgtcacagacaccaaagatatgagggtcacatttgcctttgatttgttaggagggaaacagatcaatgcaaactttgatttaagaacttcccagtctgttcttgccatgttagcatacaacatgagagatcagcatttatattcatgggaagatggccatttaatgctttatcctgtgcagtttttgtcaactaccttaaatcagtgatgtgctgcattcggctcccttcagcaaatttcaggggttttctgggaccagttctcccccaacaggaaacttgtttttttaacgtcagccagatatttagaaaataacctcaaaagtgtttatatggtcagtgagccccgcttagtgaaatagcaacagattggaagttgaaatggctgagattttctgtacctgtaggtaatttggtgattcttggtggctgctcttctcacaacttttatgtatctgcttctgtcgtttagcttttttagccacatgctgaccaaatttacctttgagttgataagtccagtggcttgagtagtgaatccctcagtgctgacttatatcttgttctttgaaaaaatgcattgactctttaagacatct

SEQ ID NO: 8498 - DNA, 784 bp, Homo sapiens
  source 1..784: mol_type = unassigned DNA
accgcacaccccccagcccagactccagccctggaccgcgcatcccgagcccagcgcccagacagaggcccactcttttcttctccccggagtgcagtcaagttgaccaagaagcgggcactgtccatctcacctctgtcggatgccagcctggacctgcagacggttatccgcacctcacccagctccctcgtagctttcatcaactcgcgatgcacatctccaggaggctcctacggtcatctctccattggcaccatgagcccatctctgggattcccagcccagatgaatcaccaaaaagggccctcgccttcctttggggtccagccttgtggtccccatgactctgcccggggtgggatgatcccacatcctcagtcccggggacccttcccaacttgccagctgaagtctgagctggacatgctggttggcaagtgccgggaggaacccttggaaggtgatatgtccagccccaactccacaggcatacaggatcccctgttggggatgctggatgggcgggaggacctcgagagagaggagaagcgtgagcctgaatctgtgtatgaaactgactgccgttgggatggctgcagccaggaatttgactcccaagagcagctggtgcaccacatcaacagcgagcacatccacggggagcggaaggagttcgtgtgccactgggggggctgctccagggagctgaggcccttcaaagcccagtacatgctggtggttcacatgcgcagacacactggcgagaagccacacaagtgca

SEQ ID NO: 8499 - DNA, 3613 bp, Homo sapiens
  source 1..3613: mol_type = unassigned DNA
gcacaccccccagcccagactccagccctggaccgcgcatcccgagcccagcgcccagacagagtgtccccacaccctcctctgagacgccatgttcaactcgatgaccccaccaccaatcagtagctatggcgagccctgctgtctccggcccctccccagtcagggggcccccagtgtggggacagaaggactgtctggcccgcccttctgccaccaagctaacctcatgtccggcccccacagttatgggccagccagagagaccaacagctgcaccgagggcccactcttttcttctccccggagtgcagtcaagttgaccaagaagcgggcactgtccatctcacctctgtcggatgccagcctggacctgcagacggttatccgcacctcacccagctccctcgtagctttcatcaactcgcgatgcacatctccaggaggctcctacggtcatctctccattggcaccatgagcccatctctgggattcccagcccagatgaatcaccaaaaagggccctcgccttcctttggggtccagccttgtggtccccatgactctgcccggggtgggatgatcccacatcctcagtcccggggacccttcccaacttgccagctgaagtctgagctggacatgctggttggcaagtgccgggaggaacccttggaaggtgatatgtccagccccaactccacaggcatacaggatcccctgttggggatgctggatgggcgggaggacctcgagagagaggagaagcgtgagcctgaatctgtgtatgaaactgactgccgttgggatggctgcagccaggaatttgactcccaagagcagctggtgcaccacatcaacagcgagcacatccacggggagcggaaggagttcgtgtgccactgggggggctgctccagggagctgaggcccttcaaagcccagtacatgctggtggttcacatgcgcagacacactggcgagaagccacacaagtgcacgtttgaagggtgccggaagtcatactcacgcctcgaaaacctgaagacgcacctgcggtcacacacgggtgagaagccatacatgtgtgagcacgagggctgcagtaaagccttcagcaatgccagtgaccgagccaagcaccagaatcggacccattccaatgagaagccgtatgtatgtaagctccctggctgcaccaaacgctatacagatcctagctcgctgcgaaaacatgtcaagacagtgcatggtcctgacgcccatgtgaccaaacggcaccgtggggatggccccctgcctcgggcaccatccatttctacagtggagcccaagagggagcgggaaggaggtcccatcagggaggaaagcagactgactgtgccagagggtgccatgaagccacagccaagccctggggcccagtcatcctgcagcagtgaccactccccggcagggagtgcagccaatacagacagtggtgtggaaatgactggcaatgcagggggcagcactgaagacctctccagcttggacgagggaccttgcattgctggcactggtctgtccactcttcgccgccttgagaacctcaggctggaccagctacatcaactccggccaatagggacccggggtctcaaactgcccagcttgtcccacaccggtaccactgtgtcccgccgcgtgggccccccagtctctcttgaacgccgcagcagcagctccagcagcatcagctctgcctatactgtcagccgccgctcctccctggcctctcctttcccccctggctccccaccagagaatggagcatcctccctgcctggccttatgcctgcccagcactacctgcttcgggcaagatatgcttcagccagagggggtggtacttcgcccactgcagcatccagcctggatcggataggtggtcttcccatgcctccttggagaagccgagccgagtatccaggatacaaccccaatgcaggggtcacccggagggccagtgacccagcccaggctgctgaccgtcctgctccagctagagtccagaggttcaagagcctgggctgtgtccataccccacccactgtggcagggggaggacagaactttgatccttacctcccaacctctgtctactcaccacagccccccagcatcactgagaatgctgccatggatgctagagggctacaggaagagccagaagttgggacctccatggtgggcagtggtctgaacccctatatggacttcccacctactgatactctgggatatgggggacctgaaggggcagcagctgagccttatggagcgaggggtccaggctctctgcctcttgggcctggtccacccaccaactatggccccaacccctgtccccagcaggcctcatatcctgaccccacccaagaaacatggggtgagttcccttcccactctgggctgtacccaggccccaaggctctaggtggaacctacagccagtgtcctcgacttgaacattatggacaagtgcaagtcaagccagaacaggggtgcccagtggggtctgactccacaggactggcaccctgcctcaatgcccaccccagtgaggggcccccacatccacagcctctcttttcccattacccccagccctctcctccccaatatctccagtcaggcccctatacccagccaccccctgattatcttccttcagaacccaggccttgcctggactttgattcccccacccattccacagggcagctcaaggctcagcttgtgtgtaattatgttcaatctcaacaggagctactgtgggagggtgggggcagggaagatgcccccgcccaggaaccttcctaccagagtcccaagtttctggggggttcccaggttagcccaagccgtgctaaagctccagtgaacacatatggacctggctttggacccaacttgcccaatcacaagtcaggttcctatcccaccccttcaccatgccatgaaaattttgtagtgggggcaaatagggcttcacatagggcagcagcaccacctcgacttctgcccccattgcccacttgctatgggcctctcaaagtgggaggcacaaaccccagctgtggtcatcctgaggtgggcaggctaggagggggtcctgccttgtaccctcctcccgaaggacaggtatgtaaccccctggactctcttgatcttgacaacactcagctggactttgtggctattctggatgagccccaggggctgagtcctcctccttcccatgatcagcggggcagctctggacataccccacctccctctgggccccccaacatggctgtgggcaacatgagtgtcttactgagatccctacctggggaaacagaattcctcaactctagtgcctaaagagtagggaatctcatccatcacagatcgcatttcctaaggggtttctatccttccagaaaaattgggggagctgcagtcccatgcacaagatgccccagggatgggaggtatgggctgggggctatgtatagtctgtatacgttttgaggagaaatttgataatgacactgtttcctgataataaaggaactgcatcag

SEQ ID NO: 8500 - DNA, 480 bp, Homo sapiens
  source 1..480: mol_type = unassigned DNA
ggttaagtttaagaggctggagggatggctagctggaggtctgcgttgtagagaggtaaccccagtgtccccacaccctcctctgagacgccatgttcaactcgatgaccccaccaccaatcagtagctatggcgagccctgctgtctccggcccctccccagtcagggggcccccagtgtggggacagaaggactgtctggcccgcccttctgccaccaagctaacctcatgtccggcccccacagttatgggccagccagagagaccaacagctgcaccgagggcccactcttttcttctccccggagtgcagtcaagttgaccaagaagcgggcactgtccatctcacctctgtcggatgccagcctggacctgcagacggttatccgcacctcacccagctccctcgtagctttcatcaactcgcgatgcacatctccaggaggctcctacggtcatctctccattggcaccatga

SEQ ID NO: 8501 - DNA, 314 bp, Homo sapiens
  source 1..314: mol_type = unassigned DNA
ggatggctagctggaggtctgcgttgtagagaggtaaccccaggcccactcttttcttctccccggagtgcagtcaagttgaccaagaagcgggcactgtccatctcacctctgtcggatgccagcctggacctgcagacggttatccgcacctcacccagctccctcgtagctttcatcaactcgcgatgcacatctccaggaggctcctacggtcatctctccattggcaccatgaggtgcagtcagccccgggccaagaggcccctaaagcccctacccaagtccattaaaagtctcaagccctcaaacta

SEQ ID NO: 8502 - DNA, 3196 bp, Homo sapiens
  source 1..3196: mol_type = unassigned DNA
atgttcaactcgatgaccccaccaccaatcagtagctatggcgagccctgctgtctccggcccctccccagtcagggggcccccagtgtggggacagaagtcaagttgaccaagaagcgggcactgtccatctcacctctgtcggatgccagcctggacctgcagacggttatccgcacctcacccagctccctcgtagctttcatcaactcgcgatgcacatctccaggaggctcctacggtcatctctccattggcaccatgagcccatctctgggattcccagcccagatgaatcaccaaaaagggccctcgccttcctttggggtccagccttgtggtccccatgactctgcccggggtgggatgatcccacatcctcagtcccggggacccttcccaacttgccagctgaagtctgagctggacatgctggttggcaagtgccgggaggaacccttggaaggtgatatgtccagccccaactccacaggcatacaggatcccctgttggggatgctggatgggcgggaggacctcgagagagaggagaagcgtgagcctgaatctgtgtatgaaactgactgccgttgggatggctgcagccaggaatttgactcccaagagcagctggtgcaccacatcaacagcgagcacatccacggggagcggaaggagttcgtgtgccactgggggggctgctccagggagctgaggcccttcaaagcccagtacatgctggtggttcacatgcgcagacacactggcgagaagccacacaagtgcacgtttgaagggtgccggaagtcatactcacgcctcgaaaacctgaagacgcacctgcggtcacacacgggtgagaagccatacatgtgtgagcacgagggctgcagtaaagccttcagcaatgccagtgaccgagccaagcaccagaatcggacccattccaatgagaagccgtatgtatgtaagctccctggctgcaccaaacgctatacagatcctagctcgctgcgaaaacatgtcaagacagtgcatggtcctgacgcccatgtgaccaaacggcaccgtggggatggccccctgcctcgggcaccatccatttctacagtggagcccaagagggagcgggaaggaggtcccatcagggaggaaagcagactgactgtgccagagggtgccatgaagccacagccaagccctggggcccagtcatcctgcagcagtgaccactccccggcagggagtgcagccaatacagacagtggtgtggaaatgactggcaatgcagggggcagcactgaagacctctccagcttggacgagggaccttgcattgctggcactggtctgtccactcttcgccgccttgagaacctcaggctggaccagctacatcaactccggccaatagggacccggggtctcaaactgcccagcttgtcccacaccggtaccactgtgtcccgccgcgtgggccccccagtctctcttgaacgccgcagcagcagctccagcagcatcagctctgcctatactgtcagccgccgctcctccctggcctctcctttcccccctggctccccaccagagaatggagcatcctccctgcctggccttatgcctgcccagcactacctgcttcgggcaagatatgcttcagccagagggggtggtacttcgcccactgcagcatccagcctggatcggataggtggtcttcccatgcctccttggagaagccgagccgagtatccaggatacaaccccaatgcaggggtcacccggagggccagtgacccagcccaggctgctgaccgtcctgctccagctagagtccagaggttcaagagcctgggctgtgtccataccccacccactgtggcagggggaggacagaactttgatccttacctcccaacctctgtctactcaccacagccccccagcatcactgagaatgctgccatggatgctagagggctacaggaagagccagaagttgggacctccatggtgggcagtggtctgaacccctatatggacttcccacctactgatactctgggatatgggggacctgaaggggcagcagctgagccttatggagcgaggggtccaggctctctgcctcttgggcctggtccacccaccaactatggccccaacccctgtccccagcaggcctcatatcctgaccccacccaagaaacatggggtgagttcccttcccactctgggctgtacccaggccccaaggctctaggtggaacctacagccagtgtcctcgacttgaacattatggacaagtgcaagtcaagccagaacaggggtgcccagtggggtctgactccacaggactggcaccctgcctcaatgcccaccccagtgaggggcccccacatccacagcctctcttttcccattacccccagccctctcctccccaatatctccagtcaggcccctatacccagccaccccctgattatcttccttcagaacccaggccttgcctggactttgattcccccacccattccacagggcagctcaaggctcagcttgtgtgtaattatgttcaatctcaacaggagctactgtgggagggtgggggcagggaagatgcccccgcccaggaaccttcctaccagagtcccaagtttctggggggttcccaggttagcccaagccgtgctaaagctccagtgaacacatatggacctggctttggacccaacttgcccaatcacaagtcaggttcctatcccaccccttcaccatgccatgaaaattttgtagtgggggcaaatagggcttcacatagggcagcagcaccacctcgacttctgcccccattgcccacttgctatgggcctctcaaagtgggaggcacaaaccccagctgtggtcatcctgaggtgggcaggctaggagggggtcctgccttgtaccctcctcccgaaggacaggtatgtaaccccctggactctcttgatcttgacaacactcagctggactttgtggctattctggatgagccccaggggctgagtcctcctccttcccatgatcagcggggcagctctggacataccccacctccctctgggccccccaacatggctgtgggcaacatgagtgtcttactgagatccctacctggggaaacagaattcctcaactctagtgcct

SEQ ID NO: 8503 - DNA, 676 bp, Homo sapiens
  source 1..676: mol_type = unassigned DNA
agaggtgtgggtgctggggttcactccttgcagttgagtcagacgcttccaaatgggatcccaccttttgcccatcccattcaccagtgtagtctgaggaggaagtcccttccaaacccaggaggttccagctgcttgggtgggggcacttagggcaggaagacctggcttggtttcctcttccttctgcttacttccaccctcatcaccgtcacctcttcccctggggaagctgaagtctgagctggacatgctggttggcaagtgccgggaggaacccttggaaggtgatatgtccagccccaactccacaggcatacaggatcccctgttggggatgctggatgggcgggaggacctcgagagagaggagaagcgtgagcctgaatctgtgtatgaaactgactgccgttgggatggctgcagccaggaatttgactcccaagagcagctggtgcacgtgagccccagggggtaacaggaatggctagccagaacctttaggagattctgagtgggacatggtggaatccggctgagggcaggaggtcagaggagactgaggttgaatgctcagttgggtaggcagaagctcagaagttgtagctttgccttagggagctggaagacctgagatgtgagatatgatattgctcctgcctcttcctccttgagg

SEQ ID NO: 8504 - DNA, 3394 bp, Homo sapiens
  source 1..3394: mol_type = unassigned DNA
accgcacaccccccagcccagactccagccctggaccgcgcatcccgagcccagcgcccagacagaggcccactcttttcttctccccggagtgcagtcaagttgaccaagaagcgggcactgtccatctcacctctgtcggatgccagcctggacctgcagacggttatccgcacctcacccagctccctcgtagctttcatcaactcgcgatgcacatctccaggaggctcctacggtcatctctccattggcaccatgagcccatctctgggattcccagcccagatgaatcaccaaaaagggccctcgccttcctttggggtccagccttgtggtccccatgactctgcccggggtgggatgatcccacatcctcagtcccggggacccttcccaacttgccagctgaagtctgagctggacatgctggttggcaagtgccgggaggaacccttggaaggtgatatgtccagccccaactccacaggcatacaggatcccctgttggggatgctggatgggcgggaggacctcgagagagaggagaagcgtgagcctgaatctgtgtatgaaactgactgccgttgggatggctgcagccaggaatttgactcccaagagcagctggtgcaccacatcaacagcgagcacatccacggggagcggaaggagttcgtgtgccactgggggggctgctccagggagctgaggcccttcaaagcccagtacatgctggtggttcacatgcgcagacacactggcgagaagccacacaagtgcacgtttgaagggtgccggaagtcatactcacgcctcgaaaacctgaagacgcacctgcggtcacacacgggtgagaagccatacatgtgtgagcacgagggctgcagtaaagccttcagcaatgccagtgaccgagccaagcaccagaatcggacccattccaatgagaagccgtatgtatgtaagctccctggctgcaccaaacgctatacagatcctagctcgctgcgaaaacatgtcaagacagtgcatggtcctgacgcccatgtgaccaaacggcaccgtggggatggccccctgcctcgggcaccatccatttctacagtggagcccaagagggagcgggaaggaggtcccatcagggaggaaagcagactgactgtgccagagggtgccatgaagccacagccaagccctggggcccagtcatcctgcagcagtgaccactccccggcagggagtgcagccaatacagacagtggtgtggaaatgactggcaatgcagggggcagcactgaagacctctccagcttggacgagggaccttgcattgctggcactggtctgtccactcttcgccgccttgagaacctcaggctggaccagctacatcaactccggccaatagggacccggggtctcaaactgcccagcttgtcccacaccggtaccactgtgtcccgccgcgtgggccccccagtctctcttgaacgccgcagcagcagctccagcagcatcagctctgcctatactgtcagccgccgctcctccctggcctctcctttcccccctggctccccaccagagaatggagcatcctccctgcctggccttatgcctgcccagcactacctgcttcgggcaagatatgcttcagccagagggggtggtacttcgcccactgcagcatccagcctggatcggataggtggtcttcccatgcctccttggagaagccgagccgagtatccaggatacaaccccaatgcaggggtcacccggagggccagtgacccagcccaggctgctgaccgtcctgctccagctagagtccagaggttcaagagcctgggctgtgtccataccccacccactgtggcagggggaggacagaactttgatccttacctcccaacctctgtctactcaccacagccccccagcatcactgagaatgctgccatggatgctagagggctacaggaagagccagaagttgggacctccatggtgggcagtggtctgaacccctatatggacttcccacctactgatactctgggatatgggggacctgaaggggcagcagctgagccttatggagcgaggggtccaggctctctgcctcttgggcctggtccacccaccaactatggccccaacccctgtccccagcaggcctcatatcctgaccccacccaagaaacatggggtgagttcccttcccactctgggctgtacccaggccccaaggctctaggtggaacctacagccagtgtcctcgacttgaacattatggacaagtgcaagtcaagccagaacaggggtgcccagtggggtctgactccacaggactggcaccctgcctcaatgcccaccccagtgaggggcccccacatccacagcctctcttttcccattacccccagccctctcctccccaatatctccagtcaggcccctatacccagccaccccctgattatcttccttcagaacccaggccttgcctggactttgattcccccacccattccacagggcagctcaaggctcagcttgtgtgtaattatgttcaatctcaacaggagctactgtgggagggtgggggcagggaagatgcccccgcccaggaaccttcctaccagagtcccaagtttctggggggttcccaggttagcccaagccgtgctaaagctccagtgaacacatatggacctggctttggacccaacttgcccaatcacaagtcaggttcctatcccaccccttcaccatgccatgaaaattttgtagtgggggcaaatagggcttcacatagggcagcagcaccacctcgacttctgcccccattgcccacttgctatgggcctctcaaagtgggaggcacaaaccccagctgtggtcatcctgaggtgggcaggctaggagggggtcctgccttgtaccctcctcccgaaggacaggtatgtaaccccctggactctcttgatcttgacaacactcagctggactttgtggctattctggatgagccccaggggctgagtcctcctccttcccatgatcagcggggcagctctggacataccccacctccctctgggccccccaacatggctgtgggcaacatgagtgtcttactgagatccctacctggggaaacagaattcctcaactctagtgcctaaagagtagggaatctcatccatcacagatcgcatttcctaaggggtttctatccttccagaaaaattgggggagctgcagtcccatgcacaagatgccccagggatgggaggtatgggctgggggctatgtatagtctgtatacgttttgaggagaaatttgataatgacactgtttcctgataataaaggaactgcatc

SEQ ID NO: 8505 - DNA, 3475 bp, Homo sapiens
  source 1..3475: mol_type = unassigned DNA
cccagactccagccctggaccgcgcatcccgagcccagcgcccagacagagtgtccccacaccctcctctgagacgccatgttcaactcgatgaccccaccaccaatcagtagctatggcgagccctgctgtctccggcccctccccagtcagggggcccccagtgtggggacagaagtcaagttgaccaagaagcgggcactgtccatctcacctctgtcggatgccagcctggacctgcagacggttatccgcacctcacccagctccctcgtagctttcatcaactcgcgatgcacatctccaggaggctcctacggtcatctctccattggcaccatgagcccatctctgggattcccagcccagatgaatcaccaaaaagggccctcgccttcctttggggtccagccttgtggtccccatgactctgcccggggtgggatgatcccacatcctcagtcccggggacccttcccaacttgccagctgaagtctgagctggacatgctggttggcaagtgccgggaggaacccttggaaggtgatatgtccagccccaactccacaggcatacaggatcccctgttggggatgctggatgggcgggaggacctcgagagagaggagaagcgtgagcctgaatctgtgtatgaaactgactgccgttgggatggctgcagccaggaatttgactcccaagagcagctggtgcaccacatcaacagcgagcacatccacggggagcggaaggagttcgtgtgccactgggggggctgctccagggagctgaggcccttcaaagcccagtacatgctggtggttcacatgcgcagacacactggcgagaagccacacaagtgcacgtttgaagggtgccggaagtcatactcacgcctcgaaaacctgaagacgcacctgcggtcacacacgggtgagaagccatacatgtgtgagcacgagggctgcagtaaagccttcagcaatgccagtgaccgagccaagcaccagaatcggacccattccaatgagaagccgtatgtatgtaagctccctggctgcaccaaacgctatacagatcctagctcgctgcgaaaacatgtcaagacagtgcatggtcctgacgcccatgtgaccaaacggcaccgtggggatggccccctgcctcgggcaccatccatttctacagtggagcccaagagggagcgggaaggaggtcccatcagggaggaaagcagactgactgtgccagagggtgccatgaagccacagccaagccctggggcccagtcatcctgcagcagtgaccactccccggcagggagtgcagccaatacagacagtggtgtggaaatgactggcaatgcagggggcagcactgaagacctctccagcttggacgagggaccttgcattgctggcactggtctgtccactcttcgccgccttgagaacctcaggctggaccagctacatcaactccggccaatagggacccggggtctcaaactgcccagcttgtcccacaccggtaccactgtgtcccgccgcgtgggccccccagtctctcttgaacgccgcagcagcagctccagcagcatcagctctgcctatactgtcagccgccgctcctccctggcctctcctttcccccctggctccccaccagagaatggagcatcctccctgcctggccttatgcctgcccagcactacctgcttcgggcaagatatgcttcagccagagggggtggtacttcgcccactgcagcatccagcctggatcggataggtggtcttcccatgcctccttggagaagccgagccgagtatccaggatacaaccccaatgcaggggtcacccggagggccagtgacccagcccaggctgctgaccgtcctgctccagctagagtccagaggttcaagagcctgggctgtgtccataccccacccactgtggcagggggaggacagaactttgatccttacctcccaacctctgtctactcaccacagccccccagcatcactgagaatgctgccatggatgctagagggctacaggaagagccagaagttgggacctccatggtgggcagtggtctgaacccctatatggacttcccacctactgatactctgggatatgggggacctgaaggggcagcagctgagccttatggagcgaggggtccaggctctctgcctcttgggcctggtccacccaccaactatggccccaacccctgtccccagcaggcctcatatcctgaccccacccaagaaacatggggtgagttcccttcccactctgggctgtacccaggccccaaggctctaggtggaacctacagccagtgtcctcgacttgaacattatggacaagtgcaagtcaagccagaacaggggtgcccagtggggtctgactccacaggactggcaccctgcctcaatgcccaccccagtgaggggcccccacatccacagcctctcttttcccattacccccagccctctcctccccaatatctccagtcaggcccctatacccagccaccccctgattatcttccttcagaacccaggccttgcctggactttgattcccccacccattccacagggcagctcaaggctcagcttgtgtgtaattatgttcaatctcaacaggagctactgtgggagggtgggggcagggaagatgcccccgcccaggaaccttcctaccagagtcccaagtttctggggggttcccaggttagcccaagccgtgctaaagctccagtgaacacatatggacctggctttggacccaacttgcccaatcacaagtcaggttcctatcccaccccttcaccatgccatgaaaattttgtagtgggggcaaatagggcttcacatagggcagcagcaccacctcgacttctgcccccattgcccacttgctatgggcctctcaaagtgggaggcacaaaccccagctgtggtcatcctgaggtgggcaggctaggagggggtcctgccttgtaccctcctcccgaaggacaggtatgtaaccccctggactctcttgatcttgacaacactcagctggactttgtggctattctggatgagccccaggggctgagtcctcctccttcccatgatcagcggggcagctctggacataccccacctccctctgggccccccaacatggctgtgggcaacatgagtgtcttactgagatccctacctggggaaacagaattcctcaactctagtgcctaaagagtagggaatctcatccatcacagatcgcatttcctaaggggtttctatccttccagaaaaattgggggagctgcagtcccatgcacaagatgccccagggatgggaggtatgggctgggggctatgtatagtctgtatacgttttgaggagaaatttgataatgacactgtttcctgataataaaggaactgcatc

SEQ ID NO: 8506 - DNA, 567 bp, Homo sapiens
  source 1..567: mol_type = unassigned DNA
taaaaaaagtgtcggagattggcgcgtcctttggttcctttctcgaactttccttgtaggattgccacccaggacgatgagcggctgagatggagacgtctgcctcagccactgcctccgagaagcaagaagccaaaagtgggatcctggaggccgctggcttccccgacccgggtaaaaaggcctctcctttggtggtggctgcagcggcagcagcagcggtagctgcccaaggagtgccgcagcatctcttgccaccattccatgcgcccctaccgattgacatgcgacaccaggaaggaaggtaccattacgagcctcattctgtccacggtgtgcacgggccccctgccctcagcggcagccctgtcatctctgacatctccttgatccggctttccccgcacccggctggccctggggagtcccccttcaacgccccccacccgtacgtgaacccccacatggagcactacctccgttctgtgcacagcagccccacgctctccatgatctctgcagccaggggcctcagccccgctgatggtgagtagggtgtggggatgg

SEQ ID NO: 8507 - DNA, 864 bp, Homo sapiens
  source 1..864: mol_type = unassigned DNA
taaaaaaagtgtcggagattggcgcgtcctttggttcctttctcgaactttccttgtaggattgccacccaggacgatgagcggctgagatggagacgtctgcctcagccactgcctccgagaagcaagaagccaaaagtgggatcctggaggccgctggcttccccgacccgggtaaaaaggcctctcctttggtggtggctgcagcggcagcagcagcggtagctgcccaaggagtgccgcagcatctcttgccaccattccatgcgcccctaccgattgacatgcgacaccaggaaggaaggtaccattacgagcctcattctgtccacggtgtgcacgggccccctgccctcagcggcagccctgtcatctctgacatctccttgatccggctttccccgcacccggctggccctggggagtcccccttcaacgccccccacccgtacgtgaacccccacatggagcactacctccgttctgtgcacagcagccccacgctctccatgatctctgcagccaggggcctcagccccgctgatggtgagtagggtgtggggatggggaggggcagctagggcactggggcagggcgcagccagcctctctcacgctaacactgtcaactcctcagccttggtccccttgaatggtgaccaggctggctggcgttccttcacactacttccaaacaacaagtttttgggttttatgctcattaaagagcctttggtaagcactcttttgcatgcaaaccatatatgatctattgtaataataacagtaagggtctatccaggtaggtcctgtgtagctgagaaccactggttgtaaccaaccaaagcctgcagaagctggtgt

SEQ ID NO: 8508 - DNA, 315 bp, Homo sapiens
  source 1..315: mol_type = unassigned DNA
ggccacctgcgtgctagaggcaaacttttgtctctctcggattgccacccaggacgatgagcggctgagatggagacgtctgcctcagccactgcctccgagaagcaagaagccaaaagtgggatcctggaggccgctggcttccccgacccgggtaaaaaggcctctcctttggtggtggctgcagcggcagcagcagcggtagctgcccaaggagtgccgcagcatctcttgccaccattccatgcgcccctaccgattgacatgcgacaccaggaaggaaggtaccattacgagcctcattctgtccacggt

SEQ ID NO: 8509 - DNA, 3724 bp, Homo sapiens
  source 1..3724: mol_type = unassigned DNA
tgaagttcgtggactcctacaataatgctataaatgcatagaagaaaagacacaggactgtgaaagaaagtgatgatgcgatgtctaaaacgttcaaggcaccgcatctgtgatcaagaatacatgtgctgctttaccgacacatcaaagagcaaggattgccacccaggacgatgagcggctgagatggagacgtctgcctcagccactgcctccgagaagcaagaagccaaaagtgggatcctggaggccgctggcttccccgacccgggtaaaaaggcctctcctttggtggtggctgcagcggcagcagcagcggtagctgcccaaggagcccagccttcaccttcccccaccccatcaaccccgtggcctaccagcagattctgagccagcagaggggtctggggtcagcctttggacacacaccacccctgatccagccctcacccaccttcctggcccagcagcccatggccctcacctccatcaatgccacgcccacccagctcagcagcagcagcaactgtctgagtgacaccaaccagaacaagcagagcagtgagtcggccgtcagcagcaccgtcaaccctgtcgccattcacaagcgcagcaaggtcaagaccgagcctgagggcctgcggccggcctcccctctggcgctgacgcagggccaggtgtctggacacggctcatgtgggtgtgcccttcccctctcccaggagcagctggctgacctcaaggaagatctggacagggatgactgtaagcaggaggctgaggtggtcatctatgagaccaactgccactgggaagactgcaccaaggagtacgacacccaggagcagctggtgcatcacatcaacaacgagcacatccacggggagaagaaggagtttgtgtgccgctggcaggcctgcacgcgggagcagaagcccttcaaggcgcagtacatgctggtggtgcacatgcggcgacacacgggcgagaagccccacaagtgcacgttcgagggctgctcgaaggcctactcccgcctggagaacctgaagacacacctgcggtcccacaccggggagaagccatatgtgtgtgagcacgagggctgcaacaaagccttctccaacgcctcggaccgcgccaagcaccagaatcgcacccactccaacgagaaaccctacatctgcaagatcccaggctgcaccaagagatacacagaccccagctctctccggaagcatgtgaaaacggtccacggcccagatgcccacgtcaccaagaagcagcgcaatgacgtgcacctccgcacaccgctgctcaaagagaatggggacagtgaggccggcacggagcctggcggcccagagagcaccgaggccagcagcaccagccaggccgtggaggactgcctgcacgtcagagccatcaagaccgagagctccgggctgtgtcagtccagccccggggcccagtcgtcctgcagcagcgagccctctcctctgggcagtgcccccaacaatgacagtggcgtggagatgccggggacggggcccgggagcctgggagacctgacggcactggatgacacacccccaggggccgacacctcagccctggctgccccctccgctggtggcctccagctgcgcaaacacatgaccaccatgcaccggttcgagcagctcaagaaggagaagctcaagtcactcaaggattcctgctcatgggccgggccgactccacacacgcggaacaccaagctgcctcccctcccgggaagtggctccatcctggaaaacttcagtggcagtgggggcggcgggcccgcggggctgctgccgaacccgcggctgtcggagctgtccgcgagcgaggtgaccatgctgagccagctgcaggagcgccgcgacagctccaccagcacggtcagctcggcctacaccgtgagccgccgctcctccggcatctccccctacttctccagccgccgctccagcgaggcctcgcccctgggcgccggccgcccgcacaacgcgagctccgctgactcctacgaccccatctccacggacgcgtcgcggcgctcgagcgaggccagccagtgcagcggcggctccgggctgctcaacctcacgccggcgcagcagtacagcctgcgggccaagtacgcggcagccactggcggccccccgcccactccgctgccgggcctggagcgcatgagcctgcggaccaggctggcgctgctggacgcgcccgagcgcacgctgcccgccggctgcccacgcccactggggccgcggcgtggcagcgacgggccgacctatggccacggccacgcgggggctgcgcccgccttcccccacgaggctccaggcggcggagccaggcgggccagcgaccctgtgcggcggcccgatgccctgtccctgccgcgggtgcagcgcttccacagcacccacaacgtgaaccccggcccgctgccgccctgtgccgacaggcgaggcctccgcctgcagagccacccgagcaccgacggcggcctggcccgcggcgcctactcgccccggccgcctagcatcagcgagaacgtggcgatggaggccgtggcggcaggagtggacggcgcggggcccgaggccgacctggggctgccggaggacgacctggtgcttccagacgacgtggtgcagtacatcaaggcgcacgccagtggcgctctggacgagggcaccgggcaggtgtatcccacggaaagcactggcttctctgacaaccccagactacccagcccggggctgcacggccagcgcaggatggtggctgcggactccaacgtgggcccctccgcccctatgctgggaggatgccagttaggctttggggcgccctccagcctgaacaaaaataacatgcctgtgcagtggaatgaggcatcagcaacatggctgtcggggacatgagctccatgctcaccagcctcgccgaggagagcaagttcctgaacatgatgacctagaggcccgagcgcctggtgctgagtgcacccggaggggtcatcgctgcccagagcctggggattccagctgtcttgtctttttccaaaaaagtgttaaataggcttgaggggttgttgcgcaatggccgcttcagatgacagatgttgtaagagaaggtttatgggcatcctctctggtcttttggattattcctcagaacaatgaaaaaagtctccataggacaggaaggaatgcaaaactcatttacacagtgctttccagcctttggtgcttacaggaccgcgctgttccggcttcttcacggctgacattcggctaacgagggattactttggccaaaacctttcaaaggatatgcagaaagatggtagggagcatttgggtttgaatctgaatgctatactggatactctgctccggaaagatgagctttttattctactacttggaaggaaaaggaattcctggtccacctgaattcctctatgaagcctaactcttgaggtctctaacataccttgtcatagaggaaaagcacagattatacctggatgattcaggagcacattctgattccaggtttggtagagctggctcttctactccgtaaagccgagtctgggactggcagcccatccaagtgtatatgaatgaataaagcatccaagtatatatgaatgaataaagtatgtaagtatcaccag

SEQ ID NO: 8510 - DNA, 3673 bp, Homo sapiens
  source 1..3673: mol_type = unassigned DNA
tgaagttcgtggactcctacaataatgctataaatgcatagaagaaaagacacaggactgtgaaagaaagtgatgatgcgatgtctaaaacgttcaaggcaccgcatctgtgatcaagaatacatgtgctgctttaccgacacatcaaagagcaaggattgccacccaggacgatgagcggctgagatggagacgtctgcctcagccactgcctccgagaagcaagaagccaaaagtgggatcctggaggccgctggcttccccgacccgggtaaaaaggcctctcctttggtggtggctgcagcggcagcagcagcggtagctgcccaaggagcccagccttcaccttcccccaccccatcaaccccgtggcctaccagcagattctgagccagcagaggggtctggggtcagcctttggacacacaccacccctgatccagccctcacccaccttcctggcccagcagcccatggccctcacctccatcaatgccacgcccacccagctcagcagcagcagcaactgtctgagtgacaccaaccagaacaagcagagcagtgagtcggccgtcagcagcaccgtcaaccctgtcgccattcacaagcgcagcaaggtcaagaccgagcctgagggcctgcggccggcctcccctctggcgctgacgcaggagcagctggctgacctcaaggaagatctggacagggatgactgtaagcaggaggctgaggtggtcatctatgagaccaactgccactgggaagactgcaccaaggagtacgacacccaggagcagctggtgcatcacatcaacaacgagcacatccacggggagaagaaggagtttgtgtgccgctggcaggcctgcacgcgggagcagaagcccttcaaggcgcagtacatgctggtggtgcacatgcggcgacacacgggcgagaagccccacaagtgcacgttcgagggctgctcgaaggcctactcccgcctggagaacctgaagacacacctgcggtcccacaccggggagaagccatatgtgtgtgagcacgagggctgcaacaaagccttctccaacgcctcggaccgcgccaagcaccagaatcgcacccactccaacgagaaaccctacatctgcaagatcccaggctgcaccaagagatacacagaccccagctctctccggaagcatgtgaaaacggtccacggcccagatgcccacgtcaccaagaagcagcgcaatgacgtgcacctccgcacaccgctgctcaaagagaatggggacagtgaggccggcacggagcctggcggcccagagagcaccgaggccagcagcaccagccaggccgtggaggactgcctgcacgtcagagccatcaagaccgagagctccgggctgtgtcagtccagccccggggcccagtcgtcctgcagcagcgagccctctcctctgggcagtgcccccaacaatgacagtggcgtggagatgccggggacggggcccgggagcctgggagacctgacggcactggatgacacacccccaggggccgacacctcagccctggctgccccctccgctggtggcctccagctgcgcaaacacatgaccaccatgcaccggttcgagcagctcaagaaggagaagctcaagtcactcaaggattcctgctcatgggccgggccgactccacacacgcggaacaccaagctgcctcccctcccgggaagtggctccatcctggaaaacttcagtggcagtgggggcggcgggcccgcggggctgctgccgaacccgcggctgtcggagctgtccgcgagcgaggtgaccatgctgagccagctgcaggagcgccgcgacagctccaccagcacggtcagctcggcctacaccgtgagccgccgctcctccggcatctccccctacttctccagccgccgctccagcgaggcctcgcccctgggcgccggccgcccgcacaacgcgagctccgctgactcctacgaccccatctccacggacgcgtcgcggcgctcgagcgaggccagccagtgcagcggcggctccgggctgctcaacctcacgccggcgcagcagtacagcctgcgggccaagtacgcggcagccactggcggccccccgcccactccgctgccgggcctggagcgcatgagcctgcggaccaggctggcgctgctggacgcgcccgagcgcacgctgcccgccggctgcccacgcccactggggccgcggcgtggcagcgacgggccgacctatggccacggccacgcgggggctgcgcccgccttcccccacgaggctccaggcggcggagccaggcgggccagcgaccctgtgcggcggcccgatgccctgtccctgccgcgggtgcagcgcttccacagcacccacaacgtgaaccccggcccgctgccgccctgtgccgacaggcgaggcctccgcctgcagagccacccgagcaccgacggcggcctggcccgcggcgcctactcgccccggccgcctagcatcagcgagaacgtggcgatggaggccgtggcggcaggagtggacggcgcggggcccgaggccgacctggggctgccggaggacgacctggtgcttccagacgacgtggtgcagtacatcaaggcgcacgccagtggcgctctggacgagggcaccgggcaggtgtatcccacggaaagcactggcttctctgacaaccccagactacccagcccggggctgcacggccagcgcaggatggtggctgcggactccaacgtgggcccctccgcccctatgctgggaggatgccagttaggctttggggcgccctccagcctgaacaaaaataacatgcctgtgcagtggaatgaggcatcagcaacatggctgtcggggacatgagctccatgctcaccagcctcgccgaggagagcaagttcctgaacatgatgacctagaggcccgagcgcctggtgctgagtgcacccggaggggtcatcgctgcccagagcctggggattccagctgtcttgtctttttccaaaaaagtgttaaataggcttgaggggttgttgcgcaatggccgcttcagatgacagatgttgtaagagaaggtttatgggcatcctctctggtcttttggattattcctcagaacaatgaaaaaagtctccataggacaggaaggaatgcaaaactcatttacacagtgctttccagcctttggtgcttacaggaccgcgctgttccggcttcttcacggctgacattcggctaacgagggattactttggccaaaacctttcaaaggatatgcagaaagatggtagggagcatttgggtttgaatctgaatgctatactggatactctgctccggaaagatgagctttttattctactacttggaaggaaaaggaattcctggtccacctgaattcctctatgaagcctaactcttgaggtctctaacataccttgtcatagaggaaaagcacagattatacctggatgattcaggagcacattctgattccaggtttggtagagctggctcttctactccgtaaagccgagtctgggactggcagcccatccaagtgtatatgaatgaataaagcatccaagtatatatgaatgaataaagtatgtaagtatcaccag

SEQ ID NO: 8511 - DNA, 4955 bp, Homo sapiens
  source 1..4955: mol_type = unassigned DNA
tgaagttcgtggactcctacaataatgctataaatgcatagaagaaaagacacaggactgtgaaagaaagtgatgatgcgatgtctaaaacgttcaaggcaccgcatctgtgatcaagaatacatgtgctgctttaccgacacatcaaagagcaaggattgccacccaggacgatgagcggctgagatggagacgtctgcctcagccactgcctccgagaagcaagaagccaaaagtgggatcctggaggccgctggcttccccgacccgggtaaaaaggcctctcctttggtggtggctgcagcggcagcagcagcggtagctgcccaaggagcccagccttcaccttcccccaccccatcaaccccgtggcctaccagcagattctgagccagcagaggggtctggggtcagcctttggacacacaccacccctgatccagccctcacccaccttcctggcccagcagcccatggccctcacctccatcaatgccacgcccacccagctcagcagcagcagcaactgtctgagtgacaccaaccagaacaagcagagcagtgagtcggccgtcagcagcaccgtcaaccctgtcgccattcacaagcgcagcaaggtcaagaccgagcctgagggcctgcggccggcctcccctctggcgctgacgcagggccaggtgtctggacacggctcatgtgggtgtgcccttcccctctcccaggagcagctggctgacctcaaggaagatctggacagggatgactgtaagcaggaggctgaggtggtcatctatgagaccaactgccactgggaagactgcaccaaggagtacgacacccaggagcagctggtgcatcacatcaacaacgagcacatccacggggagaagaaggagtttgtgtgccgctggcaggcctgcacgcgggagcagaagcccttcaaggcgcagtacatgctggtggtgcacatgcggcgacacacgggcgagaagccccacaagtgcacgttcgagggctgctcgaaggcctactcccgcctggagaacctgaagacacacctgcggtcccacaccggggagaagccatatgtgtgtgagcacgagggctgcaacaaagccttctccaacgcctcggaccgcgccaagcaccagaatcgcacccactccaacgagaaaccctacatctgcaagatcccaggctgcaccaagagatacacagaccccagctctctccggaagcatgtgaaaacggtccacggcccagatgcccacgtcaccaagaagcagcgcaatgacgtgcacctccgcacaccgctgctcaaagagaatggggacagtgaggccggcacggagcctggcggcccagagagcaccgaggccagcagcaccagccaggccgtggaggactgcctgcacgtcagagccatcaagaccgagagctccgggctgtgtcagtccagccccggggcccagtcgtcctgcagcagcgagccctctcctctgggcagtgcccccaacaatgacagtggcgtggagatgccggggacggggcccgggagcctgggagacctgacggcactggatgacacacccccaggggccgacacctcagccctggctgccccctccgctggtggcctccagctgcgcaaacacatgaccaccatgcaccggttcgagcagctcaagaaggagaagctcaagtcactcaaggattcctgctcatgggccgggccgactccacacacgcggaacaccaagctgcctcccctcccgggaagtggctccatcctggaaaacttcagtggcagtgggggcggcgggcccgcggggctgctgccgaacccgcggctgtcggagctgtccgcgagcgaggtgaccatgctgagccagctgcaggagcgccgcgacagctccaccagcacggtcagctcggcctacaccgtgagccgccgctcctccggcatctccccctacttctccagccgccgctccagcgaggcctcgcccctgggcgccggccgcccgcacaacgcgagctccgctgactcctacgaccccatctccacggacgcgtcgcggcgctcgagcgaggccagccagtgcagcggcggctccgggctgctcaacctcacgccggcgcagcagtacagcctgcgggccaagtacgcggcagccactggcggccccccgcccactccgctgccgggcctggagcgcatgagcctgcggaccaggctggcgctgctggacgcgcccgagcgcacgctgcccgccggctgcccacgcccactggggccgcggcgtggcagcgacgggccgacctatggccacggccacgcgggggctgcgcccgccttcccccacgaggctccaggcggcggagccaggcgggccagcgaccctgtgcggcggcccgatgccctgtccctgccgcgggtgcagcgcttccacagcacccacaacgtgaaccccggcccgctgccgccctgtgccgacaggcgaggcctccgcctgcagagccacccgagcaccgacggcggcctggcccgcggcgcctactcgccccggccgcctagcatcagcgagaacgtggcgatggaggccgtggcggcaggagtggacggcgcggggcccgaggccgacctggggctgccggaggacgacctggtgcttccagacgacgtggtgcagtacatcaaggcgcacgccagtggcgctctggacgagggcaccgggcaggtgtatcccacggaaagcactggcttctctgacaaccccagactacccagcccggggctgcacggccagcgcaggatggtggctgcggactccaacgtgggcccctccgcccctatgctgggaggatgccagttaggctttggggcgccctccagcctgaacaaaaataacatgcctgtgcagtggaatgaggtgagctccggcaccgtagacgccctggccagccaggtgaagcctccaccctttcctcagggcaacctggcggtggtgcagcagaagcctgcctttggccagtacccgggctacagtccgcaaggcctacaggctagccctgggggcctggacagcacgcagccacacctgcagccccgcagcggagccccctcccagggcatccccagggtaaactacatgcagcagctgcgacagccagtggcaggcagccagtgtcctggcatgactaccactatgagcccccatgcctgctatggccaagtccacccccagctgagccccagcaccatcagtggggccctcaaccagttcccccaatcctgcagcaacatgccagccaagccagggcatctggggcaccctcagcagacagaagtggcacctgaccccaccacgatgggcaatcgccacagggaacttggggtccccgattcagccctggctggagtgccaccacctcacccagtccagagctacccacagcagagccatcacctggcagcctccatgagccaggagggctaccaccaggtccccagccttctgcctgcccgccagcctggcttcatggagccccaaacaggcccgatgggggtggctacagcaggctttggcctagtgcagccccggcctcccctcgagcccagccccactggccgccaccgtggggtacgtgctgtgcagcagcagctggcctacgccagggccacaggccatgccatggctgccatgccgtccagtcaggaaacagcagaggctgtgcccaagggagcgatgggcaacatggggtcggtgcctccccagccgcctccgcaggacgcaggtggggccccggaccacagcatgctctactactacggccagatccacatgtacgaacaggatggaggcctggagaacctcgggagctgccaggtcatgcggtcccagccaccacagccacaggcctgtcaggacagcatccagccccagcccttgccctcaccaggggtcaaccaggtgtccagcactgtggactcccagctcctggaggccccccagattgacttcgatgccatcatggatgatggcgatcactcgagtttgttctcgggtgctctgagccccagcctcctccacagcctctcccagaactcctcccgcctcaccaccccccgaaactccttgaccctgccctccatccccgcaggcatcagcaacatggctgtcggggacatgagctccatgctcaccagcctcgccgaggagagcaagttcctgaacatgatgacctagaggcccgagcgcctggtgctgagtgcacccggaggggtcatcgctgcccagagcctggggattccagctgtcttgtctttttccaaaaaagtgttaaataggcttgaggggttgttgcgcaatggccgcttcagatgacagatgttgtaagagaaggtttatgggcatcctctctggtcttttggattattcctcagaacaatgaaaaaagtctccataggacaggaaggaatgcaaaactcatttacacagtgctttccagcctttggtgcttacaggaccgcgctgttccggcttcttcacggctgacattcggctaacgagggattactttggccaaaacctttcaaaggatatgcagaaagatggtagggagcatttgggtttgaatctgaatgctatactggatactctgctccggaaagatgagctttttattctactacttggaaggaaaaggaattcctggtccacctgaattcctctatgaagcctaactcttgaggtctctaacataccttgtcatagaggaaaagcacagattatacctggatgattcaggagcacattctgattccaggtttggtagagctggctcttctactccgtaaagccgagtctgggactggcagcccatccaagtgtatatgaatgaataaagcatccaagtatatatgaatgaataaagtatgtaagtatcaccag

SEQ ID NO: 8512 - DNA, 4904 bp, Homo sapiens
  source 1..4904: mol_type = unassigned DNA
tgaagttcgtggactcctacaataatgctataaatgcatagaagaaaagacacaggactgtgaaagaaagtgatgatgcgatgtctaaaacgttcaaggcaccgcatctgtgatcaagaatacatgtgctgctttaccgacacatcaaagagcaaggattgccacccaggacgatgagcggctgagatggagacgtctgcctcagccactgcctccgagaagcaagaagccaaaagtgggatcctggaggccgctggcttccccgacccgggtaaaaaggcctctcctttggtggtggctgcagcggcagcagcagcggtagctgcccaaggagcccagccttcaccttcccccaccccatcaaccccgtggcctaccagcagattctgagccagcagaggggtctggggtcagcctttggacacacaccacccctgatccagccctcacccaccttcctggcccagcagcccatggccctcacctccatcaatgccacgcccacccagctcagcagcagcagcaactgtctgagtgacaccaaccagaacaagcagagcagtgagtcggccgtcagcagcaccgtcaaccctgtcgccattcacaagcgcagcaaggtcaagaccgagcctgagggcctgcggccggcctcccctctggcgctgacgcaggagcagctggctgacctcaaggaagatctggacagggatgactgtaagcaggaggctgaggtggtcatctatgagaccaactgccactgggaagactgcaccaaggagtacgacacccaggagcagctggtgcatcacatcaacaacgagcacatccacggggagaagaaggagtttgtgtgccgctggcaggcctgcacgcgggagcagaagcccttcaaggcgcagtacatgctggtggtgcacatgcggcgacacacgggcgagaagccccacaagtgcacgttcgagggctgctcgaaggcctactcccgcctggagaacctgaagacacacctgcggtcccacaccggggagaagccatatgtgtgtgagcacgagggctgcaacaaagccttctccaacgcctcggaccgcgccaagcaccagaatcgcacccactccaacgagaaaccctacatctgcaagatcccaggctgcaccaagagatacacagaccccagctctctccggaagcatgtgaaaacggtccacggcccagatgcccacgtcaccaagaagcagcgcaatgacgtgcacctccgcacaccgctgctcaaagagaatggggacagtgaggccggcacggagcctggcggcccagagagcaccgaggccagcagcaccagccaggccgtggaggactgcctgcacgtcagagccatcaagaccgagagctccgggctgtgtcagtccagccccggggcccagtcgtcctgcagcagcgagccctctcctctgggcagtgcccccaacaatgacagtggcgtggagatgccggggacggggcccgggagcctgggagacctgacggcactggatgacacacccccaggggccgacacctcagccctggctgccccctccgctggtggcctccagctgcgcaaacacatgaccaccatgcaccggttcgagcagctcaagaaggagaagctcaagtcactcaaggattcctgctcatgggccgggccgactccacacacgcggaacaccaagctgcctcccctcccgggaagtggctccatcctggaaaacttcagtggcagtgggggcggcgggcccgcggggctgctgccgaacccgcggctgtcggagctgtccgcgagcgaggtgaccatgctgagccagctgcaggagcgccgcgacagctccaccagcacggtcagctcggcctacaccgtgagccgccgctcctccggcatctccccctacttctccagccgccgctccagcgaggcctcgcccctgggcgccggccgcccgcacaacgcgagctccgctgactcctacgaccccatctccacggacgcgtcgcggcgctcgagcgaggccagccagtgcagcggcggctccgggctgctcaacctcacgccggcgcagcagtacagcctgcgggccaagtacgcggcagccactggcggccccccgcccactccgctgccgggcctggagcgcatgagcctgcggaccaggctggcgctgctggacgcgcccgagcgcacgctgcccgccggctgcccacgcccactggggccgcggcgtggcagcgacgggccgacctatggccacggccacgcgggggctgcgcccgccttcccccacgaggctccaggcggcggagccaggcgggccagcgaccctgtgcggcggcccgatgccctgtccctgccgcgggtgcagcgcttccacagcacccacaacgtgaaccccggcccgctgccgccctgtgccgacaggcgaggcctccgcctgcagagccacccgagcaccgacggcggcctggcccgcggcgcctactcgccccggccgcctagcatcagcgagaacgtggcgatggaggccgtggcggcaggagtggacggcgcggggcccgaggccgacctggggctgccggaggacgacctggtgcttccagacgacgtggtgcagtacatcaaggcgcacgccagtggcgctctggacgagggcaccgggcaggtgtatcccacggaaagcactggcttctctgacaaccccagactacccagcccggggctgcacggccagcgcaggatggtggctgcggactccaacgtgggcccctccgcccctatgctgggaggatgccagttaggctttggggcgccctccagcctgaacaaaaataacatgcctgtgcagtggaatgaggtgagctccggcaccgtagacgccctggccagccaggtgaagcctccaccctttcctcagggcaacctggcggtggtgcagcagaagcctgcctttggccagtacccgggctacagtccgcaaggcctacaggctagccctgggggcctggacagcacgcagccacacctgcagccccgcagcggagccccctcccagggcatccccagggtaaactacatgcagcagctgcgacagccagtggcaggcagccagtgtcctggcatgactaccactatgagcccccatgcctgctatggccaagtccacccccagctgagccccagcaccatcagtggggccctcaaccagttcccccaatcctgcagcaacatgccagccaagccagggcatctggggcaccctcagcagacagaagtggcacctgaccccaccacgatgggcaatcgccacagggaacttggggtccccgattcagccctggctggagtgccaccacctcacccagtccagagctacccacagcagagccatcacctggcagcctccatgagccaggagggctaccaccaggtccccagccttctgcctgcccgccagcctggcttcatggagccccaaacaggcccgatgggggtggctacagcaggctttggcctagtgcagccccggcctcccctcgagcccagccccactggccgccaccgtggggtacgtgctgtgcagcagcagctggcctacgccagggccacaggccatgccatggctgccatgccgtccagtcaggaaacagcagaggctgtgcccaagggagcgatgggcaacatggggtcggtgcctccccagccgcctccgcaggacgcaggtggggccccggaccacagcatgctctactactacggccagatccacatgtacgaacaggatggaggcctggagaacctcgggagctgccaggtcatgcggtcccagccaccacagccacaggcctgtcaggacagcatccagccccagcccttgccctcaccaggggtcaaccaggtgtccagcactgtggactcccagctcctggaggccccccagattgacttcgatgccatcatggatgatggcgatcactcgagtttgttctcgggtgctctgagccccagcctcctccacagcctctcccagaactcctcccgcctcaccaccccccgaaactccttgaccctgccctccatccccgcaggcatcagcaacatggctgtcggggacatgagctccatgctcaccagcctcgccgaggagagcaagttcctgaacatgatgacctagaggcccgagcgcctggtgctgagtgcacccggaggggtcatcgctgcccagagcctggggattccagctgtcttgtctttttccaaaaaagtgttaaataggcttgaggggttgttgcgcaatggccgcttcagatgacagatgttgtaagagaaggtttatgggcatcctctctggtcttttggattattcctcagaacaatgaaaaaagtctccataggacaggaaggaatgcaaaactcatttacacagtgctttccagcctttggtgcttacaggaccgcgctgttccggcttcttcacggctgacattcggctaacgagggattactttggccaaaacctttcaaaggatatgcagaaagatggtagggagcatttgggtttgaatctgaatgctatactggatactctgctccggaaagatgagctttttattctactacttggaaggaaaaggaattcctggtccacctgaattcctctatgaagcctaactcttgaggtctctaacataccttgtcatagaggaaaagcacagattatacctggatgattcaggagcacattctgattccaggtttggtagagctggctcttctactccgtaaagccgagtctgggactggcagcccatccaagtgtatatgaatgaataaagcatccaagtatatatgaatgaataaagtatgtaagtatcaccag

SEQ ID NO: 8513 - DNA, 6799 bp, Homo sapiens
  source 1..6799: mol_type = unassigned DNA
tgctgctttaccgacacatcaaagagcaaggattgccacccaggacgatgagcggctgagatggagacgtctgcctcagccactgcctccgagaagcaagaagccaaaagtgggatcctggaggccgctggcttccccgacccgggtaaaaaggcctctcctttggtggtggctgcagcggcagcagcagcggtagctgcccaaggagtgccgcagcatctcttgccaccattccatgcgcccctaccgattgacatgcgacaccaggaaggaaggtaccattacgagcctcattctgtccacggtgtgcacgggccccctgccctcagcggcagccctgtcatctctgacatctccttgatccggctttccccgcacccggctggccctggggagtcccccttcaacgccccccacccgtacgtgaacccccacatggagcactacctccgttctgtgcacagcagccccacgctctccatgatctctgcagccaggggcctcagccccgctgatgtggcccaggagcaccttaaggagaggggactgtttggccttcctgctccaggcaccaccccctcagactattaccaccagatgaccctcgtggcaggccaccccgcgccctacggggacctgctgatgcagagcgggggcgctgccagcgcaccccatctccacgactacctcaaccccgtggacgtgtcccgtttctccagcccgcgggtgacgccccgcctgagccgcaagcgggcgctgtccatctccccactctcagacgccagcctggacctgcagcggatgatccgcacctcacccaactcgctagtggcctacatcaacaactcccgaagcagctcggcggccagcggttcctacgggcatctgtcagcgggtgccctcagcccagccttcaccttcccccaccccatcaaccccgtggcctaccagcagattctgagccagcagaggggtctggggtcagcctttggacacacaccacccctgatccagccctcacccaccttcctggcccagcagcccatggccctcacctccatcaatgccacgcccacccagctcagcagcagcagcaactgtctgagtgacaccaaccagaacaagcagagcagtgagtcggccgtcagcagcaccgtcaaccctgtcgccattcacaagcgcagcaaggtcaagaccgagcctgagggcctgcggccggcctcccctctggcgctgacgcagggccaggtgtctggacacggctcatgtgggtgtgcccttcccctctcccaggagcagctggctgacctcaaggaagatctggacagggatgactgtaagcaggaggctgaggtggtcatctatgagaccaactgccactgggaagactgcaccaaggagtacgacacccaggagcagctggtgcatcacatcaacaacgagcacatccacggggagaagaaggagtttgtgtgccgctggcaggcctgcacgcgggagcagaagcccttcaaggcgcagtacatgctggtggtgcacatgcggcgacacacgggcgagaagccccacaagtgcacgttcgagggctgctcgaaggcctactcccgcctggagaacctgaagacacacctgcggtcccacaccggggagaagccatatgtgtgtgagcacgagggctgcaacaaagccttctccaacgcctcggaccgcgccaagcaccagaatcgcacccactccaacgagaaaccctacatctgcaagatcccaggctgcaccaagagatacacagaccccagctctctccggaagcatgtgaaaacggtccacggcccagatgcccacgtcaccaagaagcagcgcaatgacgtgcacctccgcacaccgctgctcaaagagaatggggacagtgaggccggcacggagcctggcggcccagagagcaccgaggccagcagcaccagccaggccgtggaggactgcctgcacgtcagagccatcaagaccgagagctccgggctgtgtcagtccagccccggggcccagtcgtcctgcagcagcgagccctctcctctgggcagtgcccccaacaatgacagtggcgtggagatgccggggacggggcccgggagcctgggagacctgacggcactggatgacacacccccaggggccgacacctcagccctggctgccccctccgctggtggcctccagctgcgcaaacacatgaccaccatgcaccggttcgagcagctcaagaaggagaagctcaagtcactcaaggattcctgctcatgggccgggccgactccacacacgcggaacaccaagctgcctcccctcccgggaagtggctccatcctggaaaacttcagtggcagtgggggcggcgggcccgcggggctgctgccgaacccgcggctgtcggagctgtccgcgagcgaggtgaccatgctgagccagctgcaggagcgccgcgacagctccaccagcacggtcagctcggcctacaccgtgagccgccgctcctccggcatctccccctacttctccagccgccgctccagcgaggcctcgcccctgggcgccggccgcccgcacaacgcgagctccgctgactcctacgaccccatctccacggacgcgtcgcggcgctcgagcgaggccagccagtgcagcggcggctccgggctgctcaacctcacgccggcgcagcagtacagcctgcgggccaagtacgcggcagccactggcggccccccgcccactccgctgccgggcctggagcgcatgagcctgcggaccaggctggcgctgctggacgcgcccgagcgcacgctgcccgccggctgcccacgcccactggggccgcggcgtggcagcgacgggccgacctatggccacggccacgcgggggctgcgcccgccttcccccacgaggctccaggcggcggagccaggcgggccagcgaccctgtgcggcggcccgatgccctgtccctgccgcgggtgcagcgcttccacagcacccacaacgtgaaccccggcccgctgccgccctgtgccgacaggcgaggcctccgcctgcagagccacccgagcaccgacggcggcctggcccgcggcgcctactcgccccggccgcctagcatcagcgagaacgtggcgatggaggccgtggcggcaggagtggacggcgcggggcccgaggccgacctggggctgccggaggacgacctggtgcttccagacgacgtggtgcagtacatcaaggcgcacgccagtggcgctctggacgagggcaccgggcaggtgtatcccacggaaagcactggcttctctgacaaccccagactacccagcccggggctgcacggccagcgcaggatggtggctgcggactccaacgtgggcccctccgcccctatgctgggaggatgccagttaggctttggggcgccctccagcctgaacaaaaataacatgcctgtgcagtggaatgaggtgagctccggcaccgtagacgccctggccagccaggtgaagcctccaccctttcctcagggcaacctggcggtggtgcagcagaagcctgcctttggccagtacccgggctacagtccgcaaggcctacaggctagccctgggggcctggacagcacgcagccacacctgcagccccgcagcggagccccctcccagggcatccccagggtaaactacatgcagcagctgcgacagccagtggcaggcagccagtgtcctggcatgactaccactatgagcccccatgcctgctatggccaagtccacccccagctgagccccagcaccatcagtggggccctcaaccagttcccccaatcctgcagcaacatgccagccaagccagggcatctggggcaccctcagcagacagaagtggcacctgaccccaccacgatgggcaatcgccacagggaacttggggtccccgattcagccctggctggagtgccaccacctcacccagtccagagctacccacagcagagccatcacctggcagcctccatgagccaggagggctaccaccaggtccccagccttctgcctgcccgccagcctggcttcatggagccccaaacaggcccgatgggggtggctacagcaggctttggcctagtgcagccccggcctcccctcgagcccagccccactggccgccaccgtggggtacgtgctgtgcagcagcagctggcctacgccagggccacaggccatgccatggctgccatgccgtccagtcaggaaacagcagaggctgtgcccaagggagcgatgggcaacatggggtcggtgcctccccagccgcctccgcaggacgcaggtggggccccggaccacagcatgctctactactacggccagatccacatgtacgaacaggatggaggcctggagaacctcgggagctgccaggtcatgcggtcccagccaccacagccacaggcctgtcaggacagcatccagccccagcccttgccctcaccaggggtcaaccaggtgtccagcactgtggactcccagctcctggaggccccccagattgacttcgatgccatcatggatgatggcgatcactcgagtttgttctcgggtgctctgagccccagcctcctccacagcctctcccagaactcctcccgcctcaccaccccccgaaactccttgaccctgccctccatccccgcaggcatcagcaacatggctgtcggggacatgagctccatgctcaccagcctcgccgaggagagcaagttcctgaacatgatgacctagaggcccgagcgcctggtgctgagtgcacccggaggggtcatcgctgcccagagcctggggattccagctgtcttgtctttttccaaaaaagtgttaaataggcttgaggggttgttgcgcaatggccgcttcagatgacagatgttgtaagagaaggtttatgggcatcctctctggtcttttggattattcctcagaacaatgaaaaaagtctccataggacaggaaggaatgcaaaactcatttacacagtgctttccagcctttggtgcttacaggaccgcgctgttccggcttcttcacggctgacattcggctaacgagggattactttggccaaaacctttcaaaggatatgcagaaagatggtagggagcatttgggtttgaatctgaatgctatactggatactctgctccggaaagatgagctttttattctactacttggaaggaaaaggaattcctggtccacctgaattcctctatgaagcctaactcttgaggtctctaacataccttgtcatagaggaaaagcacagattatacctggatgattcaggagcacattctgattccaggtttggtagagctggctcttctactccgtaaagccgagtctgggactggcagcccatccaagtgtatatgaatgaataaagcatccaagtatatatgaatgaataaagtatgtaagtatcaccagaaaaaggaaagaaaaaatgtactccttggggcaagcccagaagctgccctggcctctccagaccgtgtttacagtgtttgcatgtagaatgtagcccttcctgaaaagaagacttgtttctaaatacctcggggctgctggagccgctgtgggttagggatggactgaggcctcgaggagtgagggtgcacccggggcccagcctcaggctgccctagggatctctcagtaggaagaggaagttgcgtgtttacccaatcctgtttctccaatgcaacgtccacccactttaccaccaaaaactccagggcctgacggcagcccggtcccccagcactcaccagcagcccagtgttctccaccaagccacagtgtgcatgcctggtatcctccggattcccttccttctgcccgctgagtcactgggcagagaatgatgacatgtgtaggtggtgtggttgggggtggaaaggggaaggggttgatcctcaggactctgagggagcatcgttgaattttcctgttcagtgtgaccaagacccacctggaaatggaatttggaactggcttcaggagacatcattcctgaacacactgtagggtgaattggtgcatcttccccaccatacacacacacacacacacacacacacacacacacacacacacaccccaaaccttttcatggggaatgtgtggcaaccttgccaaacagcaccactcagagtgtgactctgactgtgaccttggccttaatgaggaacttcttaggagagtttgaggacaaggccaacatcgtcatctgggctcgctgcgtcccagcacatcaaactctgtccagagacaaggccaactgcaaatgaaagccagggaacattgctaagggtctgtggctctgtggtggtgttcatcgccttcctgagataggatttcccttgccagtcccaacctgtatatattctgtacagaagacatccctgaatatactgtaggtgagtcgtccagccaaatttatatctccaaaacatttttagctttttctacatgctatgaattgagatgacatgctcaacttgtaaataagtctttttgtacattaaaaaagtaattttttcataatttatcttgtctatctgcttcccccttgacagtagttaatgagaacctgggcagtaaatttggtgcattcgagcagaaattaggctgtattttttcttaacagtgtcaaaattgactatcccgcctttgccaagaaatgtttaatgctgaggca

SEQ ID NO: 8514 - DNA, 1904 bp, Homo sapiens
  source 1..1904: mol_type = unassigned DNA
gattgccacccaggacgatgagcggctgagatggagacgtctgcctcagccactgcctccgagaagcaagaagccaaaagtgggatcctggaggccgctggcttccccgacccgggtaaaaaggcctctcctttggtggtggctgcagcggcagcagcagcggtagctgcccaaggagcccagccttcaccttcccccaccccatcaaccccgtggcctaccagcagattctgagccagcagaggggtctggggtcagcctttggacacacaccacccctgatccagccctcacccaccttcctggcccagcagcccatggccctcacctccatcaatgccacgcccacccagctcagcagcagcagcaactgtctgagtgacaccaaccagaacaagcagagcagtgagtcggccgtcagcagcaccgtcaaccctgtcgccattcacaagcgcagcaaggtcaagaccgagcctgagggcctgcggccggcctcccctctggcgctgacgcagggccaggtgtctggacacggctcatgtgggtgtgcccttcccctctcccaggagcagctggctgacctcaaggaagatctggacagggatgactgtaagcaggaggctgaggtggtcatctatgagaccaactgccactgggaagactgcaccaaggagtacgacacccaggagcagctggtgcatcacatcaacaacgagcacatccacggggagaagaaggagtttgtgtgccgctggcaggcctgcacgcgggagcagaagcccttcaaggcgcagtacatgctggtggtgcacatgcggcgacacacgggcgagaagccccacaagtgcacgttcgagggctgctcgaaggcctactcccgcctggagaacctgaagacacacctgcggtcccacaccggggagaagccatatgtgtgtgagcacgagggctgcaacaaagccttctccaacgcctcggaccgcgccaagcaccagaatcgcacccactccaacgagaaaccctacatctgcaagatcccaggctgcaccaagagatacacagaccccagctctctccggaagcatgtgaaaacggtccacggcccagatgcccacgtcaccaagaagcagcgcaatgacgtgcacctccgcacaccgctgctcaaagagaatggggacagtgaggccggcacggagcctggcggcccagagagcaccgaggccagcagcaccagccaggccgtggaggactgcctgcacgtcagagccatcaagaccgagagctccgggctgtgtcagtccagccccggggcccagtcgtcctgcagcagcgagccctctcctctgggcagtgcccccaacaatgacagtggcgtggagatgccggggacggggcccgggagcctgggagacctgacggcactggatgacacacccccaggggccgacacctcagccctggctgccccctccgctggtggcctccagctgcgcaaacacatgaccaccatgcaccggttcgagcagctcaagaaggagaagctcaagtcactcaaggattcctgctcatgggccgggccgactccacacacgcggaacaccaagctgcctcccctcccgggaagtggctccatcctggaaaacttcagtggcagtgggggcggcgggcccgcggggctgctgccgaacccgcggctgtcggagctgtccgcgagcgaggtgaccatgctgagccagctgcaggagcgccgcgacagctccaccagcacggtcagctcggcctacaccgtgagccgccgctcctccggcatctccccctacttctccagccgccgctccagcgaggcctcgcccctgggcgccggccgcccgcacaacgcgagctccgctgactcctacgacccc

SEQ ID NO: 8515 - DNA, 2088 bp, Homo sapiens
  source 1..2088: mol_type = unassigned DNA; mol_type = unassigned DNA
ccacccaggacgatgagcggctgagatggagacgtctgcctcagccactgcctccgagaagcaagaagccaaaagtgggatcctggaggccgctggcttccccgacccgggtaaaaaggcctctcctttggtggtggctgcagcggcagcagcagcggtagctgcccaaggagtgccgcagcatctcttgccaccattccatgcgcccctaccgattgacatgcgacaccaggaaggaaggtaccattacgagcctcattctgtccacggtgtgcacgggccccctgccctcagcggcagccctgtcatctctgacatctccttgatccggctttccccgcacccggctggccctggggagtcccccttcaacgccccccacccgtacgtgaacccccacatggagcactacctccgttctgtgcacagcagccccacgctctccatgatctctgcagccaggggcctcagccccgctgatgtggcccaggagcaccttaaggagaggggactgtttggccttcctgctccaggcaccaccccctcagactattaccaccagatgaccctcgtggcaggccaccccgcgccctacggggacctgctgatgcagagcgggggcgctgccagcgcaccccatctccacgactacctcaaccccgtggacgtgtcccgtttctccagcccgcgggtgacgccccgcctgagccgcaagcgggcgctgtccatctccccactctcagacgccagcctggacctgcagcggatgatccgcacctcacccaactcgctagtggcctacatcaacaactcccgaagcagctcggcggccagcggttcctacgggcatctgtcagcgggtgccctcagcccagccttcaccttcccccaccccatcaaccccgtggcctaccagcagattctgagccagcagaggggtctggggtcagcctttggacacacaccacccctgatccagccctcacccaccttcctggcccagcagcccatggccctcacctccatcaatgccacgcccacccagctcagcagcagcagcaactgtctgagtgacaccaaccagaacaagcagagcagtgagtcggccgtcagcagcaccgtcaaccctgtcgccattcacaagcgcagcaaggtcaagaccgagcctgagggcctgcggccggcctcccctctggcgctgacgcaggagcagctggctgacctcaaggaagatctggacagggatgactgtaagcaggaggctgaggtggtcatctatgagaccaactgccactgggaagactgcaccaaggagtacgacacccaggagcagctggtgcatcacatcaacaacgagcacatccacggggagaagaaggagtttgtgtgccgctggcaggcctgcacgcgggagcagaagcccttcaaggcgcagtacatgctggtggtgcacatgcggcgacacacgggcgagaagccccacaagtgcacgttcgagggctgctcgaaggcctactcccgcctggagaacctgaagacacacctgcggtcccacaccggggagaagccatatgtgtgtgagcacgagggctgcaacaaagccttctccaacgcctcggaccgcgccaagcaccagaatcgcacccactccaacgagaaaccctacatctgcaagatcccaggctgcaccaagagatacacagaccccagctctctccggaagcatgtgaaaacggtccacggcccagatgcccacgtcaccaagaagcagcgcaatgacgtgcacctccgcacaccgctgctcaaagagaatggggacagtgaggccggcacggagcctggcggcccagagagcaccgaggccagcagcaccagccaggccgtggaggactgcctgcacgtcagagccatcaagaccgagagctccgggctgtgtcagtccagccccggggcccagtcgtcctgcagcagcgagccctctcctctgggcagtgcccccaacaatgacagtggcgtggagatgccggggacggggcccgggagcctgggagacctgacggcactggatgacacacccccaggggccga

SEQ ID NO: 8516 - DNA, 529 bp, Homo sapiens
  source 1..529: mol_type = unassigned DNA; mol_type = unassigned DNA
gcctccgagaagcaagaagccaaaagtgggatcctggaggccgctggcttccccgacccgggtaaaaaggcctctcctttggtggtggctgcagcggcagcagcagcggtagctgcccaaggagtgccgcagcatctcttgccaccattccatgcgcccctaccgattgacatgcgacaccaggaaggaaggtaccattacgagcctcattctgtccacggtgtgcacggtgtcccgtttctccagcccgcgggtgacgccccgcctgagccgcaagcgggcgctgtccatctccccactctcagacgccagcctggacctgcagcggatgatccgcacctcacccaactcgctagtggcctacatcaacaactcccgaagcagctcggcggccagcggttcctacgggcatctgtcagcgggtgccctcagcccagccttcaccttcccccaccccatcaaccccgtggcctaccagcagattctgagccagcagaggggtctggggtcagcctttggacacacacca

SEQ ID NO: 8517 - DNA, 1112 bp, Homo sapiens
  source 1..1112: mol_type = unassigned DNA; mol_type = unassigned DNA
gcctccgagaagcaagaagccaaaagtgggatcctggaggccgctggcttccccgacccgggtaaaaaggcctctcctttggtggtggctgcagcggcagcagcagcggtagctgcccaaggaggccccctgccctcagcggcagccctgtcatctctgacatctccttgatccggctttccccgcacccggctggccctggggagtcccccttcaacgccccccacccgtacgtgaacccccacatggagcactacctccgttctgtgcacagcagccccacgctctccatgatctctgcagccaggggcctcagccccgctgatgtggcccaggagcaccttaaggagaggggactgtttggccttcctgctccaggcaccaccccctcagactattaccaccagatgaccctcgtggcaggccaccccgcgccctacggggacctgctgatgcagagcgggggcgctgccagcgcaccccatctccacgactacctcaaccccgtggacgtgtcccgtttctccagcccgcgggtgacgccccgcctgagccgcaagcgggcgctgtccatctccccactctcagacgccagcctggacctgcagcggatgatccgcacctcacccaactcgctagtggcctacatcaacaactcccgaagcagctcggcggccagcggttcctacgggcatctgtcagcgggtgccctcagcccagccttcaccttcccccaccccatcaaccccgtggcctaccagcagattctgagccagcagaggggtctggggtcagcctttggacacacaccacccctgatccagccctcacccaccttcctggcccagcagcccatggccctcacctccatcaatgccacgcccacccagctcagcagcagcagcaactgtctgagtgacaccaaccagaacaagcagagcagtgagtcggccgtcagcagcaccgtcaaccctgtcgccattcacaagcgcagcaaggtcaagaccgagcctgagggcctgcggccggcctcccctctggcgctgacgcaggagcagctggctgacctcaaggaagatctggacagggatgactgtaagcaggaggctgag

SEQ ID NO: 8518 - DNA, 6768 bp, Homo sapiens
  source 1..6768: mol_type = unassigned DNA; mol_type = unassigned DNA
gattgccacccaggacgatgagcggctgagatggagacgtctgcctcagccactgcctccgagaagcaagaagccaaaagtgggatcctggaggccgctggcttccccgacccgggtaaaaaggcctctcctttggtggtggctgcagcggcagcagcagcggtagctgcccaaggagtgccgcagcatctcttgccaccattccatgcgcccctaccgattgacatgcgacaccaggaaggaaggtaccattacgagcctcattctgtccacggtgtgcacgggccccctgccctcagcggcagccctgtcatctctgacatctccttgatccggctttccccgcacccggctggccctggggagtcccccttcaacgccccccacccgtacgtgaacccccacatggagcactacctccgttctgtgcacagcagccccacgctctccatgatctctgcagccaggggcctcagccccgctgatgtggcccaggagcaccttaaggagaggggactgtttggccttcctgctccaggcaccaccccctcagactattaccaccagatgaccctcgtggcaggccaccccgcgccctacggggacctgctgatgcagagcgggggcgctgccagcgcaccccatctccacgactacctcaaccccgtggacgtgtcccgtttctccagcccgcgggtgacgccccgcctgagccgcaagcgggcgctgtccatctccccactctcagacgccagcctggacctgcagcggatgatccgcacctcacccaactcgctagtggcctacatcaacaactcccgaagcagctcggcggccagcggttcctacgggcatctgtcagcgggtgccctcagcccagccttcaccttcccccaccccatcaaccccgtggcctaccagcagattctgagccagcagaggggtctggggtcagcctttggacacacaccacccctgatccagccctcacccaccttcctggcccagcagcccatggccctcacctccatcaatgccacgcccacccagctcagcagcagcagcaactgtctgagtgacaccaaccagaacaagcagagcagtgagtcggccgtcagcagcaccgtcaaccctgtcgccattcacaagcgcagcaaggtcaagaccgagcctgagggcctgcggccggcctcccctctggcgctgacgcagggccaggtgtctggacacggctcatgtgggtgtgcccttcccctctcccaggagcagctggctgacctcaaggaagatctggacagggatgactgtaagcaggaggctgaggtggtcatctatgagaccaactgccactgggaagactgcaccaaggagtacgacacccaggagcagctggtgcatcacatcaacaacgagcacatccacggggagaagaaggagtttgtgtgccgctggcaggcctgcacgcgggagcagaagcccttcaaggcgcagtacatgctggtggtgcacatgcggcgacacacgggcgagaagccccacaagtgcacgttcgagggctgctcgaaggcctactcccgcctggagaacctgaagacacacctgcggtcccacaccggggagaagccatatgtgtgtgagcacgagggctgcaacaaagccttctccaacgcctcggaccgcgccaagcaccagaatcgcacccactccaacgagaaaccctacatctgcaagatcccaggctgcaccaagagatacacagaccccagctctctccggaagcatgtgaaaacggtccacggcccagatgcccacgtcaccaagaagcagcgcaatgacgtgcacctccgcacaccgctgctcaaagagaatggggacagtgaggccggcacggagcctggcggcccagagagcaccgaggccagcagcaccagccaggccgtggaggactgcctgcacgtcagagccatcaagaccgagagctccgggctgtgtcagtccagccccggggcccagtcgtcctgcagcagcgagccctctcctctgggcagtgcccccaacaatgacagtggcgtggagatgccggggacggggcccgggagcctgggagacctgacggcactggatgacacacccccaggggccgacacctcagccctggctgccccctccgctggtggcctccagctgcgcaaacacatgaccaccatgcaccggttcgagcagctcaagaaggagaagctcaagtcactcaaggattcctgctcatgggccgggccgactccacacacgcggaacaccaagctgcctcccctcccgggaagtggctccatcctggaaaacttcagtggcagtgggggcggcgggcccgcggggctgctgccgaacccgcggctgtcggagctgtccgcgagcgaggtgaccatgctgagccagctgcaggagcgccgcgacagctccaccagcacggtcagctcggcctacaccgtgagccgccgctcctccggcatctccccctacttctccagccgccgctccagcgaggcctcgcccctgggcgccggccgcccgcacaacgcgagctccgctgactcctacgaccccatctccacggacgcgtcgcggcgctcgagcgaggccagccagtgcagcggcggctccgggctgctcaacctcacgccggcgcagcagtacagcctgcgggccaagtacgcggcagccactggcggccccccgcccactccgctgccgggcctggagcgcatgagcctgcggaccaggctggcgctgctggacgcgcccgagcgcacgctgcccgccggctgcccacgcccactggggccgcggcgtggcagcgacgggccgacctatggccacggccacgcgggggctgcgcccgccttcccccacgaggctccaggcggcggagccaggcgggccagcgaccctgtgcggcggcccgatgccctgtccctgccgcgggtgcagcgcttccacagcacccacaacgtgaaccccggcccgctgccgccctgtgccgacaggcgaggcctccgcctgcagagccacccgagcaccgacggcggcctggcccgcggcgcctactcgccccggccgcctagcatcagcgagaacgtggcgatggaggccgtggcggcaggagtggacggcgcggggcccgaggccgacctggggctgccggaggacgacctggtgcttccagacgacgtggtgcagtacatcaaggcgcacgccagtggcgctctggacgagggcaccgggcaggtgtatcccacggaaagcactggcttctctgacaaccccagactacccagcccggggctgcacggccagcgcaggatggtggctgcggactccaacgtgggcccctccgcccctatgctgggaggatgccagttaggctttggggcgccctccagcctgaacaaaaataacatgcctgtgcagtggaatgaggtgagctccggcaccgtagacgccctggccagccaggtgaagcctccaccctttcctcagggcaacctggcggtggtgcagcagaagcctgcctttggccagtacccgggctacagtccgcaaggcctacaggctagccctgggggcctggacagcacgcagccacacctgcagccccgcagcggagccccctcccagggcatccccagggtaaactacatgcagcagctgcgacagccagtggcaggcagccagtgtcctggcatgactaccactatgagcccccatgcctgctatggccaagtccacccccagctgagccccagcaccatcagtggggccctcaaccagttcccccaatcctgcagcaacatgccagccaagccagggcatctggggcaccctcagcagacagaagtggcacctgaccccaccacgatgggcaatcgccacagggaacttggggtccccgattcagccctggctggagtgccaccacctcacccagtccagagctacccacagcagagccatcacctggcagcctccatgagccaggagggctaccaccaggtccccagccttctgcctgcccgccagcctggcttcatggagccccaaacaggcccgatgggggtggctacagcaggctttggcctagtgcagccccggcctcccctcgagcccagccccactggccgccaccgtggggtacgtgctgtgcagcagcagctggcctacgccagggccacaggccatgccatggctgccatgccgtccagtcaggaaacagcagaggctgtgcccaagggagcgatgggcaacatggggtcggtgcctccccagccgcctccgcaggacgcaggtggggccccggaccacagcatgctctactactacggccagatccacatgtacgaacaggatggaggcctggagaacctcgggagctgccaggtcatgcggtcccagccaccacagccacaggcctgtcaggacagcatccagccccagcccttgccctcaccaggggtcaaccaggtgtccagcactgtggactcccagctcctggaggccccccagattgacttcgatgccatcatggatgatggcgatcactcgagtttgttctcgggtgctctgagccccagcctcctccacagcctctcccagaactcctcccgcctcaccaccccccgaaactccttgaccctgccctccatccccgcaggcatcagcaacatggctgtcggggacatgagctccatgctcaccagcctcgccgaggagagcaagttcctgaacatgatgacctagaggcccgagcgcctggtgctgagtgcacccggaggggtcatcgctgcccagagcctggggattccagctgtcttgtctttttccaaaaaagtgttaaataggcttgaggggttgttgcgcaatggccgcttcagatgacagatgttgtaagagaaggtttatgggcatcctctctggtcttttggattattcctcagaacaatgaaaaaagtctccataggacaggaaggaatgcaaaactcatttacacagtgctttccagcctttggtgcttacaggaccgcgctgttccggcttcttcacggctgacattcggctaacgagggattactttggccaaaacctttcaaaggatatgcagaaagatggtagggagcatttgggtttgaatctgaatgctatactggatactctgctccggaaagatgagctttttattctactacttggaaggaaaaggaattcctggtccacctgaattcctctatgaagcctaactcttgaggtctctaacataccttgtcatagaggaaaagcacagattatacctggatgattcaggagcacattctgattccaggtttggtagagctggctcttctactccgtaaagccgagtctgggactggcagcccatccaagtgtatatgaatgaataaagcatccaagtatatatgaatgaataaagtatgtaagtatcaccagaaaaaggaaagaaaaaatgtactccttggggcaagcccagaagctgccctggcctctccagaccgtgtttacagtgtttgcatgtagaatgtagcccttcctgaaaagaagacttgtttctaaatacctcggggctgctggagccgctgtgggttagggatggactgaggcctcgaggagtgagggtgcacccggggcccagcctcaggctgccctagggatctctcagtaggaagaggaagttgcgtgtttacccaatcctgtttctccaatgcaacgtccacccactttaccaccaaaaactccagggcctgacggcagcccggtcccccagcactcaccagcagcccagtgttctccaccaagccacagtgtgcatgcctggtatcctccggattcccttccttctgcccgctgagtcactgggcagagaatgatgacatgtgtaggtggtgtggttgggggtggaaaggggaaggggttgatcctcaggactctgagggagcatcgttgaattttcctgttcagtgtgaccaagacccacctggaaatggaatttggaactggcttcaggagacatcattcctgaacacactgtagggtgaattggtgcatcttccccaccatacacacacacacacacacacacacacacacacacacacacacaccccaaaccttttcatggggaatgtgtggcaaccttgccaaacagcaccactcagagtgtgactctgactgtgaccttggccttaatgaggaacttcttaggagagtttgaggacaaggccaacatcgtcatctgggctcgctgcgtcccagcacatcaaactctgtccagagacaaggccaactgcaaatgaaagccagggaacattgctaagggtctgtggctctgtggtggtgttcatcgccttcctgagataggatttcccttgccagtcccaacctgtatatattctgtacagaagacatccctgaatatactgtaggtgagtcgtccagccaaatttatatctccaaaacatttttagctttttctacatgctatgaattgagatgacatgctcaacttgtaaataagtctttttgtacattaaaaaagtaattttttcataatttatcttgtctatctgcttcccccttgacagtagttaatgagaacctgggcagtaaatttggtgcattcgagcagaaattaggctgtattttttcttaacagtgtcaaaattgactatcccgcctttgccaagaaatgtttaatgctgaggc

SEQ ID NO: 8519 - DNA, 8208 bp, Homo sapiens
  source 1..8208: mol_type = unassigned DNA; mol_type = unassigned DNA
gtctatgggaagttcggggacttgacagccgctgccgccgcagggcatttttggtcgaagagagctgaagtaatgagaagacatcatggaggcccagtcccacagctccacgaccactgaaaagaaaaaagttgagaattccatagtgaagtgctccactcgaacagatgtgagcgagaaagccgttgcctccagcaccacttctaatgaggatgaaagtcctggacagacttatcacagagagagaagaaacgcaatcactatgcagccacagaatgtccaggggctcagcaaagtcagtgaggaaccttcaacatcgagtgacgagagggcctcattgatcaagaaagagatccatgggtccctgccacacgtggcggagccctctgtgccgtaccgcgggacggtgtttgccatggaccccaggaatggttacatggagccccactaccaccctcctcatcttttccctgccttccatcctcctgtaccaattgatgccagacatcatgagggccgttaccattacgatccatctccgattcctccattgcatatgacttccgccttatctagtagccctacgtatccggacctgcccttcattaggatctccccacaccggaaccccactgctgcttccgagtctcccttcagccctccacatccctacattaatccctacatggactatatccgctccttgcacagcagcccatcgctctccatgatctcagcaacccgtgggctgagccctacagatgcgccccatgcaggagtcagcccagcagaatactatcatcagatggccctgctaactggccagcgcagcccctatgcagacattattccctcagctgccaccgccggcacgggggccatccacatggaatatcttcatgctatggatagcaccagattctccagccccaggctgtcagccaggccgagccgaaaacgtacactgtccatatcaccactctccgatcatagctttgaccttcagaccatgataaggacgtctcccaactccttggtcacgattctcaataattcccgtagcagctcttcagcaagtggctcctatggtcacttatctgcaagtgcaatcagccctgccttgagcttcacctactcttccgcgcccgtctctctccacatgcatcagcagatcctaagccgacaacagagcttaggttcagcctttggacacagccctccactcatccaccctgccccaacttttccaacacagaggcctattccagggatccctacggttctgaaccccgtccaggtcagctccggcccttctgagtcctcacagaacaagcccacgagtgagtctgcagtgagcagcactggtgacccgatgcacaacaagaggtccaagatcaaacccgatgaagacctccccagcccaggggctcgggggcagcaggaacagcccgaaggaacaacccttgtcaaggaggaaggggacaaagatgaaagcaaacaggagcctgaagtcatctatgagacaaactgccactgggaaggctgcgcgagggagttcgacacccaagagcagcttgtgcaccatataaataacgaccatattcatggagagaagaaggagttcgtgtgcaggtggctggactgctcaagagagcagaaacccttcaaagcccagtatatgttggtagtgcatatgagaagacacacgggcgagaagcctcacaaatgcacttttgaaggttgcacaaaggcctactcgagactagaaaacttgaaaacacacttgagatctcacactggagagaaaccatacgtctgtgagcacgaaggttgcaacaaggctttctcaaatgcctctgatcgcgccaaacaccaaaacagaacgcattccaatgagaaaccatatgtgtgcaaaatcccaggctgcactaagcgttacacagacccaagctccctccggaaacatgtgaagacagtgcatggcccagaggctcatgtcaccaagaagcagcgaggggacatccatcctcggccgccacccccgagagattccggcagccattcacagtccaggtcgcctggccgaccgactcagggagcccttggtgagcagcaggacctcagcaacactacctcaaagcgggaagaatgcctccaggtgaaaaccgtcaaggcagagaagccaatgacatctcagccaagccctggtggtcagtcttcatgcagcagccaacagtcccccatcagcaactattccaacagtgggctcgagcttcctctgaccgatggaggtagtataggagacctcagtgccatcgatgaaaccccaatcatggactcaaccatttccactgcaaccacagcccttgctttgcaagccaggagaaacccggcagggaccaaatggatggagcacgtaaaactagaaaggctaaaacaagtgaatggaatgtttccgcgactgaaccccattctaccccctaaagcccctgcggtctctcctctcataggaaatggcacacagtccaacaacacctgcagcttgggtgggcccatgacgcttctcccgggcagaagcgacctctctggggtggacgtcactatgctgaacatgctcaacagaagggacagcagcgccagcaccatcagctcggcctacctgagcagccgccgctcctcagggatctcgccctgcttctccagccgccgctccagcgaggcgtcacaggccgagggccggccgcagaacgtgagcgtggccgactcctacgaccccatctccaccgacgcctcgcgccgctccagcgaagccagccagagcgacggcctgcccagcctgctcagcctcacgcccgcccagcagtaccgcctcaaggccaagtacgcggctgccacaggagggccgccgccgacgcccctgcccaacatggagaggatgagcctgaagacgcgcctggcgctgctcggggatgccctcgagcctggcgtggccctgcctccagttcatgccccgaggaggtgcagcgacgggggagcccacggctacgggcggcgccacctgcagccgcacgatgcgccgggccacggcgtgaggagggccagcgacccggtgcggacaggctccgagggcctggccctgcctcgtgtgccgcgcttcagcagcctcagcagctgcaaccccccggcgatggccacgtccgcggagaagcgcagtctcgtgcttcagaattacacgcggcccgagggcggccagtcccgaaacttccactcgtccccctgtcctcccagcatcaccgagaacgtcaccctggagtccctgaccatggacgctgatgccaacctgaacgatgaggatttcctgccggacgacgtggtgcagtatttaaattcccagaaccaagcagggtacgagcagcacttccccagcgccctcccggacgacagcaaagtgccccacgggcccggtgactttgacgcgcccgggctgccagacagccacgctggccagcagttccatgccctcgagcagccctgccccgagggcagcaaaaccgacctgcccattcagtggaacgaagtcagctccggaagcgccgacctgtcctcctccaagctcaagtgtgggccgcggcccgctgtgccgcagactcgcgcctttgggttctgcaacggcatggtcgtccacccgcagaaccccttgaggagcgggcctgctgggggctatcagaccctcggggagaacagcaacccctacggtggcccagagcacttgatgctccacaacagccccggaagtggcaccagtggaaacgccttccatgaacagccctgtaaggccccgcagtatgggaactgtctcaacaggcagccagtggcccctggtgcactcgacggtgcctgtggtgccgggattcaagcctcaaagctgaagagcacccccatgcaagggagcgggggccagctgaatttcggcctgccggtagcgccaaatgagtcagctggcagcatggtgaatggcatgcagaaccaggacccagtgggacaggggtacctggctcaccagctcctcggcgacagcatgcagcacccgggggcaggccgccccggtcagcagatgcttgggcagattagtgctacctcacacatcaacatctaccaagggccagagagctgcctgccaggggctcacggcatgggcagccagccgtcaagcttggcagttgtcaggggctaccagccatgtgccagctttgggggcagcaggcgccaggctatgccgagggacagccttgctctgcagtcaggacagctcagtgacacaagtcagacctgcagggtgaatggtatcaagatggagatgaaagggcagccccatccgctgtgctctaatctgcagaattactctggtcagttctatgaccaaaccgtgggcttcagtcagcaagacacgaaagctggttcattctctatttcagacgccagctgcctgctacaggggaccagcgccaaaaactctgagttactttccccaggtgctaatcaggtgacaagcacagtggacagcctcgacagccatgacctggaaggggtacagattgacttcgatgccatcatagacgatggggaccactccagcctgatgtcgggggccctgagcccaagtatcattcagaacctttcccatagctcctcccgcctcaccacgcctcgggcgtccctcccattcccagcgctgtccatgagcaccaccaacatggctatcggggacatgagttctttgctgacctccctagcggaagaaagcaaattccttgcagttatgcaataggctttaggaaaaaaagactgcaaccaacggaaatcaataggagttgaagagattaaactgactttgttttggctgtttttttagttctgtatgtattttagcaatctcatctcacctaactgagatgtgtttcaattatattccttttatggaaaaggactctgaaaaaccctaaagtattctagggagaaactgtcttccatttcagttttgaatcagtattgttacactcaaaccaccctctttttaaaaaaaaaaaaaaaaactgtaagccccgccccctttttagtaaaccgatgtaaatttgtgatgtgcatattcttctttcttttagaagagcagtcaaattaaaggatttgacatgttttgctgttgctcaaaggaaataggagttggtgtgcttgtgaccaaggggttacacttccagcttttaaaattctcctttacatgtgctcagtgttttgttttgtgttttggtttctgttttttattttaattcccacattgggcacaagaatcagaatatggatagctagtttaagaaacttttgtgggtgcactgtagcatagatgacagaatattgatgttccccccatctccaattcagttcagggcattccacagttaaacagaaatgggaacgtggggctcttataaatgaaatgggcgctcacagttttggttttcagctcttcatgtctgtaagtgtgctttgggggaggctatgtctgtatggtcgattctcagttatcacatttgcctctcctcccactaccttcatgaacattcagtgctgtttcgcactgcagttagagagaagggacggacagttggtgacactcagccacattgctacttttatctgttctggtaagaagttagatagatggtagattgaagcaattgggtagaattagttgggggaatatttatgagttgctgtgtttgttgattagttccatctctttcccattttaactgagaattgattatatatagctctaagtatataggtatttaaacaaccccacaagcggctgtatcagtaacatttattaattccactatagtgagggaggatttccattctaaataccttattttgagggatttataaaacttagttgtaaaagagaaagcccacatagtgggaataaattgcttcagccatttttagtatttgagagcactagggaagatgtttagtagctgtgtggatgccttttttcacaccctgtctattgaatgctgcatccattcacgaagttaaatgttacatgcagttagtccttaatgtggactggatctgtacttttgttttggattaaaacatttaaagatttttgaagtgcagctactccccacgtgcatttgatacacataaaagtcatactgtgtgtgcacaaagagtacatggattttccagcatattgctttaaaaaattatataaactgttaaaatattaacacctcaggctacctgctgtattctgtcccattgacccctggaattggatttactgcaagtgattgataattcaattatgtggcttttcccctttaatcttgccatttaaattacagtagaaagacaaaatcaagtaaaataaagtgttagataatagaaagagtgttaagaccagcccacttttctcatgtttatgttctttcatttggaccaagaatctccgcatggaggttgatttgccactggggactttggctaagactattaggtttgctttcaactagatgttcctgagacaagcagagggacactgcaattccccttccatgcctgctgttctcccccatgtaagtcttctttgaaattaacggatgtgtctcctttggaacagccccataacaaaagagaactactgatctgagcataggaaagtagaggctctaccacttttcagttgaaaaagcaagactttctctgtgtttctgaaacaaggcataatgttgtcacagaatcagagatccagtctcacttttccacaaatctccaaatctccagtcttatcttgtgtgctctaatggtttggttcaatccctttccaactcttgttttcaaagcatggggcctgagtgttctccactcctcctaagaaaggagcttgggtggaagggaccatgctgacctcctccatcagagggctcttccagtagtattctcggatgcaacctccatttctcagttaccattatttcctgtatcagctttgtccttcctggagggatgcacagtgatccggcccaccactgttgttgtcttgtgcttctgctctttcctatggtttcaggttattttctgggtttcccctattcttcttttatttctttttttttttatatttgctttcctttctactgcttttagatttgcaggagatgcaagtttcagctcaatgtttggcttctctcaatatggaaatttcagaaggacagaggagaggagggaggaagaagaaagtatactcctccagaatttcagtgatctgttgtggcagtccagtggaaggaaggtcttttgaggtcacttagaagcatctttttgggacatccttttgggatctctgtaggctaggcatctcatatcttgagactcacccccagcctccaagcctctctccatttctctaacctatgcattttagagcgagaggaccgcctcactagtgtcaccatcctgccttttctaaaacatgcaggctcacacattctactcctgcttaatgtctgtgttaaacgttttctaaccatttttgttttatttttctgaaaaagttaacccctcccaactcctcacacattggctcttcctcttgagccacaaagttttgattcttgcgatgtatgtgccttattttatgttaatcttgtcaatgagagggaccagttggtgttgcccaatcagcactccaaggctgtgtgtgcaccagccagagagcgcacggtggtagcagagtcgaggctgtcttgtatcctggtttcatgtgttgttttgaactgataggaggatgttctcttctgacaagttacccttgtgtatcctgcagacatgtaaaataaaatacaagttcatttttttcaccttttttagatttttttaaaaaataaaatgtgtaatcctttttttaaaagaaacacatgtaaatacatttaagtattgtaggcatagcgttcagatgtgactggcccaggcgttcctcggacaagcctgcattccccgtgatcacgcccacctcaagcccaggggctgcagcccagccacagatgaactctacctttgctttcagaaccacttagtccttttgtaacaaagaaaaaaaaatgtttcttacaatgtcaataaaaaattctttgtatggaa

SEQ ID NO: 8520 - DNA, 4968 bp, Homo sapiens
  source 1..4968: mol_type = unassigned DNA; mol_type = unassigned DNA
agagagataccgagaatgttcctagagggtctgcgcagctagagagagctcaccaagagaagttggcgcaaagtagctagccagagcctggggactgtgttaggatgaaagtcctggacagacttatcacagagagagaagaaacgcaatcactatgcagccacagaatgtccaggggctcagcaaagtcagtgaggaaccttcaacatcgagtgacgagagggcctcattgatcaagaaagagatccatgggtccctgccacacgtggcggagccctctgtgccgtaccgcgggacggtgtttgccatggaccccaggaatggttacatggagccccactaccaccctcctcatcttttccctgccttccatcctcctgtaccaattgatgccagacatcatgagggccgttaccattacgatccatctccgattcctccattgcatatgacttccgccttatctagtagccctacgtatccggacctgcccttcattaggatctccccacaccggaaccccactgctgcttccgagtctcccttcagccctccacatccctacattaatccctacatggactatatccgctccttgcacagcagcccatcgctctccatgatctcagcaacccgtgggctgagccctacagatgcgccccatgcaggagtcagcccagcagaatactatcatcagatggccctgctaactggccagcgcagcccctatgcagacattattccctcagctgccaccgccggcacgggggccatccacatggaatatcttcatgctatggatagcaccagattctccagccccaggctgtcagccaggccgagccgaaaacgtacactgtccatatcaccactctccgatcatagctttgaccttcagaccatgataaggacgtctcccaactccttggtcacgattctcaataattcccgtagcagctcttcagcaagtggctcctatggtcacttatctgcaagtgcaatcagccctgccttgagcttcacctactcttccgcgcccgtctctctccacatgcatcagcagatcctaagccgacaacagagcttaggttcagcctttggacacagccctccactcatccaccctgccccaacttttccaacacagaggcctattccagggatccctacggttctgaaccccgtccaggtcagctccggcccttctgagtcctcacagaacaagcccacgagtgagtctgcagtgagcagcactggtgacccgatgcacaacaagaggtccaagatcaaacccgatgaagacctccccagcccaggggctcgggggcagcaggaacagcccgaaggaacaacccttgtcaaggaggaaggggacaaagatgaaagcaaacaggagcctgaagtcatctatgagacaaactgccactgggaaggctgcgcgagggagttcgacacccaagagcagcttgtgcaccatataaataacgaccatattcatggagagaagaaggagttcgtgtgcaggtggctggactgctcaagagagcagaaacccttcaaagcccagtatatgttggtagtgcatatgagaagacacacgggcgagaagcctcacaaatgcacttttgaaggttgcacaaaggcctactcgagactagaaaacttgaaaacacacttgagatctcacactggagagaaaccatacgtctgtgagcacgaaggttgcaacaaggctttctcaaatgcctctgatcgcgccaaacaccaaaacagaacgcattccaatgagaaaccatatgtgtgcaaaatcccaggctgcactaagcgttacacagacccaagctccctccggaaacatgtgaagacagtgcatggcccagaggctcatgtcaccaagaagcagcgaggggacatccatcctcggccgccacccccgagagattccggcagccattcacagtccaggtcgcctggccgaccgactcagggagcccttggtgagcagcaggacctcagcaacactacctcaaagcgggaagaatgcctccaggtgaaaaccgtcaaggcagagaagccaatgacatctcagccaagccctggtggtcagtcttcatgcagcagccaacagtcccccatcagcaactattccaacagtgggctcgagcttcctctgaccgatggaggtagtataggagacctcagtgccatcgatgaaaccccaatcatggactcaaccatttccactgcaaccacagcccttgctttgcaagccaggagaaacccggcagggaccaaatggatggagcacgtaaaactagaaaggctaaaacaagtgaatggaatgtttccgcgactgaaccccattctaccccctaaagcccctgcggtctctcctctcataggaaatggcacacagtccaacaacacctgcagcttgggtgggcccatgacgcttctcccgggcagaagcgacctctctggggtggacgtcactatgctgaacatgctcaacagaagggacagcagcgccagcaccatcagctcggcctacctgagcagccgccgctcctcagggatctcgccctgcttctccagccgccgctccagcgaggcgtcacaggccgagggccggccgcagaacgtgagcgtggccgactcctacgaccccatctccaccgacgcctcgcgccgctccagcgaagccagccagagcgacggcctgcccagcctgctcagcctcacgcccgcccagcagtaccgcctcaaggccaagtacgcggctgccacaggagggccgccgccgacgcccctgcccaacatggagaggatgagcctgaagacgcgcctggcgctgctcggggatgccctcgagcctggcgtggccctgcctccagttcatgccccgaggaggtgcagcgacgggggagcccacggctacgggcggcgccacctgcagccgcacgatgcgccgggccacggcgtgaggagggccagcgacccggtgcggacaggctccgagggcctggccctgcctcgtgtgccgcgcttcagcagcctcagcagctgcaaccccccggcgatggccacgtccgcggagaagcgcagtctcgtgcttcagaattacacgcggcccgagggcggccagtcccgaaacttccactcgtccccctgtcctcccagcatcaccgagaacgtcaccctggagtccctgaccatggacgctgatgccaacctgaacgatgaggatttcctgccggacgacgtggtgcagtatttaaattcccagaaccaagcagggtacgagcagcacttccccagcgccctcccggacgacagcaaagtgccccacgggcccggtgactttgacgcgcccgggctgccagacagccacgctggccagcagttccatgccctcgagcagccctgccccgagggcagcaaaaccgacctgcccattcagtggaacgaagtcagctccggaagcgccgacctgtcctcctccaagctcaagtgtgggccgcggcccgctgtgccgcagactcgcgcctttgggttctgcaacggcatggtcgtccacccgcagaaccccttgaggagcgggcctgctgggggctatcagaccctcggggagaacagcaacccctacggtggcccagagcacttgatgctccacaacagccccggaagtggcaccagtggaaacgccttccatgaacagccctgtaaggccccgcagtatgggaactgtctcaacaggcagccagtggcccctggtgcactcgacggtgcctgtggtgccgggattcaagcctcaaagctgaagagcacccccatgcaagggagcgggggccagctgaatttcggcctgccggtagcgccaaatgagtcagctggcagcatggtgaatggcatgcagaaccaggacccagtgggacaggggtacctggctcaccagctcctcggcgacagcatgcagcacccgggggcaggccgccccggtcagcagatgcttgggcagattagtgctacctcacacatcaacatctaccaagggccagagagctgcctgccaggggctcacggcatgggcagccagccgtcaagcttggcagttgtcaggggctaccagccatgtgccagctttgggggcagcaggcgccaggctatgccgagggacagccttgctctgcagtcaggacagctcagtgacacaagtcagacctgcagggtgaatggtatcaagatggagatgaaagggcagccccatccgctgtgctctaatctgcagaattactctggtcagttctatgaccaaaccgtgggcttcagtcagcaagacacgaaagctggttcattctctatttcagacgccagctgcctgctacaggggaccagcgccaaaaactctgagttactttccccaggtgctaatcaggtgacaagcacagtggacagcctcgacagccatgacctggaaggggtacagattgacttcgatgccatcatagacgatggggaccactccagcctgatgtcgggggccctgagcccaagtatcattcagaacctttcccatagctcctcccgcctcaccacgcctcgggcgtccctcccattcccagcgctgtccatgagcaccaccaacatggctatcggggacatgagttctttgctgacctccctagcggaagaaagcaaattccttgcagttatgcaataggctttaggaaaaaaagactgcaaccaacggaaatcaataggagttgaagagattaaactgactttgttttggctgtttttttagttctgtatgtattttagcaatctcatctcacctaactgagatgtgtttcaattatattccttttatggaaaaggactctgaaaaaccctaaagtattctagggagaaactgtcttccatttcagttttgaatcagtattgttacactcaaaccaccctcttttt

SEQ ID NO: 8521 - DNA, 553 bp, Homo sapiens
  source 1..553: mol_type = unassigned DNA; mol_type = unassigned DNA
actgaaaactctttatctggaactacaccaagctacatctgaatcccaataaatgcagagtttagtggactttttgttcctgggttttgaaaagctgctgacccttgaaacatcagtttttcatcaacttggagggcgtgttaggcataagctgctgttgccattgtgcagagtaatccagatttacctgttgtcctcagtttgaaggttgcacaaaggcctactcgagactagaaaacttgaaaacacacttgagatctcacactggagagaaaccatacgtctgtgagcacgaaggttgcaacaaggctttctcaaatgcctctgatcgcgccaaacaccaaaacagaacgcattccaatgagaaaccatatgtgtgcaaaatcccaggctgcactaagcgttacacagacccaagctccctccggaaacatgtgaagacagtgcatggcccagaggctcatgtcaccaagaagcagcgaggggacatccatcctcggccgccacccccgagagattccggcagccattcacagtccaggtcgcctggccg

SEQ ID NO: 8522 - DNA, 653 bp, Homo sapiens
  source 1..653: mol_type = unassigned DNA; mol_type = unassigned DNA
tgcggttctcttgctcgctttctgttctcttgcttactttcaaatgcagacgtgcactacagcgtcaccagggcatttttggtcgaagagagctgaagtaatgagaagacatcatggaggcccagtcccacagctccacgaccactgaaaagaaaaaagttgagaattccatagtgaagtgctccactcgaacagatgtgagcgagaaagccgttgcctccagcaccacttctaatgaggatgaaagtcctggacagacttatcacagagagagaagaaacgcaatcactatgcagccacagaatgtccaggggctcagcaaagtcagtgaggaaccttcaacatcgagtgacgagagggcctcattgatcaagaaagagatccatgggtccctgccacacgtggcggagccctctgtgccgtaccgcgggacggtgtttgccatggaccccaggaatggttacatggagccccactaccaccctcctcatcttttccctgccttccatcctcctgtaccaattgatgccagacatcatgagggccgttaccattacgatccatctccgattcctccattgcatatgacttccgccttatctagtagccctacgtatccggacctgcccttcattaggatctccccacaccgg

SEQ ID NO: 8523 - DNA, 451 bp, Homo sapiens
  source 1..451: mol_type = unassigned DNA; mol_type = unassigned DNA
gcggccgcgcggagcggggagccgccagcctgcgccccgtccgcgggtctatgggaagttcggggacttgacagccgctgccgccgcagggcatttttggtcgaagagagctgaagtaatgagaagacatcatggaggcccagtcccacagctccacgaccactgaaaagaaaaaagttgagaattccatagtgaagtgctccactcgaacagatgtgagcgagaaagccgttgcctccagcaccacttctaatggcaaccatttggaggcccaggccagaggctggaccaggaggattggatgcatccgcgctgtccatccctgctgctgcacaaacgactcagccacagatcctcttggatgggctaccttgaaagggggaagctccaaagaatgcgtacaaacccatacatttacctaggtgcgggatgattgcaagaccactttatt

SEQ ID NO: 8524 - DNA, 583 bp, Homo sapiens
  source 1..583: mol_type = unassigned DNA; mol_type = unassigned DNA
agctgggacccactccgggcttggggacccggcgggcgggagaagcgggggctcccggcgcggcctggaaggagcgagaaagcaaaaggcatttttggtcgaagagagctgaagtaatgagaagacatcatggaggcccagtcccacagctccacgaccactgaaaagaaaaaagttgagaattccatagtgaagtgctccactcgaacagatgtgagcgagaaagccgttgcctccagcaccacttctaatggtgagcagcacagggattaccagcagcccagcctggagtcatttctgtgttctctgcattccttgtgaattgagcgtttgcacctggaccagtgtttgttctaggagacgctaaagaaagcaaatggagcaggggcggggggacggcggggggacatggaatgtagtaatctctattttggcactcaacctacacgttgacttccaaactttctaatttgagatgtaaatgtgataggttatttattatcagaagttcctgttttggcattttggaaatcatcttgactagtctggcaagagttcaaaatgctttgtgttgcatatggat

SEQ ID NO: 8525 - DNA, 5877 bp, Homo sapiens
  source 1..5877: mol_type = unassigned DNA; mol_type = unassigned DNA
agaacacaaagtgagctgcacaccatatatggagaaacccgtttcttaaaactagtgatgaactcatgctctgttctgttttctcaaagctgaagtcggctaggtttgcaaagctgtgggctgagcactcaggcaatcacactctcagaaactgcggcggctctggactgcagcctcccaaggctccatgccagacaaagcatgcgtgtcacacttgctacaatagcctggatggtttcttttgtctccaattattcacacacagcaaatattttgccagatatcgaaaatgaagatttcatcaaagactgcgttcgaatccataacaagttccgatcagaggtgaaaccaacagccagtgatatgctatacatgacttgggacccagcactagcccaaattgcaaaagcatgggccagcaattgccagttttcacataatacacggctgaagccaccccacaagctgcacccaaacttcacttcactgggagagaacatctggactgggtctgtgcccattttttctgtgtcttccgccatcacaaactggtatgacgaaatccaggactatgacttcaagactcggatatgcaaaaaagtctgtggccactacactcaggttgtttgggcagatagttacaaagttggctgcgcagttcaattttgccctaaagtttctggctttgacgctctttccaatggagcacattttatatgcaactacggaccaggagggaattacccaacttggccatataagagaggagccacctgcagtgcctgccccaataatgacaagtgtttggacaatctctgtgttaaccgacagcgagaccaagtcaaacgttactactctgttgtatatccaggctggcccatatatccacgtaacagatacacttctctctttctcattgttaattcagtaattctaatactgtctgttataattaccattttggtacagcacaagtaccctaatttagttcttttggactaatacaattcaggaaagaaaaaacccaaaaaccaacctcattcacatatggctttttttttaaccaataacaattaggtgtacttctattttaaaacatttcagaaaaaaatatatgttatagcaatactcttactcaaaagaagaaatttcctaactctatcagataaactcatctttagtataaataagcattatttgcaggttgccacaggtggacttttagtaagtaacctaacccatgtttcagcttctaaatctgcaaaatgagcaaggtacagtagcacatttttaggtgattcttagtaactccagtagccttcattagttaaaaacattattattttttgcatgctgcttcgactctaaatatctggttttccctgtctttttggtttactacttccccagattcagaacagaggagtaactaggggatctgattttagaggccttaattttctgttcatggactgttaaaagtaaaaccaaactttcaaaagggataaacctaaatatttacttgttatcattagagagggaacatcaaatgctgggacatcattactaaccaatagcatcagacactggatttaatggataatcacaatggtcgtaatgtatacaaagacttatataccactttctcgtataaatttttcaaaaaatacaataataatataatttataaagaacactcttctatgaacaaccaccaccaccaaaaaaaaaaaaagccctcagaaaatttctcacaaataaggcaactaatgcctgatatctcaaaatcctttacaaaaggagatagttctagtcaaggagttttgggtatgttacttttttttcttctttttcttttcatctgcctccatcttaagtgcaatttcttcagctgtaagagctcccagtttcttattctttgctttcttaaccttttccttgatgctggccacatcaattttagtttcagtagaagctagacaaattaaaagcacaacacatgtaatactttagattttaccaagtaaaacaaagaatatatgtttaacaaagaatatatgtttaaggcagttaacttcagagtattcttataattgaataattgaaaggtgatcacagtataaaatataaaaacacttgcctaaagcagttagaaatttcttcagattaagataaaacaaatcataaaatactttatatattagtacaagtatacataaaaatggcataaatggcataattgaaccaattactggattcaactatattaagactatttccttaaatcctacttcagactaaattattttacctacattcttttccatattttggaacttctgagtcattattttccatcttgcacattaaaataatttaaaattacatgtatcccttctcaataagtttaatcagctaaccctaagctagaggtcaaaatctacttcctctaatatcaaaacgaaaatttaaagttttccaaatattaattcaatattaattgaatattcaatgaattaattcatttaatgttagattaattcattgaatattaattcaatgaatgactaattaatagtattttaacaagattttggtatatttaacaacattttggtaataaagacaataatttgagagtgtgtggaagtccccctaatagaagccaactatctaatcaatgccaaaagtgtgaacaaaatagagaaaggaagcagtgaaaaagaatgcaactttttcttaccattcaaagtacaggatcacagcataaaagaatcataagataaaacatcaaactacccagcaacctgagaagcacagagtgttaaagcctccaccgtgtggagaaactaaattagggtaactagctattgagtatattgagtaccttcaaagcactcaactgacaggttttacagactggaaattataatacttatgacatttctaccttttatataaccaataatctaccatagaatgtagtatttttaaagctattaacaagcaatatattaaaataataatgtattatatctgtttctgacccagtctatgtacaatattgctggtgagccctctcccttcagtgtgtcactgttcactttggagggttactttaggaagaggataagtgttaccacaggggaaaaaaatgcagaagaggatgcatcagaagaaatggcatgacaatgttttctcttagtgtcttttaaatactaggttagtgcgaaagtgatttctgccatttaaaaaccacaatcactttcgcactaatagctcctgaataagacctgtcagcatcctttagtctaaggtgatgagaaatccatgttaccgatatagaagccaaactctaagccaagatcacataaagagaagaaaaagtacaacttctgataattcctctttgagaggcatgacagcagagctcagggatcttcttgcatttctacagaagatgcactggctgccctgggtttgtatctttcacaacaaagagtcttttccaagcacagaccagaggtcaggagaggactgtcaatccagtttgcactgaaataggcattagctgcctctaaattataaattatctcagccatcccttgtccttaggattagtaattaatgaaatgctaagagaactgatgaaaagatacaactgtttcttaaaaagattcagacaaatttattatgggtttacttttcctaattaataaagacttttacatcatagaaagcattaccttccttaggtttcacaattggtttttccttaggtggaataaatgctttgtttctttcctcttgtctcttactgatggcttctgcttgtttagcctacattaataaataaaaaatatatcagttaaatgtatttatagttaaataattcaagtatctatgaactttgctattcatgtgagccagacataaagtgccgtacctttattgcttccattttctgccgcttcttctgatttgccttcaaaaagtattcaccactagccaattctttatcgatctgttgaaaacggtatttacaattacatcagaaataatgtagaggagaagtcatgtcctaagcaagtcacaatatccttagggtaaaaacaatggggtcaaactgatttattaataaaaatggtagtgacataaaggaaacagagtctaagctgaggggaatacatacacaaaagtgtggaggtaggaaagcacctccatggaatacaacccagagtagttcagggatatggcatggaaggtcactgattcagaaaagtgtgagaagaaactggagagagagttttggggaaaatttgaagaagcttcaatggcagacaaagtaggagggataagatttagaaatgactgtaggtttctgagaagactgtaaagaccaaagaataattttaatggagaggaatgaagaatagatgagagcctggaataaaggtagtggcatgcagaataaaagccagaactatcaggaattggtgactaattagcaaaagcaacagcttgttcattcaatatacagccaacatgtaaaatgtgtataactgacctgtctcccacttacatagcattattatatctaaggcactgttctaagctctttataattactcatttaatcctcactaacaattctttaagataggtattaccattactcccactttaggtatggggaaacttaagtatggatgggataaataactcgcccagtcacataatgaattaagtgttaagaacaagtcaatcgagacatcactgtttcaagaagcttacacagctacagaagaaagataagtcaattactacaagaaagggccataagaaataaggcaggtgttatggaagcatggtttaatgactgcatcactccactttccccctaactactatcaatttcctccatgatccaaaacttccattgttttttcactatgatcatcattttccccgtcaatcacaaatcttccctgaaagactccaaccatggttgtggaaaaaagagatgtagaaagcaatgagttcacatgctgagcagaagtagaaagggaaggctttaggatatagccaaggaagggaataatgaagcaagaacccccaggagacaggtgaagatggaattcaaagaacacatagaagaggctgatgcaggtggaagaaaacccatacgtgagagaagaggaaacagaaaggggttcttatctggtggtctcaaatatttcaataaaatgcaatgtcatatgctaaacatgggagggcactgagagaattaagaggaaacatgaattttgaatgaaattaatccaaagataaaactttctctaacttaatttggtagccacgttgcaaggaagaagtcaagtttttagactgatccaagttttagagctttgctgagaaggtgggacagaagtaaaaaggggcatgaatcaaaacaatgatgtgcaagaacaaaatggaaactggtcatggtgggaaaggaaatgaagcagaagacacctgacaaaaggaatcataacttagaaaaacggtgggtgttacaatttacaatttaagatttcagaacaagaacaaccatagagcacacagtcacaataatgttgccaaatcagagaaaagagtattgcagactaaacgaacttttatccatggaacatttacagtggctacagggtcacaaacctcctggatgcagtttataatcaatgtgaacgccccactgcacacccccatgcactcagctcaaaatatgcctatttatatttaccctcagtttcttatagctctgcacacacacacacaatatatatatatacacatatcccacctgaaatactttcaataaagtttctgaccaaa

SEQ ID NO: 8526 - DNA, 1234 bp, Homo sapiens
  source 1..1234: mol_type = unassigned DNA; mol_type = unassigned DNA
ttctgttttctcaaagctgaagtcggctaggtttgcaaagctgtgggctgagcactcaggcaatcacactctcagaaactgcggcggctctggactgcagcctcccaaggctccatgccagacaaagcatgcgtgtcacacttgctacaatagcctggatggtttcttttgtctccaattattcacacacagcaaatattttgccagatatcgaaaatgaagatttcatcaaagactgcgttcgaatccataacaagttccgatcagaggtgaaaccaacagccagtgatatgctatacatgacttgggacccagcactagcccaaattgcaaaagcatgggccagcaattgccagttttcacataatacacggctgaagccaccccacaagctgcacccaaacttcacttcactgggagagaacatctggactgggtctgtgcccattttttctgtgtcttccgccatcacaaactggtatgacgaaatccaggactatgacttcaagactcggatatgcaaaaaagtctgtggccactacactcagagggaattacccaacttggccatataagagaggagccacctgcagtgcctgccccaataatgacaagtgtttggacaatctctgtgttaaccgacagcgagaccaagtcaaacgtacgtacatcaatcttaaattgtttcattaagagctatgtgaattctgtcagtgcattatgaggaacaatgtctaagaggatattctatgtttgtttcacaggttactactctgttgtatatccaggctggcccatatatccacgtaacagatacacttctctctttctcattgttaattcagtaattctaatactgtctgttataattaccattttggtacagcacaagtaccctaatttagttcttttggactaatacaattcaggaaagaaaaaacccaaaaaccaacctcattcacatatggctttttttttaaccaataacaattaggtgtacttctattttaaaacatttcagaaaaaaatatatgttatagcaatactcttactcaaaagaagaaatttcctaactctatcagataaactcatctttagtataaataagcattatttgcaggttgccacaggtggacttttagtaagtaacctaacccatgtttcagcttctaaatctgcaaaatgagcaaggtacagtagcacatttttaggtgattcttagtaactccagtag

SEQ ID NO: 8527 - DNA, 714 bp, Homo sapiens
  source 1..714: mol_type = unassigned DNA; mol_type = unassigned DNA
atgcgtgtcacacttgctacaatagcctggatggtttcttttgtctccaattattcacacacagcaaatattttgccagatatcgaaaatgaagatttcatcaaagactgcgttcgaatccataacaagttccgatcagaggtgaaaccaacagccagtgatatgctatacatgacttgggacccagcactagcccaaattgcaaaagcatgggccagcaattgccagttttcacataatacacggctgaagccaccccacaagctgcacccaaacttcacttcactgggagagaacatctggactgggtctgtgcccattttttctgtgtcttccgccatcacaaactggtatgacgaaatccaggactatgacttcaagactcggatatgcaaaaaagtctgtggccactacactcaggtgtcacaggaaaggggtcgggatccaaaccccaagagagggttcttgaatctcgcgcgagaaaatccagggttgtttgggcagatagttacaaagttggctgcgcagttcaattttgccctaaagtttctggctttgacgctctttccaatggagcacattttatatgcaactacggaccaggagggaattacccaacttggccatataagagaggagccacctgcagtgcctgccccaataatgacaagtgtttggacaatctctgtgttaaccgacagcgagaccaagtca

SEQ ID NO: 8528 - DNA, 667 bp, Homo sapiens
  source 1..667: mol_type = unassigned DNA; mol_type = unassigned DNA
atccagtttagctctgtctacccaactgttgttataagcaagtgccacagcacattttacttctctttggacacttcctgttttctggttttcagtggattttacttctctttttgttatcttcctccctgttaatttttgtgatttggttttctttttttttttttttttttgtctctaaatttactttttttgctgctgacaaagtactgagttgctcagacttgggacccagcactagcccaaattgcaaaagcatgggccagcaattgccagttttcacataatacacggctgaagccaccccacaagctgcacccaaacttcacttcactgggagagaacatctggactgggtctgtgcccattttttctgtgtcttccgccatcacaaactggtatgacgaaatccaggactatgacttcaagactcggatatgcaaaaaagtctgtggccactacactcaggttgtttgggcagatagttacaaagttggctgcgcagttcaattttgccctaaagtttctggctttgacgctctttccaatggagcacattttatatgcaactacggaccaggagggaattacccaacttggccatataagagaggagccacctgcagtgcctgccccaataatgacaagtgtttggacaatctctgtg

SEQ ID NO: 8529 - DNA, 812 bp, Homo sapiens
  source 1..812: mol_type = unassigned DNA; mol_type = unassigned DNA
cgcagccgcggggagcgaggagcgcgcggagccggccatgggcaagtcagcttccaaacagtttcataatgaggtcctgaaggcccacaatgagtaccggcagaagcacggcgtccccccactgaagctctgcaagaacctcaaccgggaggctcaacagtattctgaggccctggccagcacgaggatcctcaagcacagcccggagtccagccgtggccagtgtggggagaaccttgcatgggcatcctatgatcagacaggacacttcacggccatggtatggaagaacaccaagaagatgggcgtggggaaggcgtccgcaagtgacgggtcctcctttgtggtggccagatacttcccagcggggaatgttgtcaatgagggcttcttcgaagaaaacgtcctgccgccgaagaagtaacttgttaaatgtaatgggaaggtggcagacttaagaacgtggatatgaagtgcctagaaccaccacaacctggctgtgcgtctgtccctgtgggtgtatgtgcttgtgtgtgtgatgcatgtgagcgtctctggcacacacacttggacatacagttctgtgtgcgctcattcttattacaggagtgagcaaaggaagcatttaccccgatggttacctagaccacgattatttggattggggggaggggggatccgttttttttttttaattttttgttatttctaagcaaacctcttttgtacttttcttacttctaatatccatccctggactttttgtattccaaatgtttgtgatgctgagaagtgaagttcattttatgtga

SEQ ID NO: 8530 - DNA, 1890 bp, Homo sapiens
  source 1..1890: mol_type = unassigned DNA; mol_type = unassigned DNA
agccgcggggagcgaggagcgcgcggagccggccatgggcaagtcagcttccaaacagtttcataatgaggtcctgaaggcccacaatgagtaccggcagaagcacggcgtccccccactgaagctctgcaagaacctcaaccgggaggctcaacagtattctgaggccctggccagcacgaggatcctcaagcacagcccggagtccagccgtggccagtgtggggagaaccttgcatgggcatcctatgatcagacaggaaaggaggtggctgatagatggtacagtgaaatcaagaactataacttccagcagcctggcttcacctcggggactggacacttcacggccatggtatggaagaacaccaagaagatgggcgtggggaaggcgtccgcaagtgacgggtcctcctttgtggtggccagatacttcccagcggggaatgttgtcaatgagggcttcttcgaagaaaacgtcctgccgccgaagaagtaacttgttaaatgtaatgggaaggtggcagacttaagaacgtggatatgaagtgcctagaaccaccacaacctggctgtgcgtctgtccctgtgggtgtatgtgcttgtgtgtgtgatgcatgtgagcgtctctggcacacacacttggacatacagttctgtgtgcgctcattcttattacaggagtgagcaaaggaagcatttaccccgatggttacctagaccacgattatttggattggggggaggggggatccgttttttttttttaattttttgttatttctaagcaaacctcttttgtacttttcttacttctaatatccatccctggactttttgtattccaaatgtttgtgatgctgagaagtgaagttcattttatgtgatcttcatgcgtcgtaatctacttttggtagataattaagattattaaaccctcatttaaatgtgacataaaatacagctttaagcacataaatacaaagcagcttccatcaggaacatggagcaggcagggactccattttacagaattactgagatttctcagttgtaaaacatgatgtcatcctgcatgcctcctggaattctccaatggggtcgccaaacaacaaatggagaaaaaaagttttacttccttgcattcttctacctttaaatagcaaagtaccactaccaccaccacctcttgcccccttccctcttttcttaaacttctggcatttcagagctcagcaggctacccctggtttctggagagttgggctaggcctgaagctccccctcccccacctctgctaggcagcccaggcctggtctgggagacagcccctcaccctgcctgggctcttggccaagcggccttggatggatgaagtcagagaggtggggtgagggtgagcttactcagggcccccagaggaagccctcagcctctgccctccccccacacagggcgggagcccaggcctgttcctggcagctgtggctgcagctgtgctcctgctccctcctggaatgtgcgacaagcccaaatgttccggggaggcggccggggcagggggcttagaagtgctaatatggttctgtgttttgcctgaaacgataccaggttcccctgaatagcaactttacaaggtccatgtgggagggaccaacccagatgccctgctgagtgtccctgaaaccatggcagctccatctgtcaagatggcaggggccggagtgagggggctgctggcttaacagcaggcatctgggcaggccagtcctcaaagcagctcctgaaggtctgtgttgcactgtcaccagtctcaagctatgcctctaatttcaccagggatattgactaagaagacaataaaatctttttctttgtgtaataacctc

SEQ ID NO: 8531 - DNA, 2702 bp, Homo sapiens
  source 1..2702: mol_type = unassigned DNA; mol_type = unassigned DNA
ctttttgtttatcatggtaaaaatgcatagcataaaatgtattatcttaaccatttttaagtgtacagttctgtagtgttaagtatatttacattgctatgcaacagagctccacaactttttcatgttgcaaaactgaaactctatacatgttaaacaacacctctgccttttctcctctccactgtagacctgaaatctttgtttttcctattgacaagggcttggtccgtctgttggccaggaagtcccgatacttcaggttgtagctccgccctctgccttaatgcctgtccccatgatcagtttccacctccatgtctccccacctctgcctgtcaaccaaaacctcacaaatcctggggttcagagcccccatatccctgccctgcccacattactctgactggacctcactggacagcctcactgagcccaagttctagagcttgcgccgcgtactctttgtctaagcgtctacttcctccttctcagaaggcccacggacagctccaccatgcaggtgtgacctgcagttaccttcaccttctgggtctgtagctcccgggtctgcagcccccaaaccccgcaaaggcaagccctgggtcttctttccctcacgtctcctcagaaattccatgggatttgacttggcccaggagacatgggagatctggctatgagaaaagggactaggactccctgttgcatcatctcctcagtctcgggtgaaaggcagcagagtagaagaaaggcaccagtgaagtttatttggctcacggttctggaggctgggaagtccaagagcatggcattggcatctggcgaggccctcatgctgcattatcccatggaagagcagaagggcaacttccaaacagtttcataatgaggtcctgaaggcccacaatgagtaccggcagaagcacggcgtccccccactgaagctctgcaagaacctcaaccgggaggctcaacagtattctgaggccctggccagcacgaggatcctcaagcacagcccggagtccagccgtggccagtgtggggagaaccttgcatgggcatcctatgatcagacaggaaaggaggtggctgatagatggtacagtgaaatcaagaactataacttccagcagcctggcttcacctcggggactggacacttcacggccatggtatggaagaacaccaagaagatgggcgtggggaaggcgtccgcaagtgacgggtcctcctttgtggtggccagatacttcccagcggggaatgttgtcaatgagggcttcttcgaagaaaacgtcctgccgccgaagaagtaacttgttaaatgtaatgggaaggtggcagacttaagaacgtggatatgaagtgcctagaaccaccacaacctggctgtgcgtctgtccctgtgggtgtatgtgcttgtgtgtgtgatgcatgtgagcgtctctggcacacacacttggacatacagttctgtgtgcgctcattcttattacaggagtgagcaaaggaagcatttaccccgatggttacctagaccacgattatttggattggggggaggggggatccgttttttttttttaattttttgttatttctaagcaaacctcttttgtacttttcttacttctaatatccatccctggactttttgtattccaaatgtttgtgatgctgagaagtgaagttcattttatgtgatcttcatgcgtcgtaatctacttttggtagataattaagattattaaaccctcatttaaatgtgacataaaatacagctttaagcacataaatacaaagcagcttccatcaggaacatggagcaggcagggactccattttacagaattactgagatttctcagttgtaaaacatgatgtcatcctgcatgcctcctggaattctccaatggggtcgccaaacaacaaatggagaaaaaaagttttacttccttgcattcttctacctttaaatagcaaagtaccactaccaccaccacctcttgcccccttccctcttttcttaaacttctggcatttcagagctcagcaggctacccctggtttctggagagttgggctaggcctgaagctccccctcccccacctctgctaggcagcccaggcctggtctgggagacagcccctcaccctgcctgggctcttggccaagcggccttggatggatgaagtcagagaggtggggtgagggtgagcttactcagggcccccagaggaagccctcagcctctgccctccccccacacagggcgggagcccaggcctgttcctggcagctgtggctgcagctgtgctcctgctccctcctggaatgtgcgacaagcccaaatgttccggggaggcggccggggcagggggcttagaagtgctaatatggttctgtgttttgcctgaaacgataccaggttcccctgaatagcaactttacaaggtccatgtgggagggaccaacccagatgccctgctgagtgtccctgaaaccatggcagctccatctgtcaagatggcaggggccggagtgagggggctgctggcttaacagcaggcatctgggcaggccagtcctcaaagcagctcctgaaggtctgtgttgcactgtcaccagtctcaagctatgcctctaatttcaccagggatattgactaagaagacaataaaatctttttctttgt

SEQ ID NO: 8532 - DNA, 1645 bp, Homo sapiens
  source 1..1645: mol_type = unassigned DNA; mol_type = unassigned DNA
aagtcaggtgagcccgcgggctcgcccgctgcggaatggttcggaaccccgcgctcccggacctcgccgtctccctcgtccgccgcaagccaggacacttcacggccatggtatggaagaacaccaagaagatgggcgtggggaaggcgtccgcaagtgacgggtcctcctttgtggtggccagatacttcccagcggggaatgttgtcaatgagggcttcttcgaagaaaacgtcctgccgccgaagaagtaacttgttaaatgtaatgggaaggtggcagacttaagaacgtggatatgaagtgcctagaaccaccacaacctggctgtgcgtctgtccctgtgggtgtatgtgcttgtgtgtgtgatgcatgtgagcgtctctggcacacacacttggacatacagttctgtgtgcgctcattcttattacaggagtgagcaaaggaagcatttaccccgatggttacctagaccacgattatttggattggggggaggggggatccgttttttttttttaattttttgttatttctaagcaaacctcttttgtacttttcttacttctaatatccatccctggactttttgtattccaaatgtttgtgatgctgagaagtgaagttcattttatgtgatcttcatgcgtcgtaatctacttttggtagataattaagattattaaaccctcatttaaatgtgacataaaatacagctttaagcacataaatacaaagcagcttccatcaggaacatggagcaggcagggactccattttacagaattactgagatttctcagttgtaaaacatgatgtcatcctgcatgcctcctggaattctccaatggggtcgccaaacaacaaatggagaaaaaaagttttacttccttgcattcttctacctttaaatagcaaagtaccactaccaccaccacctcttgcccccttccctcttttcttaaacttctggcatttcagagctcagcaggctacccctggtttctggagagttgggctaggcctgaagctccccctcccccacctctgctaggcagcccaggcctggtctgggagacagcccctcaccctgcctgggctcttggccaagcggccttggatggatgaagtcagagaggtggggtgagggtgagcttactcagggcccccagaggaagccctcagcctctgccctccccccacacagggcgggagcccaggcctgttcctggcagctgtggctgcagctgtgctcctgctccctcctggaatgtgcgacaagcccaaatgttccggggaggcggccggggcagggggcttagaagtgctaatatggttctgtgttttgcctgaaacgataccaggttcccctgaatagcaactttacaaggtccatgtgggagggaccaacccagatgccctgctgagtgtccctgaaaccatggcagctccatctgtcaagatggcaggggccggagtgagggggctgctggcttaacagcaggcatctgggcaggccagtcctcaaagcagctcctgaaggtctgtgttgcactgtcaccagtctcaagctatgcctctaatttcaccagggatattgactaagaagacaataaaatctttttctttgtgtaataacctc

SEQ ID NO: 8533 - DNA, 1917 bp, Homo sapiens
  source 1..1917: mol_type = unassigned DNA; mol_type = unassigned DNA
cggccgcatccggggagccctcggcagtcgcggagctgcttcccaggggtgagctctccgggaggcccacggggtggccccgggcgcctccgccctcagctgtcgctccttataaggcgggggccgggcggcgccggaggaggggccgcggcatcagcccggtcctgggctctggggcggcgctgggccgggcgagcgcagtgcagcgcagccgcggggagcgaggagcgcgcggagccggccatgggcaagtcagcttccaaacagtttcataatgaggtcctgaaggcccacaatgagtaccggcagaagcacggcgtccccccactgaagctctgcaagaacctcaaccgggaggctcaacagacacttcacggccatggtatggaagaacaccaagaagatgggcgtggggaaggcgtccgcaagtgacgggtcctcctttgtggtggccagatacttcccagcggggaatgttgtcaatgagggcttcttcgaagaaaacgtcctgccgccgaagaagtaacttgttaaatgtaatgggaaggtggcagacttaagaacgtggatatgaagtgcctagaaccaccacaacctggctgtgcgtctgtccctgtgggtgtatgtgcttgtgtgtgtgatgcatgtgagcgtctctggcacacacacttggacatacagttctgtgtgcgctcattcttattacaggagtgagcaaaggaagcatttaccccgatggttacctagaccacgattatttggattggggggaggggggatccgttttttttttttaattttttgttatttctaagcaaacctcttttgtacttttcttacttctaatatccatccctggactttttgtattccaaatgtttgtgatgctgagaagtgaagttcattttatgtgatcttcatgcgtcgtaatctacttttggtagataattaagattattaaaccctcatttaaatgtgacataaaatacagctttaagcacataaatacaaagcagcttccatcaggaacatggagcaggcagggactccattttacagaattactgagatttctcagttgtaaaacatgatgtcatcctgcatgcctcctggaattctccaatggggtcgccaaacaacaaatggagaaaaaaagttttacttccttgcattcttctacctttaaatagcaaagtaccactaccaccaccacctcttgcccccttccctcttttcttaaacttctggcatttcagagctcagcaggctacccctggtttctggagagttgggctaggcctgaagctccccctcccccacctctgctaggcagcccaggcctggtctgggagacagcccctcaccctgcctgggctcttggccaagcggccttggatggatgaagtcagagaggtggggtgagggtgagcttactcagggcccccagaggaagccctcagcctctgccctccccccacacagggcgggagcccaggcctgttcctggcagctgtggctgcagctgtgctcctgctccctcctggaatgtgcgacaagcccaaatgttccggggaggcggccggggcagggggcttagaagtgctaatatggttctgtgttttgcctgaaacgataccaggttcccctgaatagcaactttacaaggtccatgtgggagggaccaacccagatgccctgctgagtgtccctgaaaccatggcagctccatctgtcaagatggcaggggccggagtgagggggctgctggcttaacagcaggcatctgggcaggccagtcctcaaagcagctcctgaaggtctgtgttgcactgtcaccagtctcaagctatgcctctaatttcaccagggatattgactaagaagacaataaaatctttttctttgtgtaataacctc

SEQ ID NO: 8534 - DNA, 2812 bp, Homo sapiens
  source 1..2812: mol_type = unassigned DNA; mol_type = unassigned DNA
cactgtgtactgagactggatgcatccttgcaataaaaaagaggttgatcacgacaaatgtgaaccccgccgttataaaaacagccatcatggctgtaaatgccaaaaagcagtcagtcttgtaacttgaaaaaaaaaaaaaaggaattgtagattgtgcgcatggactcggagtgggggcggtggacagtaagtcatgatgttttggtggtaccacctggttgaatttcttcatctgaataagaagctcctgtgatgttctggggaggccttggaaggctagcgcatccctcatagaaagtgaatgggagctacggacaccgtaccccgggctcagagaagagcctgctggacctggaccttgctgagggccctggccccacctgctgccagggcctgtttctccctgcaggaagcccaccgccccgggctcacccccaagcttgtgagaggctgctgcatttcccccaccctgacaggtcacctagaccccaggccacgtatgtgaacggcagcctcccaaccacacaacacatcaaacaggagtccttgcccgactaccaagccatggcagaggcccgcacatccctgtctgcccactgtcggggcccgctggccactggcctgcacccagacctggacctcccgggccgaagcctcgccacccctgcgccttcctgctaccttctgggcagcgaacccagctctggcctgggcctccagcccgagacccacctccccgagggcagcctgaagcggtgctgcgtcttgggcctaccccccacctccccagcctcctcctcaccctgtgcctcctccgacgtcacctccatcatccgctcctcccagacgtctctggtcacctgtgtaaatggactccggagcccccctctgacgggagatctggggggcccttccaagcgggcccggcctggccctgcatcgacggacagccatgagggcagcttgcaacttgaagcctgccggaaggcgagcttcctgaagcaggaacccgcggatgagttttcagagctctttgggcctcaccagcagggcctgccgcccccctatcccctgtctcagttgccgcctggcccaagccttggaggcctggggctgggcctggcaggcagggtggtggccgggcggcaggcgtgccgctgggtggactgctgtgcagcctatgagcagcaggaggagctggtgcggcacatcgagaagagccacatcgaccagcgcaagggcgaggacttcacctgcttctgggctggctgcgtgcgccgctacaagcccttcaacgcccgctacaagctgctcatccacatgcgagtgcactcgggcgagaagcccaacaagtgcatgtttgaaggctgcagcaaggccttctcacggctggagaacctcaagatccacctgaggagccacacgggcgagaagccgtacctgtgccagcacccgggttgccagaaggccttcagcaactccagcgaccgcgccaagcaccagcgcacccacctagacacgaagccgtacgcctgtcagatccctggctgctccaagcgctacacagaccccagctccctccgcaagcacgtcaaggcccattcagccaaagagcagcaggtgcgtaagaagctgcatgcgggccctgacaccgaggccgacgtcctgaccgagtgtctggtcctgcagcagctccacacgtccacacagctggctgccagcgacggcaagggtggctgtggcctgggccaggagctgctcccaggtgtgtatcctggctccatcaccccccataacggacttgcatcgggcctcctgcccccagcgcacgacgtaccttccaggcaccacccgctggatgccaccaccagttcccaccaccatctgtcccctctgcccatggctgagagcacccgggatgggttggggcccggcctcctctcaccaatagtcagccccctgaaggggctggggccaccgccgctgcccccatcctctcagagccattctccggggggccagcccttccccacactccccagcaagccgtcctacccacccttccagagccctccacccccgcctctgcccagcccacaaggttaccagggcagtttccactccatccagagttgcttcccctatggcgactgctaccggatggctgaaccagcagccggtggggacggactggtcggggagacccacggtttcaaccccctgcggcccaatggctaccacagcctcagcacgcccttgcctgccacaggctatgaggccctggctgaggcctcatgccccacagcgctgccacagcagccatctgaagatgtggtgtccagcggccccgaggactgtggcttcttccccaatggagcctttgaccactgcctgggccacatcccctccatctacacagacacctgaaggagcccccacatgcgcctgcccatccagcactgcagatgccacctcgcccacctgctgtcgctcccaccctccgtgcacctagcaggagtgccaggccacagccggaacagccaggccatgacccaggggagccagcgctgccaccccacccagcgctgccagggagccgccatccgagcttgagctgggcgcacagaggtgcccgccaggatctgtggccctgtaacattccctcgatcttgtcttcccgttcctccccgcagtggttttgaaatcacagacctcgtgtatataaaatatgcagaacttgttttccgttcccctgccagttttatatttttggttttacaagaaaaaacattaaaaactggaaaggaga

SEQ ID NO: 8535 - DNA, 2807 bp, Homo sapiens
  source 1..2807: mol_type = unassigned DNA; mol_type = unassigned DNA
gagcccggcgcgacccccagccgtgcgccccgccccggcgccatgcattgcgaggtggctgaggcacactcggacaagaggcctaaggaggcccctggtgcgcccggccccgaccgcggccccgccagcctcggcgcgcacatggccttcagggtcaccgtgagtggcggcggctgcggggacaggggcccgcgggacctgctagcccggccgcctgcgccgccaccgcgcgcccacgacctcctccggccccgcagtccccgagactacggtccatccaaggccgccgccgccgggaaggtgaatgggagctacggacaccgtaccccgggctcagagaagagcctgctggacctggaccttgctgagggccctggccccacctgctgccagggcctgtttctccctgcaggaagcccaccgccccgggctcacccccaagcttgtgagaggctgctgcatttcccccaccctgacaggtcacctagaccccaggccacgtatgtgaacggcagcctcccaaccacacaacacatcaaacaggagtccttgcccgactaccaagccatggcagaggcccgcacatccctgtctgcccactgtcggggcccgctggccactggcctgcacccagacctggacctcccgggccgaagcctcgccacccctgcgccttcctgctaccttctgggcagcgaacccagctctggcctgggcctccagcccgagacccacctccccgagggcagcctgaagcggtgctgcgtcttgggcctaccccccacctccccagcctcctcctcaccctgtgcctcctccgacgtcacctccatcatccgctcctcccagacgtctctggtcacctgtgtaaatggactccggagcccccctctgacgggagatctggggggcccttccaagcgggcccggcctggccctgcatcgacggacagccatgagggcagcttgcaacttgaagcctgccggaaggcgagcttcctgaagcaggaacccgcggatgagttttcagagctctttgggcctcaccagcagggcctgccgcccccctatcccctgtctcagttgccgcctggcccaagccttggaggcctggggctgggcctggcaggcagggtggtggccgggcggcaggcgtgccgctgggtggactgctgtgcagcctatgagcagcaggaggagctggtgcggcacatcgagaagagccacatcgaccagcgcaagggcgaggacttcacctgcttctgggctggctgcgtgcgccgctacaagcccttcaacgcccgctacaagctgctcatccacatgcgagtgcactcgggcgagaagcccaacaagtgcatgtttgaaggctgcagcaaggccttctcacggctggagaacctcaagatccacctgaggagccacacgggcgagaagccgtacctgtgccagcacccgggttgccagaaggccttcagcaactccagcgaccgcgccaagcaccagcgcacccacctagacacgaagccgtacgcctgtcagatccctggctgctccaagcgctacacagaccccagctccctccgcaagcacgtcaaggcccattcagccaaagagcagcaggtgcgtaagaagctgcatgcgggccctgacaccgaggccgacgtcctgaccgagtgtctggtcctgcagcagctccacacgtccacacagctggctgccagcgacggcaagggtggctgtggcctgggccaggagctgctcccaggtgtgtatcctggctccatcaccccccataacggacttgcatcgggcctcctgcccccagcgcacgacgtaccttccaggcaccacccgctggatgccaccaccagttcccaccaccatctgtcccctctgcccatggctgagagcacccgggatgggttggggcccggcctcctctcaccaatagtcagccccctgaaggggctggggccaccgccgctgcccccatcctctcagagccattctccggggggccagcccttccccacactccccagcaagccgtcctacccacccttccagagccctccacccccgcctctgcccagcccacaaggttaccagggcagtttccactccatccagagttgcttcccctatggcgactgctaccggatggctgaaccagcagccggtggggacggactggtcggggagacccacggtttcaaccccctgcggcccaatggctaccacagcctcagcacgcccttgcctgccacaggctatgaggccctggctgaggcctcatgccccacagcgctgccacagcagccatctgaagatgtggtgtccagcggccccgaggactgtggcttcttccccaatggagcctttgaccactgcctgggccacatcccctccatctacacagacacctgaaggagcccccacatgcgcctgcccatccagcactgcagatgccacctcgcccacctgctgtcgctcccaccctccgtgcacctagcaggagtgccaggccacagccggaacagccaggccatgacccaggggagccagcgctgccaccccacccagcgctgccagggagccgccatccgagcttgagctgggcgcacagaggtgcccgccaggatctgtggccctgtaacattccctcgatcttgtcttcccgttcctccccgcagtggttttgaaatcacagacctcgtgtatataaaatatgcagaacttgttttccgttcccctgccagttttatatttttggttttacaagaaaaaacattaaaaactggaaa

SEQ ID NO: 8536 - DNA, 6667 bp, Homo sapiens
  source 1..6667: mol_type = unassigned DNA; mol_type = unassigned DNA
atcctttatggttgaagggtgttggaggaagcagagttttcatcagctgctgaagtggcaactaatagaggtttgaatggccgtagaaaaatattgtgttacttgtttgttgtctaggggctcttggctttgggcctcagtgcaagtccattggaaaaggcagctgcaacaatctagtggtcaccagcagtcccatgatggttcagcgactgggactcatttcacctccagcaagccaggtctctacagcatgcaaccagatcagtcctagcttacagagggcaatgaatgcagccaacctgaatatacctccttcagataccaggtcccttatttcgcgtgagtctttggcgtccacgaccttgagtctgacggaaagtcagtcggcctcaagcatgaagcaggagtggtcccagggctacagggccctcccttcgctctccaaccacggctctcagaatggccttgatctaggggatctccttagccttcctcccgggacatccatgtccagcaatagtgtctctaactcattaccatcctacctttttggcacggaaagtagccactctccttaccctagtcctcggcactcatccaccaggtcccactcggcccgctccaagaagagagcgctgtccttgtccccgctgtccgatggcatcgggatagatttcaataccatcatccgcacgtcgcccacgtccttggtggcctacatcaacgggtcgagggcttcgccggccaacctgtccccgcagccggaggtctacgggcatttcctgggcgtgcgcggcagctgcattccccagccgcgcccggtgcccggcagccagaagggcgtgctggtggcccctggaggcctggcgctgccggcctacggcgaggacggggccctggagcacgagcgcatgcaacagctggagcacggcggcctgcagccaggcctggtcaaccacatggtggtgcagcatggcctgccgggccccgacagccagtcggccggcctgttcaagaccgaacgcctggaggagttcccgggcagcaccgtagacctaccccccgcgcctccgctccctcctctgccgccgcccccaggccccccacccccttaccatgcccatgcgcaccttcaccacccggagctcgggccccacgcccagcagctggccttgccccaggccaccctggacgacgacggggagatggacggcatcgggggcaagcattgctgccgctggatcgactgcagcgccctgtacgaccagcaggaggagctcgtgcggcacatcgagaaggtccacatcgaccagcgcaaaggggaggacttcacttgcttctgggccggttgccctcgaagatacaagcccttcaacgcccgctataaactgctgatccacatgagagtccactctggggagaagcccaacaagtgtacgtttgaaggttgcgagaaggccttttcaaggcttgaaaatctcaagatccacttgcggagccacacaggcgagaagccgtatttgtgccagcatccgggttgtcagaaggccttcagtaactccagtgaccgcgccaaacaccagcggacgcatctggacaccaaaccttatgcttgtcaaattccaggatgtaccaaacgctacacagacccaagttccctaagaaagcatgtgaaggcacattcttccaaagagcaacaagcaaggaaaaagttgcggtccagcacagagctccatccagacctgctcacagattgcctcaccgtgcagtccctgcagccggccacttcccctagagatgctgctgctgaagggaccgtgggacgctcccctggacccgggcctgacctctattcagctcccattttctccagcaattattcaagccgaagtggaacagctgctggggccgtaccacccccacatcctgtcagtcacccttctccaggacataatgtacaggggagccctcacaacccctcctcccagttacctccactcacagctgtggacgcaggagctgagaggtttgcaccttctgctccatctcctcaccacatcagcccccggagagttccagctccttcttcaatactgcaaagaacacagcctccctatacccagcagccatcaggttcacacctgaagtcctatcagccagaaacaaactcttcttttcaaccaaatggtatccatgtccatggattttatgggcagctgcagaagttctgtcccccacactaccccgattcccagagaattgtgccgcctgtcagctcctgcagtgtggtgccttcgtttgaggactgcctagtccctacatccatgggccaggccagttttgatgttttccacagagccttctcgactcactcgggcattacagtgtatgatttaccttcaagttcctcgagcctctttggggagtctctccgcagcggggctgaagatgctaccttcttgcagatcagcaccgtggaccgctgtcctagccagctctcctctgtctacaccgaaggctaaaagctctcttggccactcctgcacacccaggaccttgatgttgcttgccaccttttgttttcgtactctcacagactgcttgaggaaggatgtcagcccaatcagcgggccctgcagagttactgatgttctttcagaaggcaggactgaatggcagagctagctttgcaggaatcattacagttgctcctttttctctctggttttcctggactatgtgaccaggaggactgtcttttcaaagggaatttagagcctcactctcctggatacctgttacttcctggctgtcaacccttaaaggaccccagtgaaatgatgtgcatatgaaaatgtagtttggggatgactctacctgaaaactccaaacagggaaaaagacctcaattacgagaggcatagtgacctgcctcacctaatcctcacccttgctgctcctgatgcaaagccaggcacaacaagggaaatccatgtccaaagcatagtgtggtctcaactcttagaaactccctgggtttcccttttctcttagccacatgctaaccagttgcttctcagtgtttctcttcaatagaaaaataaggttttatatgccagcagcctatccttgtttttgcattttaaagacttagttatttatacgtattttaaaatgaaaaaaaaatgtaaaggtctgtgctttggatggaaatcattattattgtaatcaccccagctatagacattttgcacagctgtggttctgcctggccccacctctagcatgttagttttgcagttagcaaaggttacctgagggaaatggagtgggcacctcccgcaccaacagtcctgtagctggaaccttcctgagttgactgtttagtaactccacctcaaagactgtgttcaaagaaaaatgttgtttgactggtttacccattgcctccactctggtgctgcacccagagaagtgccagatgtgagaactgggacagactgagtcatgtgccagcttcccttggaaaaccaaacctagtgatacttgacttccagtgctcagattttactaacgtttttcaggatatccactcatctgtctgtctcttccctacacttctctccaccctctttttgcatccctcttaccctcttcctgactgtggttcatatatccccaccagccgccattgtctgatcatcttgggaaggtagaggtgacagttctcgaaaagtctacagaaagaggcaattctttttctgagttccagtttgaaggcctggaattttcacatagcacttggtcgaaaatatcaagcctaaataggaagtcattttctgtgacacctctacatagctattacagatcctaagtcctagggcatcagctataaaaattggccagtcccaaagacacagtaagttctaacattctggtactatcatatttcaagtattttttctcactttttaaaaatgtttttctgaacaaaagtgaaacaatgccatttatcaaactgagatcattacaatcttcaacaagacaactaaaacagcttgatgttagatgggattctgtgacagtttgtatactgacaggtccttccagtctccctccacagtcccacaagcggaagtattctacctgattccagagttcattccaacatgcagtagaatgaggtgaatgaagaaccaagtgtgggttttgttttcacagtgcacttggtcaatctagtttctctgagtagtgggctgtattctaagaaaagctttcacgtagacgtcaaagtctgcaaaagagatgagttagccactttaaaaaacctgctctgctttacaaaagatgcacaccaggcttcctttacaagtgaactccaaggctgcttgtaaagtaccacccttcctgcagactttgtgggtcgtgtcacttggcctaaacaagtggcctaacatatgcatgctcacagctagtagcatccctcatgcgtcctttgtcatactctggaaagaaaaaaactctgctatcttcagagaaaccatctattcatacttaaatatggaagcctttacaaggaactcaaaatacatttcatttcatttgtacaatgagaaaaaagatgaaaaggcaaggttgttattgcagttgacattgtcagccctgccttttggctttatgtaatttaaaatagaaagggggaaggaggacaagacagaagctcaactttagaaaccatggacatcacctccctctttgagaggagctgcttgtgaaccaggctccagtcttcctgtggcctctcacagtaaccctgcccctttcttacctcacaggggcaagagggactctaaagagggcgtaagcaatagaggcacctgcagccctccttcctcagcaggaaatcaatgtggagccccagagggacattttatctcagagagagcatgctggccacaggacccagtgcagccctgcttcccgcaccgtgggtctttcctgatagctgcaggcttgagattgcagcctcaggataggacacgttcagatgccttccagactacacacactatgcttagattcgagagtctttcctgaccttaaaatttgtcccttgcttactttcacactgcagaagatttatatatatattcatcattatttttgcagcagtacaagtggaaacttcaaaaaaatcattccctttcatgtcctggtctttttaagtcttgatatgtaaccattttcataaatgtccaaacagagattgtcattccccttaaaaacagaaacaaaacacaaaactagtgcttgtgaaaacacacagcgcaaagacaattatcctattgcattaaaaaaaaaatcagtctgcctagagacatttcattggctgcattgtcttaattccctaacgaaactgcatcaaaatgtcagttgtaatttagcctctgatcagctgttaaatattatttaaatatttacaggtcctgtggggtatctcccattacccatgtcgccctcaaattacataagcgatcataaaataagaagaaaaaaaaaggtctttagtagatcacagcagagttaccactgataagagtgttggctttgttcagttgtttctaaattaccagccgtcaagcacagtagcccctaaaaccaattttgagcaaggataaattcaactccctcatctgagaaccttgactttccagttgccttgaagtattgggaatagtaactgtacattttcaatttaattatttggtattttatttgactgtcttggccatgtcattttatggaagcatttttaaatagcactttttgttagtggtgtggaatttctgcggttattatttttttttttttttgcaacagatgaagcaaaaaaaaaaaagcactcattggagaaatagtgagtgtaaaaagagatttattttgtacagacagcaaagtatcctgtgtaatgttgctgacataaagcactttgggggaaaaaagtggaaatctgttttccataaatcacacagactcttgtacatagttatatacactcacgtagagaaatgaactgcatatatcatactggatatggggccgattttactctagaggcacatctggtgcttattgtcataaatcttttaaagaattaggtacacttttttctattaatatgtatagttttgtgatttgtcacagttatgtttcatataatcataagttattttgtcttgttcatgaagtcctttttttatgtcaaaagtaaaatgaagggattgtgcacttggtacagaataaaactggaaatagagaagacgccctcctgcctaaaatcctccttcagcctgtcggtttaaaacacaatggcaaccatcattgtttgtttgtttgtttttttgttttgttttaccatcagcctcttacatactgggaatggtaattataattaaaggcagatgatgcgggagggaatgttcaagtccagctttaaaatgctgcattgctttgggccagagctgtagcctggatttaattatagatatgaggaggaaatggcagtaaaaatgaatgtctccctgagtcctttacatgttgggagtgtccataaataaaacatgaagttttatttcatcagatttaattaaagcttttatacatgttt

SEQ ID NO: 8537 - DNA, 4166 bp, Homo sapiens
  source 1..4166: mol_type = unassigned DNA; mol_type = unassigned DNA
gtctccatcagccaagaagatttcatagggctagactcaccaaggtttgtgttacaaaaatgaaagtttgaaggttgcgagaaggccttttcaaggcttgaaaatctcaagatccacttgcggagccacacaggcgagaagccgtatttgtgccagcatccgggttgtcagaaggccttcagtaactccagtgaccgcgccaaacaccagcggacgcatctggacaccaaaccttatgcttgtcaaattccaggatgtaccaaacgctacacagacccaagttccctaagaaagcatgtgaaggcacattcttccaaagagcaacaagcaaggaaaaagttgcggtccagcacagagctccatccagacctgctcacagattgcctcaccgtgcagtccctgcagccggccacttcccctagagatgctgctgctgaagggaccgtgggacgctcccctggacccgggcctgacctctattcagctcccattttctccagcaattattcaagccgaagtggaacagctgctggggccgtaccacccccacatcctgtcagtcacccttctccaggacataatgtacaggggagccctcacaacccctcctcccagttacctccactcacagctgtggacgcaggagctgagaggtttgcaccttctgctccatctcctcaccacatcagcccccggagagttccagctccttcttcaatactgcaaagaacacagcctccctatacccagcagccatcaggttcacacctgaagtcctatcagccagaaacaaactcttcttttcaaccaaatggtatccatgtccatggattttatgggcagctgcagaagttctgtcccccacactaccccgattcccagagaattgtgccgcctgtcagctcctgcagtgtggtgccttcgtttgaggactgcctagtccctacatccatgggccaggccagttttgatgttttccacagagccttctcgactcactcgggcattacagtgtatgatttaccttcaagttcctcgagcctctttggggagtctctccgcagcggggctgaagatgctaccttcttgcagatcagcaccgtggaccgctgtcctagccagctctcctctgtctacaccgaaggctaaaagctctcttggccactcctgcacacccaggaccttgatgttgcttgccaccttttgttttcgtactctcacagactgcttgaggaaggatgtcagcccaatcagcgggccctgcagagttactgatgttctttcagaaggcaggactgaatggcagagctagctttgcaggaatcattacagttgctcctttttctctctggttttcctggactatgtgaccaggaggactgtcttttcaaagggaatttagagcctcactctcctggatacctgttacttcctggctgtcaacccttaaaggaccccagtgaaatgatgtgcatatgaaaatgtagtttggggatgactctacctgaaaactccaaacagggaaaaagacctcaattacgagaggcatagtgacctgcctcacctaatcctcacccttgctgctcctgatgcaaagccaggcacaacaagggaaatccatgtccaaagcatagtgtggtctcaactcttagaaactccctgggtttcccttttctcttagccacatgctaaccagttgcttctcagtgtttctcttcaatagaaaaataaggttttatatgccagcagcctatccttgtttttgcattttaaagacttagttatttatacgtattttaaaatgaaaaaaaaatgtaaaggtctgtgctttggatggaaatcattattattgtaatcaccccagctatagacattttgcacagctgtggttctgcctggccccacctctagcatgttagttttgcagttagcaaaggttacctgagggaaatggagtgggcacctcccgcaccaacagtcctgtagctggaaccttcctgagttgactgtttagtaactccacctcaaagactgtgttcaaagaaaaatgttgtttgactggtttacccattgcctccactctggtgctgcacccagagaagtgccagatgtgagaactgggacagactgagtcatgtgccagcttcccttggaaaaccaaacctagtgatacttgacttccagtgctcagattttactaacgtttttcaggatatccactcatctgtctgtctcttccctacacttctctccaccctctttttgcatccctcttaccctcttcctgactgtggttcatatatccccaccagccgccattgtctgatcatcttgggaaggtagaggtgacagttctcgaaaagtctacagaaagaggcaattctttttctgagttccagtttgaaggcctggaattttcacatagcacttggtcgaaaatatcaagcctaaataggaagtcattttctgtgacacctctacatagctattacagatcctaagtcctagggcatcagctataaaaattggccagtcccaaagacacagtaagttctaacattctggtactatcatatttcaagtattttttctcactttttaaaaatgtttttctgaacaaaagtgaaacaatgccatttatcaaactgagatcattacaatcttcaacaagacaactaaaacagcttgatgttagatgggattctgtgacagtttgtatactgacaggtccttccagtctccctccacagtcccacaagcggaagtattctacctgattccagagttcattccaacatgcagtagaatgaggtgaatgaagaaccaagtgtgggttttgttttcacagtgcacttggtcaatctagtttctctgagtagtgggctgtattctaagaaaagctttcacgtagacgtcaaagtctgcaaaagagatgagttagccactttaaaaaacctgctctgctttacaaaagatgcacaccaggcttcctttacaagtgaactccaaggctgcttgtaaagtaccacccttcctgcagactttgtgggtcgtgtcacttggcctaaacaagtggcctaacatatgcatgctcacagctagtagcatccctcatgcgtcctttgtcatactctggaaagaaaaaaactctgctatcttcagagaaaccatctattcatacttaaatatggaagcctttacaaggaactcaaaatacatttcatttcatttgtacaatgagaaaaaagatgaaaaggcaaggttgttattgcagttgacattgtcagccctgccttttggctttatgtaatttaaaatagaaagggggaaggaggacaagacagaagctcaactttagaaaccatggacatcacctccctctttgagaggagctgcttgtgaaccaggctccagtcttcctgtggcctctcacagtaaccctgcccctttcttacctcacaggggcaagagggactctaaagagggcgtaagcaatagaggcacctgcagccctccttcctcagcaggaaatcaatgtggagccccagagggacattttatctcagagagagcatgctggccacaggacccagtgcagccctgcttcccgcaccgtgggtctttcctgatagctgcaggcttgagattgcagcctcaggataggacacgttcagatgccttccagactacacacactatgcttagattcgagagtctttcctgaccttaaaatttgtcccttgcttactttcacactgcagaagatttatatatatattcatcattatttttgcagcagtacaagtggaaacttcaaaaaaatcattccctttcatgtcctggtctttttaagtcttgatatgtaaccattttcataaatgtccaaacagagattgtcattccccttaaaaacagaaacaaaacacaaaactagtgcttgtgaaaacacacagcgcaaagacaattatcctattgcattaaaaaaaaaatcagtctgcctagagacatttcattggctgcattgtcttaattccctaacgaaactgcatcaaaatgtcagttgtaatttagcctctgatcagctgttaaatattatttaaatatttacaggtcctgtggggtatctcccattacccatgtcgccctcaaattacataagcgatcat

SEQ ID NO: 8538 - DNA, 3961 bp, Homo sapiens
  source 1..3961: mol_type = unassigned DNA; mol_type = unassigned DNA
cgggaccccctgtacgccgtccgcgccgtccagggtcacaccggcgacggaacccgccggcagcaattagccagcatcccggggtcggcccccagaagcattccccggcccaggacgaggatgaacaggacaggcgaggcacaaagtcgcaactgaactttttagaaacattatttgtgtgtgtatgtgtgtagcaggggagaatgagctgatgccgagggtccagccaccccgcctctgcctcctcctccccctgccgccgctgccctcgcagacgcgcgcgcacacacggcacttgggccgggtttccgcgctccgtccccccgtttggatgggggttttcatttccgaaggaggcacagcccgcggagcgctctgaagggctggagccccaagttactcctcgccagcgccggccgcccgctgtcactcgcgctggccggccgggggaagggacccgcacgccgggctttgttgtggaaatcccggttacctggcttataacccacaccatggataacttattggactttgcctgaaaggagtcattagtgacattggatatttgaccgtcttggccacaggtttttcagaatgaatggaagatcatgcagcatgagtctccaccggacatcgggaaccccacaggggcctaggatggtcagtggtcatcacattcctgccatccgagcccactccgggactcctggcccctcgccctgtggcagcacatcgagtcccactatggcaagccttgctaacaacctccatctcaagatgccctcaggaggagggatggctcctcagaacaacgtggctgagagccgcatccatctgcctgccttaagccccaggagacaaatgctcaccaatgggaagccgcgattccaggtcacccaggctggaggcatgtcagggtcacatactttaaagccaaagcagcaggagtttggaagcccttttcctccaaatcctgggaaaggggctcttggctttgggcctcagtgcaagtccattggaaaaggcagctgcaacaatctagtggtcaccagcagtcccatgatggttcagcgactgggactcatttcacctccagcaagccaggtctctacagcatgcaaccagatcagtcctagcttacagagggcaatgaatgcagccaacctgaatatacctccttcagataccaggtcccttatttcgcgtgagtctttggcgtccacgaccttgagtctgacggaaagtcagtcggcctcaagcatgaagcaggagtggtcccagggctacagggccctcccttcgctctccaaccacggctctcagaatggccttgatctaggggatctccttagccttcctcccgggacatccatgtccagcaatagtgtctctaactcattaccatcctacctttttggcacggaaagtagccactctccttaccctagtcctcggcactcatccaccaggtcccactcggcccgctccaagaagagagcgctgtccttgtccccgctgtccgatggcatcgggatagatttcaataccatcatccgcacgtcgcccacgtccttggtggcctacatcaacgggtcgagggcttcgccggccaacctgtccccgcagccggaggtctacgggcatttcctgggcgtgcgcggcagctgcattccccagccgcgcccggtgcccggcagccagaagggcgtgctggtggcccctggaggcctggcgctgccggcctacggcgaggacggggccctggagcacgagcgcatgcaacagctggagcacggcggcctgcagccaggcctggtcaaccacatggtggtgcagcatggcctgccgggccccgacagccagtcggccggcctgttcaagaccgaacgcctggaggagttcccgggcagcaccgtagacctaccccccgcgcctccgctccctcctctgccgccgcccccaggccccccacccccttaccatgcccatgcgcaccttcaccacccggagctcgggccccacgcccagcagctggccttgccccaggccaccctggacgacgacggggagatggacggcatcgggggcaagcattgctgccgctggatcgactgcagcgccctgtacgaccagcaggaggagctcgtgcggcacatcgagaaggtccacatcgaccagcgcaaaggggaggacttcacttgcttctgggccggttgccctcgaagatacaagcccttcaacgcccgctataaactgctgatccacatgagagtccactctggggagaagcccaacaagtgtacgtttgaaggttgcgagaaggccttttcaaggcttgaaaatctcaagatccacttgcggagccacacaggcgagaagccgtatttgtgccagcatccgggttgtcagaaggccttcagtaactccagtgaccgcgccaaacaccagcggacgcatctggacaccaaaccttatgcttgtcaaattccaggatgtaccaaacgctacacagacccaagttccctaagaaagcatgtgaaggcacattcttccaaagagcaacaagcaaggaaaaagttgcggtccagcacagagctccatccagacctgctcacagattgcctcaccgtgcagtccctgcagccggccacttcccctagagatgctgctgctgaagggaccgtgggacgctcccctggacccgggcctgacctctattcagctcccattttctccagcaattattcaagccgaagtggaacagctgctggggccgtaccacccccacatcctgtcagtcacccttctccaggacataatgtacaggggagccctcacaacccctcctcccagttacctccactcacagctgtggacgcaggagctgagaggtttgcaccttctgctccatctcctcaccacatcagcccccggagagttccagctccttcttcaatactgcaaagaacacagcctccctatacccagcagccatcaggttcacacctgaagtcctatcagccagaaacaaactcttcttttcaaccaaatggtatccatgtccatggattttatgggcagctgcagaagttctgtcccccacactaccccgattcccagagaattgtgccgcctgtcagctcctgcagtgtggtgccttcgtttgaggactgcctagtccctacatccatgggccaggccagttttgatgttttccacagagccttctcgactcactcgggcattacagtgtatgatttaccttcaagttcctcgagcctctttggggagtctctccgcagcggggctgaagatgctaccttcttgcagatcagcaccgtggaccgctgtcctagccagctctcctctgtctacaccgaaggctaaaagctctcttggccactcctgcacacccaggaccttgatgttgcttgccaccttttgttttcgtactctcacagactgcttgaggaaggatgtcagcccaatcagcgggccctgcagagttactgatgttctttcagaaggcaggactgaatggcagagctagctttgcaggaatcattacagttgctcctttttctctctggttttcctggactatgtgaccaggaggactgtcttttcaaagggaatttagagcctcactctcctggatacctgttacttcctggctgtcaacccttaaaggaccccagtgaaatgatgtgcatatgaaaatgtagtttggggatgactctacctgaaaactccaaacagggaaaaagacctcaattacgagaggcatagtgacctgcctcacctaatcctcacccttgctgctcctgatgcaaagccaggcacaacaagggaaatccatgtccaaagcatagtgtggtctcaactcttagaaactccctgggtttcccttttctcttagccacatgctaaccagttgcttctcagtgtttctcttcaatag

SEQ ID NO: 8539 - DNA, 1585 bp, Homo sapiens
  source 1..1585: mol_type = unassigned DNA; mol_type = unassigned DNA
ggacgacgacggggagatggacggcatcgggggcaagcattgctgccgctggatcgactgcagcgccctgtacgaccagcaggaggagctcgtgcggcacatcgagaaggtccacatcgaccagcgcaaaggggaggacttcacttgcttctgggccggttgccctcgaagatacaagcccttcaacgcccgctataaactgctgatccacatgagagtccactctggggagaagcccaacaagtgtacgtttgaaggttgcgagaaggccttttcaaggcttgaaaatctcaagatccacttgcggagccacacaggcgagaagccgtatttgtgccagcatccgggttgtcagaaggccttcagtaactccagtgaccgcgccaaacaccagcggacgcatctggacaccaaaccttatgcttgtcaaattccaggatgtaccaaacgctacacagacccaagttccctaagaaagcatgtgaaggcacattcttccaaagagcaacaagcaaggaaaaagttgcggtccagcacagagctccatccagacctgctcacagattgcctcaccgtgcagtccctgcagccggccacttcccctagagatgctgctgctgaagggaccgtgggacgctcccctggacccgggcctgacctctattcagctcccattttctccagcaattattcaagccgaagtggaacagctgctggggccgtaccacccccacatcctgtcagtcacccttctccaggacataatgtacaggggagccctcacaacccctcctcccagttacctccactcacagctgtggacgcaggagctgagaggtttgcaccttctgctccatctcctcaccacatcagcccccggagagttccagctccttcttcaatactgcaaagaacacagcctccctatacccagcagccatcaggttcacacctgaagtcctatcagccagaaacaaactcttcttttcaaccaaatggtatccatgtccatggtaagcaagaagctggcagtcccttgagttttgaaaagtgacattgtgctgttgcttttcatcttagttacctgtcgtggatttcagatgctctgttctacaccaggcttaggctttcatgacttgcctctaaaatttcacacttgataggcatgaaatcctatggtattttcctgactttggcctgatgatggtatgatttatgacacatcgcactggtcagctcaagttgctggttttttcattggccagggctctaacaccagcaatagcatcctgtttctaaacaatagacagcccatggagaaagaaatgacaggagttcttgtgcccaagcatgcctctgctctgctaggtttttgctctcattctcataggtccacatcctctccgtccttcaaggcgcaggtggaatgacacctcctctctgaagcccttcctgatcccccagctgatgtcatctctccaggctctaaactctgattttatatcgcctgtctttctctggtagtatttatgcttcctctaccttgtgttttacttatctgtgaataaaacatactttcactatt

SEQ ID NO: 8540 - DNA, 855 bp, Homo sapiens
  source 1..855: mol_type = unassigned DNA; mol_type = unassigned DNA
tttgaaggttgcgagaaggccttttcaaggcttgaaaatctcaagatccacttgcggagccacacaggcgagaagccgtatttgtgccagcatccgggttgtcagaaggccttcagtaactccagtgaccgcgccaaacaccagcggacgcatctggacaccaaaccttatgcttgtcaaattccaggatgtaccaaacgctacacagacccaagttccctaagaaagcatgtgaaggcacattcttccaaagagcaacaagcaaggaaaaagttgcggtccagcacagagctccatccagacctgctcacagattgcctcaccgtgcagtccctgcagccggccacttcccctagagatgctgctgctgaagggaccgtgggacgctcccctggacccgggcctgacctctattcaggtaaagacagcaaaggcagagccaaccacaactacccttttttaggccttttactctggttaaaaggaatgctcacgtgagaaaaattttcctaagatcgtctgtgttgttctttatcaatgggctgcaaattgctctccaccccttctgattcctgagctgggtgtggcagcagattgttttttctcataaagaaataaaataaaataatgcattacctcttttagttatggacttctgccagaaattcagtgtacccaaccctcgcagttatgttacatttactcacttgatttagactcgaaggaaatgtttcctccttaagcaggtagcaggctgcgtgtggatttcttaatgaaacagttgttgtcatctttatgttttaaaaggaagccccaggtctctaaggaaattttcacatcagcaaaccaacttat

SEQ ID NO: 8541 - DNA, 531 bp, Homo sapiens
  source 1..531: mol_type = unassigned DNA; mol_type = unassigned DNA
actacacagctggcagcctctgccattgcagtaagtatatgcgacagggtaaaaagggttaatgtggtgaggacaaaggactgcagaggcctggctaggagggtccagatgcttaataatactttgtatagaagtttgaaggttgcgagaaggccttttcaaggcttgaaaatctcaagatccacttgcggagccacacaggcgagaagccgtatttgtgccagcatccgggttgtcagaaggccttcagtaactccagtgaccgcgccaaacaccagcggacgcatctggacaccgtttcttctgaaaaatacccagtttttttctggactttctacagcttctttacctgaacccttaaagaatatgtgtttactagtttctgacagtaccaaagattattctcagggaaacataactaaaccttatgcttgtcaaattccaggatgtaccaaacgctacacagacccaagttccctaagaaagcatgtgaaggcacattcttccaaagagcaacaagcaaggaaaaag

SEQ ID NO: 8542 - DNA, 773 bp, Homo sapiens
  source 1..773: mol_type = unassigned DNA; mol_type = unassigned DNA
atctggtataggagcatgtaggaaagaaggattcattgtgacagagggatgtgggcaggcagcaggaggttccacctgagtgagccttgagtaaatggatagattttgactgcaagagtgaagacgggagcattccagtcccaggagatgaaggagcaatgttcttctatcagaagcaaacatattcagaaactccgtgtcctggctcgcttagcaataatagtacacatagcagtgtggtgaagtcaggcaccctcctgctactacaagagaatatgaagtaacgaagatcccccctgccacacacacatttgtgttttggtccccctcaccactcaccctctgaagaagaaggtcattctaagacaccaagtgacattcaggttctgaaggcaagattccatactctggggtgtgaggaattgtgctgttgaactcttcccccaagaagtgctcaggttgaggttaaagggctcctgagggcagaaaggcagatactgtcaaaaaagagagttcctgtgatcccggtgtcatgtggctccccaaacaatttcttgaagacttgtaaatgtggcagtctgcaaaagcagcagcagaagtgacaactgggaaaaattgtgataccgctttctgtgaatccccgaggacagccaacacgaccaaaggatccctgaaggtttgaaggttgcgagaaggccttttcaaggcttgaaaatctcaagatccacttgcggagccacacaggcgagaagccgtatttgtgccagcatccg

SEQ ID NO: 8543 - DNA, 768 bp, Homo sapiens
  source 1..768: mol_type = unassigned DNA; mol_type = unassigned DNA
ggggtcggcccccagaagcattccccggcccaggacgaggatgaacaggacaggcgaggcacaaagtcgcaactgaactttttagaaacattatttgtgtgtgtatgtgtgtagcaggggagaatgagctgatgccgagggtccagccaccccgcctctgcctcctcctccccctgccgccgctgccctcgcagacgcgcgcgcacacacggcacttgggccgggtttccgcgctccgtccccccgtttggatgggggttttcatttccgaaggaggcacagcccgcggagcgctctgaagggctggagccccaagttactcctcgccagcgccggccgcccgctgtcactcgcgctggccggccgggggaagggacccgcacgccgggctttgttgtggaaatcccggttacctggtcccttatttcgcgtgagtctttggcgtccacgaccttgagtctgacggaaagtcagtcggcctcaagcatgaagcaggagtggtcccagggctacagggccctcccttcgctctccaaccacggctctcagaatggccttgatctaggggatctccttagccttcctcccgggacatccatgtccagcaatagtgtctctaactcattaccatcctacctttttggcacggaaagtagccactctccttaccctagtcctcggcactcatccaccaggtcccactcggcccgctccaagaagagagcgctgtccttgtccccgctgtccgatggcatcgggatagatttc

SEQ ID NO: 8544 - DNA, 492 bp, Homo sapiens
  source 1..492: mol_type = unassigned DNA; mol_type = unassigned DNA
actgacctcatccatagtgtggtgtttggtctatgagcagttgattcaccagttttcagagcccaagtctaaaatcacagatcctgtgggggatctgggagcatctgccttacctttatgaaggttatggtcagttaagccttgctttcaatgggctcacttcgctatgggaagaaaattctgcagttgttaaaaacaaaaggacactgccttttccaagggagctgacagctattggtttttccggagaggattactggtgaagacagttatgaagaacaagtaactcttgtaaataaacagcatgttcttgcttaaatatttcccagaacagttctaaagaaatataatacaggtcccttatttcgcgtgagtctttggcgtccacgaccttgagtctgacggaaagtcagtcggcctcaagcatgaagcaggagtggtcccagggctacagggccctcccttcgctctccaaccacggctctcagaatg

SEQ ID NO: 8545 - DNA, 700 bp, Homo sapiens
  source 1..700: mol_type = unassigned DNA; mol_type = unassigned DNA
actgacctcatccatagtgtggtgtttggtctatgagcagttgattcaccagttttcagagcccaagtctaaaatcacagatcctgtgggggatctgggagcatctgccttacctttatgaaggttatggtcagttaagccttgctttcaatgggctcacttcgctatgggaagaaaattctgcagttgttaaaaacaaaaggacactgccttttccaagggagctgacagctattggtttttccggagaggattactggtgaagacagttatgaagaacaagtaactcttgtaaataaacagcatgttcttgcttaaatatttcccagaacagttctaaagaaatataatacaggggctcttggctttgggcctcagtgcaagtccattggaaaaggcagctgcaacaatctagtggtcaccagcagtcccatgatggttcagcgactgggactcatttcacctccagcaagccaggtctctacagcatgcaaccagatcagtcctagcttacagagggcaatgaatgcagccaacctgaatatacctccttcagataccaggtcccttatttcgcgtgagtctttggcgtccacgaccttgagtctgacggaaagtcagtcggcctcaagcatgaagcaggagtggtcccagggctacagggccctcccttcgctctccaaccacggctctcagaatg

SEQ ID NO: 8546 - DNA, 693 bp, Homo sapiens
  source 1..693: mol_type = unassigned DNA; mol_type = unassigned DNA
catttgtcagatgctttcctctctgcactccagcctttgctgaatgtcctggcagttcctgaatgttcctgctgcctgcattttataaaaccaaagagcaagtagccctggaaatgtatgccaagtactctgcacagctgtctgaggcccccagccaagggcaagatataaacaatctatacccacacaggtacacaagcagacactgcatatggaagccccgcagtgcaaggacttcttacttctaacactttaaaatgtcagtggccaaacagcctgagaacatgaataatttaagcatgagatgcttttgctgatgattttgatcatttttcaggaagaataatggggctcttggctttgggcctcagtgcaagtccattggaaaaggcagctgcaacaatctagtggtcaccagcagtcccatgatggttcagcgactgggactcatttcacctccagcaagccaggtctctacagcatgcaaccagatcagtcctagcttacagagggcaatgaatgcagccaacctgaatatacctccttcagataccaggtcccttatttcgcgtgagtctttggcgtccacgaccttgagtctgacggaaagtcagtcggcctcaagcatgaagcaggagtggtcccagggctacagggccctcccttcgctctccaaccacggctctcagaatg

SEQ ID NO: 8547 - DNA, 458 bp, Homo sapiens
  source 1..458: mol_type = unassigned DNA; mol_type = unassigned DNA
agttccaagttactcactggagctgacaagtcacctcggggaccgggaagtcactcaagtgtctggaaatcttggccctggctgatttgtcatcctatggatgattcaattaggggctcttggctttgggcctcagtgcaagtccattggaaaaggcagctgcaacaatctagtggtcaccagcagtcccatgatggttcagcgactgggactcatttcacctccagcaagccaggtctctacagcatgcaaccagatcagtcctagcttacagagggcaatgaatgcagccaacctgaatatacctccttcagataccaggtcccttatttcgcgtgagtctttggcgtccacgaccttgagtctgacggaaagtcagtcggcctcaagcatgaagcaggagtggtcccagggctacagggccctcccttcgctctccaaccacggctctcagaatg

SEQ ID NO: 8548 - DNA, 944 bp, Homo sapiens
  source 1..944: mol_type = unassigned DNA; mol_type = unassigned DNA
agttccaagttactcactggagctgacaagtcacctcggggaccgggaagtcactcaagtgtctggaaatcttggccctggctgatttgtcatcctatggatgattcaattaggcttataacccacaccatggataacttattggactttgcctgaaaggagtcattagtgacattggatatttgaccgtcttggccacaggtttttcagaatgaatggaagatcatgcagcatgagtctccaccggacatcgggaaccccacaggggcctaggatggtcagtggtcatcacattcctgccatccgagcccactccgggactcctggcccctcgccctgtggcagcacatcgagtcccactatggcaagccttgctaacaacctccatctcaagatgccctcaggaggagggatggctcctcagaacaacgtggctgagagccgcatccatctgcctgccttaagccccaggagacaaatgctcaccaatgggaagccgcgattccaggtcacccaggctggaggcatgtcagggtcacatactttaaagccaaagcagcaggagtttggaagcccttttcctccaaatcctgggaaaggggctcttggctttgggcctcagtgcaagtccattggaaaaggcagctgcaacaatctagtggtcaccagcagtcccatgatggttcagcgactgggactcatttcacctccagcaagccaggtctctacagcatgcaaccagatcagtcctagcttacagagggcaatgaatgcagccaacctgaatatacctccttcagataccaggtcccttatttcgcgtgagtctttggcgtccacgaccttgagtctgacggaaagtcagtcggcctcaagcatgaagcaggagtggtcccagggctacagggccctcccttcgctctccaaccacggctctcagaatg

SEQ ID NO: 8549 - DNA, 797 bp, Homo sapiens
  source 1..797: mol_type = unassigned DNA; mol_type = unassigned DNA
cccgtttggatgggggttttcatttccgaaggaggcacagcccgcggagcgctctgaagggctggagccccaagttactcctcgccagcgccggccgcccgctgtcactcgcgctggccggccgggggaagggacccgcacgccgggctttgttgtggaaatcccggttacctggcttataacccacaccatggataacttattggactttgcctgaaaggagtcattagtgacattggatatttgaccgtcttggccacaggtttttcagaatgaatggaagatcatgcagcatgagtctccaccggacatcgggaaccccacaggggcctaggatggtcagtggtcatcacattcctgccatccgagcccactccgggactcctggcccctcgccctgtggcagcacatcgagtcccactatggcaagccttgctaacaacctccatctcaagatgccctcaggaggagggatggctcctcagaacaacgtggctgagagccgcatccatctgcctgccttaagccccaggagacaaatgctcaccaatgggaagccgcgattccaggtcacccaggctggaggcatgtcagggtcacatactttaaagccaaagcagcaggagtttggaagcccttttcctccaaatcctgggaaaggtcccttatttcgcgtgagtctttggcgtccacgaccttgagtctgacggaaagtcagtcggcctcaagcatgaagcaggagtggtcccagggctacagggccctcccttcgctctccaaccacggctctcagaatg

SEQ ID NO: 8550 - DNA, 1327 bp, Homo sapiens
  source 1..1327: mol_type = unassigned DNA; mol_type = unassigned DNA
cgggaccccctgtacgccgtccgcgccgtccagggtcacaccggcgacggaacccgccggcagcaattagccagcatcccggggtcggcccccagaagcattccccggcccaggacgaggatgaacaggacaggcgaggcacaaagtcgcaactgaactttttagaaacattatttgtgtgtgtatgtgtgtagcaggggagaatgagctgatgccgagggtccagccaccccgcctctgcctcctcctccccctgccgccgctgccctcgcagacgcgcgcgcacacacggcacttgggccgggtttccgcgctccgtccccccgtttggatgggggttttcatttccgaaggaggcacagcccgcggagcgctctgaagggctggagccccaagttactcctcgccagcgccggccgcccgctgtcactcgcgctggccggccgggggaagggacccgcacgccgggctttgttgtggaaatcccggttacctggcttataacccacaccatggataacttattggactttgcctgaaaggagtcattagtgacattggatatttgaccgtcttggccacaggtttttcagaatgaatggaagatcatgcagcatgagtctccaccggacatcgggaaccccacaggggcctaggatggtcagtggtcatcacattcctgccatccgagcccactccgggactcctggcccctcgccctgtggcagcacatcgagtcccactatggcaagccttgctaacaacctccatctcaagatgccctcaggaggagggatggctcctcagaacaacgtggctgagagccgcatccatctgcctgccttaagccccaggagacaaatgctcaccaatgggaagccgcgattccaggtcacccaggctggaggcatgtcagggtcacatactttaaagccaaagcagcaggagtttggaagcccttttcctccaaatcctgggaaaggggctcttggctttgggcctcagtgcaagtccattggaaaaggcagctgcaacaatctagtggtcaccagcagtcccatgatggttcagcgactgggactcatttcacctccagcaagccaggtctctacagcatgcaaccagatcagtcctagcttacagagggcaatgaatgcagccaacctgaatatacctccttcagataccaggtcccttatttcgcgtgagtctttggcgtccacgaccttgagtctgacggaaagtcagtcggcctcaagcatgaagcaggagtggtcccagggctacagggccctcccttcgctctccaaccacggctctcagaatg

SEQ ID NO: 8551 - DNA, 1481 bp, Homo sapiens
  source 1..1481: mol_type = unassigned DNA; mol_type = unassigned DNA
cgggaccccctgtacgccgtccgcgccgtccagggtcacaccggcgacggaacccgccggcagcaattagccagcatcccggggtcggcccccagaagcattccccggcccaggacgaggatgaacaggacaggcgaggcacaaagtcgcaactgaactttttagaaacattatttgtgtgtgtatgtgtgtagcaggggagaatgagctgatgccgagggtccagccaccccgcctctgcctcctcctccccctgccgccgctgccctcgcagacgcgcgcgcacacacggcacttgggccgggtttccgcgctccgtccccccgtttggatgggggttttcatttccgaaggaggcacagcccgcggagcgctctgaagggctggagccccaagttactcctcgccagcgccggccgcccgctgtcactcgcgctggccggccgggggaagggacccgcacgccgggctttgttgtggaaatcccggttacctggcttataacccacaccatggataacttattggactttgcctgaaaggagtcattagtgacattggatatttgaccgtcttggccacaggtttttcagaatgaatggaagatcatgcagcatgagtctccaccggacatcgggaaccccacaggggcctaggatggtcagtggtcatcacattcctgccatccgagcccactccgggactcctggcccctcgccctgtggcagcacatcgagtcccactatggcaagccttgctaacaacctccatctcaagatgccctcaggaggagggatggctcctcagaacaacgtggctgagagccgcatccatctgcctgccttaagccccaggagacaaatgctcaccaatgggaagccgcgattccaggtcacccaggctggaggcatgtcagggtcacatactttaaagccaaagcagcaggagtttggaagcccttttcctccaaatcctgggaaaggtaggattgtctttctggaaccttttaaaaatggaaacgatttttttctcccccatcccattttctgccagcaaatcctatggaaaaatacatgattcagtgtcagggtcaaagatgatggtctcataatgatatatagcttgctcagtaagggaatgggtgtgtatgtgttggaggggaccacagtggtaaatgctgagtatgagacatctcctgggactgtgaaacagagtaacagtaagatagaaagataaaaaatagggaggcaggctgagtggttgtggtggaagggtaagagctaggttagcaagatcatgccctccggatacaggtagcgctgccctgtttccctgggggctgaattctccaggccatggacaagaagaccgactggaactgtccttatgccagtgctaaaagtatagtgtagaagaaaggtggtgtttggaaggaaaagaataaaaaagggaaattttaataaccaataaaatgaggaatc

SEQ ID NO: 8552 - DNA, 1569 bp, Homo sapiens
  source 1..1569: mol_type = unassigned DNA; mol_type = unassigned DNA
ggaggtgatggctggagttccaacaggcacttggatcgtgagataacctcagaaagctgtttcccgagggtgctgaactggcaggaaagaaaccttggtcctcgatgatattgtgaagacaccatattagcatggatggcctatttctgaatttctttcaggcctgcttctctttaccttctgccatgagtggaagtggcctgaggccctcacctgaagccaagcagatgacagcaccaggcttcttgtatagcctgcagaaccgtttgcaaatgaaattcaaaaaatcggcagtgactcttcttggaccaggtggagagcaggaagaaggccggcagcaggtgtggctcgggcagattggagaggcacaatggggcacgtttgctagacaaatagagagacaggcacaaagagcttaagtgactaccctaaagttgctcagctattaaatgtggagccaggactaaatcccagcagtttggctctggggtctgggttctaaaattgtctcaattcagcctctccagctgccaagtgtgagacctagacaagggctttgagtttgactgtaggagccatcccaggcttataacccacaccatggataacttattggactttgcctgaaaggagtcattagtgacattggatatttgaccgtcttggccacaggtttttcagaatgaatggaagatcatgcagcatgagtctccaccggacatcgggaaccccacaggggcctaggatggtcagtggtcatcacattcctgccatccgagcccactccgggactcctggcccctcgccctgtggcagcacatcgagtcccactatggcaagccttgctaacaacctccatctcaagatgccctcaggaggagggatggctcctcagaacaacgtggctgagagccgcatccatctgcctgccttaagccccaggagacaaatgctcaccaatgggaagccgcgattccaggtcacccaggctggaggcatgtcagggtcacatactttaaagccaaagcagcaggagtttggaagcccttttcctccaaatcctgggaaaggtaggattgtctttctggaaccttttaaaaatggaaacgatttttttctcccccatcccattttctgccagcaaatcctatggaaaaatacatgattcagtgtcagggtcaaagatgatggtctcataatgatatatagcttgctcagtaagggaatgggtgtgtatgtgttggaggggaccacagtggtaaatgctgagtatgagacatctcctgggactgtgaaacagagtaacagtaagatagaaagataaaaaatagggaggcaggctgagtggttgtggtggaagggtaagagctaggttagcaagatcatgccctccggatacaggtagcgctgccctgtttccctgggggctgaattctccaggccatggacaagaagaccgactggaactgtccttatgccagtgctaaaagtatagtgtagaagaaaggtggtgtttggaaggaaaagaataaaaaagggaaattttaataaccaataaaatgaggaatc

SEQ ID NO: 8553 - DNA, 1882 bp, Homo sapiens
  source 1..1882: mol_type = unassigned DNA; mol_type = unassigned DNA
tgctgccacaccagatccagaggcacagagccggggcacgttcctgtcaagggtgctggccctgccattctccccaggaggttacaggatccctccttgaggaaacgactcggaagtgggctcagtacaaacaggcatgtctgagagacttactcaaggaaccttctggcatattttgtaacgggacatttgatcagtacgtgtgttggcctcattcttctcctggaaatgtctctgtaccctgcccttcatacttaccttggtggagtgaagagagctcaggaagggcctacagacactgcttggctcaggggacttggcagacgatagagaacgccacggatatttggcaggatgactccgaatgctccgagaaccacagcttcaagcaaaacgtggatcgttatgccttgctgtcaaccttgcagctgatgtacaccgtgggatactccttctctcttatctccctcttcctggctctcaccctcctcttgtttcttcgaaaactccactgcacgcgcaactacatccacatgaacttgtttgcttctttcatcctgagaaccctggctgtactggtgaaggacgtcgtcttctacaactcttactccaagaggcctgacaatgagaatgggtggatgtcctacctgtcagagatgtccacctcctgccgctcagtccaggttctcttgcattactttgtgggtgccaattacttatggctgctggttgaaggcctctacctccacacgctgctggagcccacagtgcttcctgagaggcggctgtggcccagatacctgctgttgggttgggccttccctgtgctatttgttgtaccctggggtttcgcccgtgcacacctggagaacacagggtgctggacaacaaatgggaataagaaaatctggtggatcatccgaggacccatgatgctctgtgtaacagtcaatttcttcatcttcctgaaaattctcaagcttctcatttctaagctcaaagctcatcaaatgtgcttcagagattataaatacagattggcaaaatcaacactggtcctcattcctttattgggcgttcatgagatcctcttctctttcatcactgatgatcaagttgaaggatttgcaaaacttatacgacttttcattcagttgacactgagctcctttcatgggttcctggtggccttgcagtatggttttgccaatggagaggtgaaggctgagctgcggaaatactgggtccgcttcttgctagcccgccactcaggctgcagagcctgtgtcctggggaaggacttccggttcctaggaaaatgtcccaagaagctctcggaaggagatggcgctgagaagcttcggaagctgcagccctcacttaacagtgggcggctcctacatctagccatgcgaggtcttggggagctgggcgcccagccccaacaggaccatgcacgctggccccggggcagcagcctgtccgagtgcagtgagggggatgtcaccatggccaacaccatggaggagattctggaagagagtgagatctagggtggagttccaccaccctggctctgctcccagggactcttgagggggcccaggaagaggaagcaaagcaggacacacgttgctgggcacggaatcattctcgttccattcaccatgccactttgatatgaaagctatcacaaggttcttcaagctctgtatgaaagaggctgtgtgtcatgctcacagcctctgcctgctcttctcatcctaataacccccaccagtgtgttttccacaatgcccaccagaccctagggcctggctctaaattcaagccaatgaagtcccaccatgaagagaggtctcctgttatagagaagccagcc

SEQ ID NO: 8554 - DNA, 4572 bp, Homo sapiens
  source 1..4572: mol_type = unassigned DNA; mol_type = unassigned DNA
gaggagattttgcctttgtggttagcctcagcccagcctggacaagcttaatgccttagaaagaaataccctgcctcaaaaagacacctgcctctaaactggctcgagccccatcgccttctgccagccattcctctgtagctcgaaccccagcctgtctcagccagcttcgtgcattgagcagaaccttcagggtggagcccgctgaccgccttgttctttctcctcagcctgtcaaggaagtcccagaaagcacagctgacttagggaaggtctgggaaaaatctccctgcttttgggggggcaggggcgggggatgagccagggccgagaaggaactctgaagactccgtagattgctctagaccgcctcagacactctcggcgcagcgtggagaggatttgtgcaaacatttcctctgtggaccaagaggaatgcaagaggaggctgcctgcggtgcatcttggacggctagagagatgtacccctacttgtgaaggtgcacgaggaagatgaagctgggatcgagcagggcagggcctgggagaggaagcgcgggactcctgcctggcgtccacgagctgcccatgggcatccctgccccctgggggaccagtcctctctccttccacaggaagtgctctctctgggcccctgggaggcccttcctcactctggtcctgctggtttccatcaagcaagttacaggatccctccttgaggaaacgactcggaagtgggctcagtacaaacaggcatgtctgagagacttactcaaggaaccttctggcatattttgtaacgggacatttgatcagtacgtgtgttggcctcattcttctcctggaaatgtctctgtaccctgcccttcatacttaccttggtggagtgaagagagctcaggaagggcctacagacactgcttggctcaggggacttggcagacgatagagaacgccacggatatttggcaggatgactccgaatgctccgagaaccacagcttcaagcaaaacgtggatcgttatgccttgctgtcaaccttgcagctgatgtacaccgtgggatactccttctctcttatctccctcttcctggctctcaccctcctcttgtttcttcgaaaactccactgcacgcgcaactacatccacatgaacttgtttgcttctttcatcctgagaaccctggctgtactggtgaaggacgtcgtcttctacaactcttactccaagaggcctgacaatgagaatgggtggatgtcctacctgtcagagatgtccacctcctgccgctcagtccaggttctcttgcattactttgtgggtgccaattacttatggctgctggttgaaggcctctacctccacacgctgctggagcccacagtgcttcctgagaggcggctgtggcccagatacctgctgttgggttgggccttccctgtgctatttgttgtaccctggggtttcgcccgtgcacacctggagaacacagggtgctggacaacaaatgggaataagaaaatctggtggatcatccgaggacccatgatgctctgtgtaacagtcaatttcttcatcttcctgaaaattctcaagcttctcatttctaagctcaaagctcatcaaatgtgcttcagagattataaatacagattggcaaaatcaacactggtcctcattcctttattgggcgttcatgagatcctcttctctttcatcactgatgatcaagttgaaggatttgcaaaacttatacgacttttcattcagttgacactgagctcctttcatgggttcctggtggccttgcagtatggttttgccaatggagaggtgaaggctgagctgcggaaatactgggtccgcttcttgctagcccgccactcaggctgcagagcctgtgtcctggggaaggacttccggttcctaggaaaatgtcccaagaagctctcggaaggagatggcgctgagaagcttcggaagctgcagccctcacttaacagtgggcggctcctacatctagccatgcgaggtcttggggagctgggcgcccagccccaacaggaccatgcacgctggccccggggcagcagcctgtccgagtgcagtgagggggatgtcaccatggccaacaccatggaggagattctggaagagagtgagatctagggtggagttccaccaccctggctctgctcccagggactcttgagggggcccaggaagaggaagcaaagcaggacacacgttgctgggcacggaatcattctcgttccattcaccatgccactttgatatgaaagctatcacaaggttcttcaagctctgtatgaaagaggctgtgtgtcatgctcacagcctctgcctgctcttctcatcctaataacccccaccagtgtgttttccacaatgcccaccagaccctagggcctggctctaaattcaagccaatgaagtcccaccatgaagagaggtctcctgttatagagaagccagccaatatctcttcctttatcccttggggtgcatgctttccatctgaggttgggtttagggtgcgtgaaaacctcctaggaagcttttaaaatgcagaatcctagacttgtggctaagattctaagacagtgagtctgggaccatggccaggaattggagctgtttaataagcatcccaggtaattctgctgcaagcccacccttggagaacactgggcagggtgagagggagctagaagcgcccccatgtggccatggcaggatgctgcaagagacagtctgctctcccaggtcagctggggtgtgcctgccctccttggagagtatgtaactccacccaccagagtgccactcctctctgctcttcctctcctatcaagtcttgcctctctctctctttgcctcagttctctgtccctgcacagcaggagttctgcttgatcctccctttgaggattggccccagtgcctggggaccctctgaatgtcgtctttggtctgttcctctcctttctggctctatctacctttctgagtttggcttctaccagcctgatttacactaccattctcttggggcaaggaatgtccccaccatttttggtttgccattgatgcattgattgtcacacctgttgtcccaggaagttgacctataactctccatggccagagtccctgctgatcagaattcaatttgcccagtgggaataaatactgaaagcaggagggcccaggtaaagcaataggagtttggctggatctggacatgcccagggtggctctgagagatccaagactttgcatccaccagcctgtgggatctttcctgcctactgtgacccatggaggctgaggagggcccaggcagttggggtcaggctcaatgactgaaagtatagggcaagaggctgtaggaagatcaagggatggacatcctttggaaacagtgtgttaatgcacaggagtgtcactttcatggtatgtaaaatgcatgtgtacgtgggtggggtatgttgctatgggactaaataccaccttgtcttcgggggagtcagtttgatactcctcaagcagggctgccatatttagcaaacaaaaacaaggtactcaattaaatttgaatttcagacaaatagtcttcttgtataagtatatcccatgggcatatttaatctgagattggaattcaatcatgcatcttgtcttttactggcatctctgttttcaaggatactttgccacagggctgggactagggtgaaataatcaaggcactcatctctaaaaagctcaaagtaaatgatcaaaataaatcatattttaatgcaatattctaaaaaaacaaattaacaaactacagcccatgagccatttatagaaatgaaatttgattggagccaggggcaggataagggtgaggcaggagaggccagctcttgcaagtgcaggctctggtcctgactttcaaatgttgtctatgagggacttttaatgtgaatttttatttttagacaattgcattaaaatgttatttatattgactatggggacttttggggcccccttaaattttgcacttgaaatgggatccccacttgtgtcaccccatagtccagccctggttttaggatggggatggaggcaaaggcatcaggcaagtaatgaagcaaaggtttattttttggtgtccagattatccatagctcagtcatgaaaatctatgtctttctatttttctcctttctgcaaatgtccctgcctcggctcatcagccaattagctcctagaaagctggggtcatctcgtattcccagcaagtacccagcacagtgccggttcagagcaggtgctccacacacattcctggaatgagacagcacagaaatggctctcgggagcctcggatgctgctgggagtaagtgatccaggaccttaccgctaagaggagaaactttttttcaaagcatttataaatactccctccacccctcactccacaaatggggtgatcaacacttactgcttgctcttgttctgctaatgattaaaacaagtttatttaattt

SEQ ID NO: 8555 - DNA, 2606 bp, Homo sapiens
  source 1..2606: mol_type = unassigned DNA; mol_type = unassigned DNA
agattgctctagaccgcctcagacactctcggcgcagcgtggagaggatttgtgcaaacatttcctctgtggaccaagaggaatgcaagaggaggctgcctgcggtgcatcttggacggctagagagatgtacccctacttgtgaaggtgcacgaggaagatgaagctgggatcgagcagggcagggcctgggagaggaagcgcgggactcctgcctggcgtccacgagctgcccatgggcatccctgccccctgggggaccagtcctctctccttccacaggaagtgctctctctgggcccctgggaggcccttcctcactctggtcctgctggtttccatcaagcaagttacaggatccctccttgaggaaacgactcggaagtgggctcagtacaaacaggcatgtctgagagacttactcaaggaaccttctggctgactcttcgggtgcagccacgtgcaccatgcccacctccaaaagaaaaaaagaagaaagtaccttggcccgttgcctctgagcctactgaggacaatccccggctccggctgctttcagatcattttattcagaggccttgagattgacaggacactgtgaactctccctgtctttcttcacccaaaggcagtcccaggcttcaagcccttcccagctccctttgaagacctcatgggcccaggcatattttgtaacgggacatttgatcagtacgtgtgttggcctcattcttctcctggaaatgtctctgtaccctgcccttcatacttaccttggtggagtgaagagagctcaggaagggcctacagacactgcttggctcaggggacttggcagacgatagagaacgccacggatatttggcaggatgactccgaatgctccgagaaccacagcttcaagcaaaacgtggatcgttatgccttgctgtcaaccttgcagctgatgtacaccgtgggatactccttctctcttatctccctcttcctggctctcaccctcctcttgtttcttcgaaaactccactgcacgcgcaactacatccacatgaacttgtttgcttctttcatcctgagaaccctggctgtactggtgaaggacgtcgtcttctacaactcttactccaagaggcctgacaatgagaatgggtggatgtcctacctgtcagagatgtccacctcctgccgctcagtccaggttctcttgcattactttgtgggtgccaattacttatggctgctggttgaaggcctctacctccacacgctgctggagcccacagtgcttcctgagaggcggctgtggcccagatacctgctgttgggttgggccttccctgtgctatttgttgtaccctggggtttcgcccgtgcacacctggagaacacagggtgctggacaacaaatgggaataagaaaatctggtggatcatccgaggacccatgatgctctgtgtaacagcacttggactagaggaaacgggcttgaagagaaatgggagcattccctttggtcacaaggaagacatttaaccatgaacttgtaaaacactgacatataccccagagaaaggcattagatcttcatgtctatcagtttacaagaagataatctgtcctgaacaataaggagctaaacctgctgccctcccaatctgcacagctctaggattctaggactctgtgcattggttctagggctccccagagagtggaatttatgtgtcccaccagacatggaagggaaaagaaaggccatgcagaaagaagtgaaagaggcaggctaggagtcaggagcctgggctctatgactgacttgtgatgtgtccttcagccaggtgagttggcctctctgggcctctgtttcttcatctatgaaatcagtcttgaactagaccagtggttttcaaccagaggagattctgacccctggggacatttggctgtgtctggagacatttttaattgtcataaattggggatggggataggaggagaatgttgctactggcatctagtgggtggaggtcagggatgctgctcaacaccctacaacacacagaaccacccccagaataaataattatcctgccccaaatattaagagtgccaacattgaaaaaccctggactagacagtagctgcacattaaaacaacctggggaggattaaaaaaatacccagcccagacttacccagactgatggaatcaaatctcctgccatgtagagcttccttagcactggaatctcattcagccactctcttgtatcttcctttagcattcattgagcaccttcactgggcttggcttggtgctaggttatttcagagtttctatcctcagggaattcagaatttaatagttatcattctgagactcatcagactatgactgaaccaatatctgccttcatttttggtcatatgaccacatgttgcaattttccactgatctgaatagacataaccccaactctaaaagagaattccttaaaccacaacgtggaaggaacctggattcctgaatgactgtatggagcagaactccctccactgcactagactgtgacataaccaataaaataaaataagataaaataaa

SEQ ID NO: 8556 - DNA, 523 bp, Homo sapiens
  source 1..523: mol_type = unassigned DNA; mol_type = unassigned DNA
ttactttcagagagctcaggaagggcctacagacactgcttggctcaggggacttggcagacgatagagaacgccacggatatttggcaggatgactccgaatgctccgagaaccacagcttcaagcaaaacgtggatcgttatgccttgctgtcaaccttgcagctgatgtacaccgtgggatactccttctctcttatctccctcttcctggctctcaccctcctcttgtttcttcgaaaactccactgcacgcgcaactacatccacatgaacttgtttgcttctttcatcctgagaaccctggctgtactggtgaaggacgtcgtcttctacaactcttactccaagaggcctgacaatgagaatgggtggatgtcctacctgtcagagatgtccacctcctgccgctcagtccaggttctcttgcattactttgtgggtgccaattacttatggctgctggttgaaggcctctacctccacacgctgctggagcccacagtgcttcctgagaggcggc

SEQ ID NO: 8557 - DNA, 1803 bp, Homo sapiens
  source 1..1803: mol_type = unassigned DNA; mol_type = unassigned DNA
gggagccaacagacacgctggagtttaacaaacagcaatactcttcgcgctcctgaaaagcaggtctggacgctctccgtggtgctgaaacgcctcgcagccgccgctgtccgtggtatctacgaccccctcgctccaatttcccctggggctctccctccgcgcccctgttccccgcctccctttaacatctggattattttttgcaatagcgctttctggttttgtaagtgccaatttgaaacatttttgcccccataactcgtggactacaaagcacaaggacctgaaaaatgtacagcttcaatactcttcgactctacctttgggagaccattgtattcttcagccttgctgcttctaaggaggctgaagctgctcgctccgcacccaagcctatgtcaccctcggatttcctggataagctaatggggagaacctccggatatgatgccaggatcaggcccaattttaaaggtcccccagtgaacgtgagctgcaacattttcatcaacagctttggttccattgctgagacaaccatggactatagggtcaacatcttcctgcggcagcaatggaacgacccccgcctggcctataatgaataccctgacgactctctggacctggacccatccatgctggactccatctggaaacctgacctgttctttgccaacgagaagggggcccacttccatgagatcaccacagacaacaaattgctaaggatctcccggaatgggaatgtcctctacagcatcagaatcaccctgacactggcctgccccatggacttgaagaatttccccatggatgtccagacatgtatcatgcaactggaaagctttggatatacgatgaatgacctcatctttgagtggcaggaacagggagccgtgcaggtagcagatggactaactctgccccagtttatcttgaaggaagagaaggacttgagatactgcaccaagcactacaacacaggtaaattcacctgcattgaggcccggttccacctggagcggcagatgggttactacctgattcagatgtatattcccagcctgctcattgtcatcctctcatggatctccttctggatcaacatggatgctgcacctgctcgtgtgggcctaggcatcaccactgtgctcaccatgaccacccagagctccggctctcgagcatctctgcccaaggtgtcctatgtgaaagccattgacatttggatggcagtttgcctgctctttgtgttctcagccctattagaatatgctgccgttaactttgtgtctcggcaacataaggagctgctccgattcaggaggaagcggagacatcacaaggaggatgaagctggagaaggccgctttaacttctctgcctatgggatgggcccagcctgtctacaggccaaggatggcatctcagtcaagggcgccaacaacagtaacaccaccaacccccctcctgcaccatctaagtccccagaggagatgcgaaaactcttcatccagagggccaagaagatcgacaaaatatcccgcattggcttccccatggccttcctcattttcaacatgttctactggatcatctacaagattgtccgtagagaggacgtccacaaccagtgaagggtctgaaaggttgggggaggctgggagaggggaacgtgggaatagcacaggaatctgagagactaaggaagagaaggggaacggagggagggggcacacttacacaactctctctgcaatatgtgcaatagcaaaatgcagtgatgcatgaatttta

SEQ ID NO: 8558 - DNA, 1555 bp, Homo sapiens
  source 1..1555: mol_type = unassigned DNA; mol_type = unassigned DNA
caacagacacgctggagtttaacaaacagcaatactcttcgcgctcctgaaaagcaggtctggacgctctccgtggtgctgaaacgcctcgcagccgccgctgtccgtggtatctacgaccccctcgctccaatttcccctggggctctccctccgcgcccctgttccccgcctccctttaacatctggattattttttgcaatagcgctttctggttttgtaagtgccaatttgaaacatttttgcccccataactcgtggactacaaagcacaaggacctgaaaaatgtacagcttcaatactcttcgactctacctttgggagaccattgtattcttcaggtcccccagtgaacgtgagctgcaacattttcatcaacagctttggttccattgctgagacaaccatggactatagggtcaacatcttcctgcggcagcaatggaacgacccccgcctggcctataatgaataccctgacgactctctggacctggacccatccatgctggactccatctggaaacctgacctgttctttgccaacgagaagggggcccacttccatgagatcaccacagacaacaaattgctaaggatctcccggaatgggaatgtcctctacagcatcagaatcaccctgacactggcctgccccatggacttgaagaatttccccatggatgtccagacatgtatcatgcaactggaaagctttggatatacgatgaatgacctcatctttgagtggcaggaacagggagccgtgcaggtagcagatggactaactctgccccagtttatcttgaaggaagagaaggacttgagatactgcaccaagcactacaacacaggtaaattcacctgcattgaggcccggttccacctggagcggcagatgggttactacctgattcagatgtatattcccagcctgctcattgtcatcctctcatggatctccttctggatcaacatggatgctgcacctgctcgtgtgggcctaggcatcaccactgtgctcaccatgaccacccagagctccggctctcgagcatctctgcccaaggtgtcctatgtgaaagccattgacatttggatggcagtttgcctgctctttgtgttctcagccctattagaatatgctgccgttaactttgtgtctcggcaacataaggagctgctccgattcaggaggaagcggagacatcacaaggaggatgaagctggagaaggccgctttaacttctctgcctatgggatgggcccagcctgtctacaggccaaggatggcatctcagtcaagggcgccaacaacagtaacaccaccaacccccctcctgcaccatctaagtccccagaggagatgcgaaaactcttcatccagagggccaagaagatcgacaaaatatcccgcattggcttccccatggccttcctcattttcaacatgttctactggatcatctacaagattgtccgtagagaggacgtccacaaccagtgaagggtctgaaaggttgggggaggctgggagaggggaacgtgggaat

SEQ ID NO: 8559 - DNA, 1707 bp, Homo sapiens
  source 1..1707: mol_type = unassigned DNA; mol_type = unassigned DNA
caacagacacgctggagtttaacaaacagcaatactcttcgcgctcctgaaaagcaggtctggacgctctccgtggtgctgaaacgcctcgcagccgccgctgtccgtggtatctacgaccccctcgctccaatttcccctggggctctccctccgcgcccctgttccccgcctccctttaacatctggattattttttgcaatagcgctttctggttttgtaagtgccaatttgaaacatttttgcccccataactcgtggactacaaagcacaaggacctgaaaaatgtacagcttcaatactcttcgactctacctttgggagaccattgtattcttcagccttgctgcttctaaggaggctgaagctgctcgctccgcacccaagcctatgtcaccctcggatttcctggataagctaatggggagaacctccggatatgatgccaggatcaggcccaattttaaaggtcccccagtgaacgtgagctgcaacattttcatcaacagctttggttccattgctgagacaaccatggactatagggtcaacatcttcctgcggcagcaatggaacgacccccgcctggcctataatgaataccctgacgactctctggacctggacccatccatgctggactccatctggaaacctgacctgttctttgccaacgagaagggggcccacttccatgagatcaccacagacaacaaattgctaaggatctcccggaatgggaatgtcctctacagcatcagaatcaccctgacactggcctgccccatggacttgaagaatttccccatggatgtccagacatgtatcatgcaactggaaagctttggatatacgatgaatgacctcatctttgagtggcaggaacagggagccgtgcaggtagcagatggactaactctgccccagtttatcttgaaggaagagaaggacttgagatactgcaccaagcactacaacacaggtaaattcacctgcattgaggcccggttccacctggagcggcagatgggttactacctgattcagatgtatattcccagcctgctcattgtcatcctctcatggatctccttctggatcaacatggatgctgcacctgctcgtgtgggcctaggcatcaccactgtgctcaccatgaccacccagagctccggctctcgagcatctctgcccaaggtgtcctatgtgaaagccattgacatttggatggcagtttgcctgctctttgtgttctcagccctattagaatatgctgccgttaactttgtgtctcggcaacataaggagctgctccgattcaggaggaagcggagacatcacaagagccccatgttgaatctattccaggaggatgaagctggagaaggccgctttaacttctctgcctatgggatgggcccagcctgtctacaggccaaggatggcatctcagtcaagggcgccaacaacagtaacaccaccaacccccctcctgcaccatctaagtccccagaggagatgcgaaaactcttcatccagagggccaagaagatcgacaaaatatcccgcattggcttccccatggccttcctcattttcaacatgttctactggatcatctacaagattgtccgtagagaggacgtccacaaccagtgaagggtctgaaaggttgggggaggctgggagaggggaacgtgggaat

SEQ ID NO: 8560 - DNA, 1802 bp, Homo sapiens
  source 1..1802: mol_type = unassigned DNA; mol_type = unassigned DNA
agacacgctggagtttaacaaacagcaatactcttcgcgctcctgaaaagcaggtctggacgctctccgtggtgctgaaacgcctcgcagccgccgctgtccgtggtatctacgaccccctcgctccaatttcccctggggctctccctccgcgcccctgttccccgcctccctttaacatctggattattttttgcaatagcgctttctggttttgtaagtgccaatttgaaacatttttgcccccataactcgtggactacaaagcacaaggacctgaaaaatgtacagcttcaatactcttcgactctacctttgggagaccattgtattcttcagccttgctgcttctaaggaggctgaagctgctcgctccgcacccaagcctatgtcaccctcggatttcctggataagctaatggggagaacctccggatatgatgccaggatcaggcccaattttaaaggtcccccagtgaacgtgagctgcaacattttcatcaacagctttggttccattgctgagacaaccatggactatagggtcaacatcttcctgcggcagcaatggaacgacccccgcctggcctataatgaataccctgacgactctctggacctggacccatccatgctggactccatctggaaacctgacctgttctttgccaacgagaagggggcccacttccatgagatcaccacagacaacaaattgctaaggatctcccggaatgggaatgtcctctacagcatcagaatcaccctgacactggcctgccccatggacttgaagaatttccccatggatgtccagacatgtatcatgcaactggaaagctttggatatacgatgaatgacctcatctttgagtggcaggaacagggagccgtgcaggtagcagatggactaactctgccccagtttatcttgaaggaagagaaggacttgagatactgcaccaagcactacaacacaggtaaattcacctgcattgaggcccggttccacctggagcggcagatgggttactacctgattcagatgtatattcccagcctgctcattgtcatcctctcatggatctccttctggatcaacatggatgctgcacctgctcgtgtgggcctaggcatcaccactgtgctcaccatgaccacccagagctccggctctcgagcatctctgcccaagggtccggtttgaaattcccactgggcaggcatgacctcagcattagtacccaccatcttggctccagcatacaagcaggcctggtaatgggcctccacgatgtccctgccatgggctttgcctgctcccacactgcagtaatatggaccctggggtcctgggaagccattggaaggccaaccaaagtggtacccatctgtccccatgagggtatattcctgctccatgccaaaccagggtgctggttgctcaccatgtccattatccacttacaagtgtgcctcaaattggtcactgcaggctttcggttgtactcgaaaacttcacagaacaccagcttgtagggtccttactgaaggtatcccaaaacatggcaggaggcatgaaatgcatgtcactgttggagccttcagactgtaaaatactagagccatcaaaattctaggctaggcatggtggctcatgcctgtaatcccaggactctgggaggccaaggcagttggatcacctgaggtcaggagttggagaccagcctggccaacatagtgaaaccacgtctctactaaaaatacaaaaaattagctgggcgtagtcacacacacctgta

SEQ ID NO: 8561 - DNA, 3039 bp, Homo sapiens
  source 1..3039: mol_type = unassigned DNA; mol_type = unassigned DNA
gggcaacccgcgcgggacccttcctccctagtcgcggggagtctgagaaagcgcgcctgtttcgcgaccatcacgcacctcccctccgcttgtggccatgtaccgctacctgggcgaagcgctgttgctgtcccgggccgggcccgctgccctgggctcggcgtccgccgactcggccgcgttgctgggctgggcccggggacagcccgccgccgccccgcagccggggctggcattggccgcccggcgccactacagcgaggcggtggccgaccgcgaggacgaccccaacttcttcaagatggtggagggcttcttcgatcgcggcgccagcatcgtggaggacaagctggtggaggacctgaggacccgggagagcgaggagcagaagcggaaccgggtgcgcggcatcctgcggatcatcaagccctgcaaccatgtgctgagtctctccttccccatccggcgcgacgacggctcctgggaggtcatcgaaggctaccgggcccagcacagccagcaccgcacgccctgcaagggaggtatccgttacagcactgatgtgagtgtagatgaagtaaaagctttggcttctctgatgacatacaagtgtgcagtggttgatgtgccgtttgggggtgctaaagctggtgttaagatcaatcccaagaactatactgataatgaattggaaaagatcacaaggaggttcaccatggagctagcaaaaaagggctttattggtcctggcattgatgtgcctgctccagacatgagcacaggtgagcgggagatgtcctggatcgctgatacctatgccagcaccatagggcactatgatattaatgcacacgcctgtgttactggtaaacccatcagccaagggggaatccatggacgcatctctgctactggccgtggtgtcttccatgggattgaaaatttcatcaatgaagcttcttacatgagcattttaggaatgacaccagggtttggagataaaacatttgttgttcagggatttggtaatgtgggcctacactctatgagatatttacatcgttttggtgctaaatgtattgctgttggtgagtctgatgggagtatatggaatccagatggtattgacccaaaggaactggaagacttcaaattgcaacatgggtccattctgggcttccccaaggcaaagccctatgaaggaagcatcttggaggccgactgtgacatactgatcccagctgccagtgagaagcagttgaccaaatccaacgcacccagagtcaaagccaagatcattgctgaaggtgccaatgggccaacaactccagaagctgacaagatcttcctggagagaaacattatggttattccagatctctacttgaatgctggaggagtgacagtatcttactttgagtggctgaagaatctaaatcatgtcagctatggccgtttgaccttcaaatatgaaagggattctaactaccacttgctcatgtctgttcaagagagtttagaaagaaaatttggaaagcatggtggaactattcccattgtacccacggcagagttccaagacaggatatcgggtgcatctgagaaagacatcgtgcactctggcttggcatacacaatggagcgttctgccaggcaaattatgcgcacagccatgaagtataacctgggattggacctgagaacagctgcctatgttaatgccattgagaaagtcttcaaagtgtacaatgaagctggtgtgaccttcacatagatggatcatggctgacttcctcactatcctcttcacatgtaacttctgcagacctatcacaagtttacatgtaaccacagaaatccctttctctcctgactcattaataatggataccattctcaacaagtcaatccaagtcagcccgttaaggagaaagaaattaaggttagcggatcatgtacaagctgagtgtgaaagtagaaatcacctacaccagagagccattttggtattttgcctttaaataaaaagcctcctttatctggctgtgcagccttgctctgtggcttttcccaacacaatcagtgctagtgctggggaggaacagtcaagagcagtcagttgcttgcttattttttctggatgagtctgggacacactgtaactttaacacatttaagaagtaggtgtgtggccttttcagaaggtggcatggtcctcaagtgagttcttagtattttatatcagcaaaataattcaattttgcaggttgcaaacaaatataaaacctgtttctgtttatgaatattattcttttagaatagaataagtacatgctgctgtaataaaattgcctttaatcacttaacaagcctaaccttgactcaaacagtgaatgcctatagaaataataaatgaaaaaaactagtatttttatatcataaaacaatgtcatttatagcttatcattcatgtattgtccagcagacattaaaagccctgtggataattaagttatcttcatacctgcaaaatggtggaggctattttcattaaaactgtcagaatttgcttactataattatgatacagtccaaagaatgcagtcactttttatcatgttaactaattgttctcttttgaagatctatggttgactaattaaacaataattcaagtagagtgtcccagaaaaaaaccacttgggctccctgtttggagtctggctggctctgagcattgccaatggcccctactcacctgactttgtatcctctccttttagaggctttgcattctgcacccagcttcactaacagtgggctgaaaacatccttgggttgagtgtttcatttgggagttatttggccagggccttttgaacagtagtgtccccatgaagtgctagataatatatgtgtaagagtcagctttttttttttttttaactctaacacccttcagaaatttctaactactttgtaactgcatggcttaacctggtgataaaagcagttattaaaagtctacgttttccaaaa

SEQ ID NO: 8562 - DNA, 409 bp, Homo sapiens
  source 1..409: mol_type = unassigned DNA; mol_type = unassigned DNA
aaaataacctctatttaactttaactgaaactgtgcttctccccacagccccttgttcatatatgcacatctcttgccctcagtggaggggatttgacggtggtgttcgcatttctctatgttcctgactctcttgcagatcattgctgaaggtgccaatgggccaacaactccagaagctgacaagatcttcctggagagaaacattatggttattccagatctctacttgaatgctggaggagtgacagtatcttactttgagtggctgaagaatctaaatcatgtcagctatggccgtttgaccttcaaatatgaaagggattctaactaccacttgctcatgtctgttcaagagagtttagaaagaaaatttggaaagcatggtggaactattcccattgtaccc

SEQ ID NO: 8563 - DNA, 503 bp, Homo sapiens
  source 1..503: mol_type = unassigned DNA; mol_type = unassigned DNA
ggatttggtaatgtgggcctacactctatgagatatttacatcgttttggtgctaaatgtattgctgttggtgagtctgatgggagtatatggaatccagatggtattgacccaaaggaactggaagacttcaaattgcaacatgggtccattctgggcttccccaaggcaaagccctatgaaggaagcatcttggaggccgactgtgacatactgatcccagctgccagtgagaagcagttgaccaaatccaacgcacccagagtcaaagccaaggtgacaacattatagaaaccagaaccaacattatcaatgtgaatgacgttaggggggtcatagaagagtctgattgagttttctctttctttttagcagctttattggcacatactgcacataccatacagttcccccatttaaggtacataatttaatggcttttagctaccggcacagagttgtgcaaccattaccaaaacaaacgcatctgcctgacactcctg

SEQ ID NO: 8564 - DNA, 394 bp, Homo sapiens
  source 1..394: mol_type = unassigned DNA; mol_type = unassigned DNA
cagggcagcccactgtgctaagacactagaacgtacatcaagaagcatccaattctgatttttccctcagagggcttccatttaaagaggaactaaggtgcataagcagataaggatattaatgcacacgcctgtgttactggtaaacccatcagccaagggggaatccatggacgcatctctgctactggccgtggtgtcttccatgggattgaaaatttcatcaatgaagcttcttacatgagcattttaggaatgacaccagggtttggagataaaacatttgttgttcagggatttggtaatgtgggcctacactctatgagatatttacatcgttttggtgctaaatgtattgctgttggtgagtctgatgggagtatatggaatccag

SEQ ID NO: 8565 - DNA, 4364 bp, Homo sapiens
  source 1..4364: mol_type = unassigned DNA; mol_type = unassigned DNA
gtaaaactattccccgtgaaggcggcagggcagaggtccagggcgggctttgctgggagcctcgggaccccgggttgggggccgtggggcggcacctggcgagctggcgggtgggcggcgagccgaggcttcccggcctggcggcaactcgcccctctgccctcagccctcccggctccgctcccttcccccacgccgccctgcccctcccccacgcccctttctctttctttctttctttcccagttcgcttgcccccaccccagcggcgcccgccgggctcctcgcccaatggccgcggggcccgggaccgcatcagctgatcggcccgggctcctggccgctgggagccaatcagggcaccgggggcggccccgggccgcggataaagggtgcggggctgctggcggctctgcagagtcgagagtgggagaagagcggagcgtgtgagcagtactgcggcctcctctcctctcctaacctcgctctcgcggcctagctttacccgcccgcctgctcggcgaccagaacaccttccaccatgaccacctcagcaagttcccacttaaataaaggcatcaagcaggtgtacatgtccctgcctcagggtgagaaagtccaggccatgtatatctggatcgatggtactggagaaggactgcgctgcaagacccggaccctggacagtgagcccaagtgtgtggaagagttgcctgagtggaatttcgatggctctagtactttacagtctgagggttccaacagtgacatgtatctcgtgcctgctgccatgtttcgggaccccttccgtaaggaccctaacaagctggtgttatgtgaagttttcaagtacaatcgaaggcctgcagagaccaatttgaggcacacctgtaaacggataatggacatggtgagcaaccagcacccctggtttggcatggagcaggagtataccctcatggggacagatgggcacccctttggttggccttccaacggcttcccagggccccagggtccatattactgtggtgtgggagcagacagagcctatggcagggacatcgtggaggcccattaccgggcctgcttgtatgctggagtcaagattgcggggactaatgccgaggtcatgcctgcccagtgggaatttcagattggaccttgtgaaggaatcagcatgggagatcatctctgggtggcccgtttcatcttgcatcgtgtgtgtgaagactttggagtgatagcaacctttgatcctaagcccattcctgggaactggaatggtgcaggctgccataccaacttcagcaccaaggccatgcgggaggagaatggtctgaagtacatcgaggaggccattgagaaactaagcaagcggcaccagtaccacatccgtgcctatgatcccaagggaggcctggacaatgcccgacgtctaactggattccatgaaacctccaacatcaacgacttttctgctggtgtagccaatcgtagcgccagcatacgcattccccggactgttggccaggagaagaagggttactttgaagatcgtcgcccctctgccaactgcgaccccttttcggtgacagaagccctcatccgcacgtgtcttctcaatgaaaccggcgatgagcccttccagtacaaaaattaagtggactagacctccagctgttgagcccctcctagttcttcatcccactccaactcttccccctctcccagttgtcccgattgtaactcaaagggtggaatatcaaggtcgtttttttcattccatgtgcccagttaatcttgctttctttgtttggctgggatagaggggtcaagttattaatttcttcacacctaccctcctttttttccctatcactgaagctttttagtgcattagtggggaggagggtggggagacataaccactgcttccatttaatggggtgcacctgtccaataggcgtagctatccggacagagcacgtttgcagaagggggtctcttcttccaggtagctgaaaggggaagacctgacgtactctggttaggttaggacttgccctcgtggtggaaacttttcttaaaaagttataaccaacttttctattaaaagtgggaattaggagagaaggtaggggttgggaatcagagagaatggctttggtctcttgcttgtgggactagcctggcttgggactaaatgccctgctctgaacacgaagcttagtataaactgatggatatccctaccttgaaagaagaaaaggttcttactgcttggtccttgatttatcacacaaagcagaatagtatttttatatttaaatgtaaagacaaaaaactatatgtatggttttgtggattatgtgtgttttgctaaaggaaaaaaccatccaggtcacggggcaccaaatttgagacaaatagtcggattagaaataaagcatctcattttgagtagagagcaagggaagtggttcttagatggtgatctgggattaggccctcaagacccttttgggtttctgccctgcccaccctctggagaaggtgggcactggattagttaacagacaacacgttactagcagtcacttgatctccgtggctttggtttaaaagacacacttgtccacataggtttagagataagagttggctggtcaacttgagcatgttactgacagagggggtattggggttattttctggtaggaatagcatgtcactaaagcaggccttttgatattaaattttttaaaaagcaaaattatagaagtttagattttaatcaaatttgtagggtttctaggtaatttttacagaattgcttgtttgcttcaactgtctcctacctctgctcttggaggagatggggacagggctggagtcaaaacacttgtaattttgtatcttgatgtctttgttaagactgctgaagaattattttttttcttttataataaggaataaaccccacctttattccttcatttcatctaccattttctggttcttgtgttggctgtggcaggccagctgtggttttcttttgccatgacaacttctaattgccatgtacagtatgttcaaagtcaaataactcctcattgtaaacaaactgtgtaactgcccaaagcagcacttataaatcagcctaacataagatctctctgatgtgtttgtgattctttcaaatccctatgtgccattatatttctttatttcctaaaacaggcaaaataagctcaagtttatgtactctgagtttttaaaacactggagtgatgttgctgaccagccgtttcctgtacctctctaagttgggtatttgggacttaagggattaagtttttcacctagacttagttacacacaatcttggcatttcctagcctagaggtttgtagcagggtacaagccccactcctcccccttcctttgctcccctgagtttggttttggcttaccataacattgttttgaccattcctagcctaatacaatagcctaacataatgtaagattaactggctttacgatttctattctctgctctcagtgataagaaacaaatattagctaccctgctaccctggttgaagccttccaaggctggctatgccctaggcatgggctcatccttgggtgtatcttgccttgcaggaagaccagtggaccgattgtgattctcaaaagctctgtgttgtcacctgtgcccttgccccttgctcttatcttggtccgtgtatctgggagttcttccaccttatcttggccaattcctaccttcgttcattcctcatgaggttgggtaaaagctccctccggctcccatgatgctgtgcatatacctagcaaaaagcaattattggacacattggagtgcaatattattaatagcattaatactactaataatgtgggcaatagtgattgtttttaaaaggcagtatactcttaccagtgcgaggtagctggggcctgtgatagtttttagagataagttcttcaggcaactgtgtattttacactagtcaagtaatcctagatatccgtggtttttcttaagaaagttggctcgtaatatgatttaatattcaaagtagagtcatctacctattagcttgctggcgtggtcctagtttatgcctgtttcagcatgattgttgagtaccctgtttcatccttagcattttcttgattttgttgttaaatgatgtatacccttatttccattgaatctgtgcttccacccccccaactgaagttgtcttccctttgcttggccacccttacagcctcttggatggtgtatcctacagtgtaagcactaaactgaagaggcagtgacctga

SEQ ID NO: 8566 - DNA, 6132 bp, Homo sapiens
  source 1..6132: mol_type = unassigned DNA; mol_type = unassigned DNA
aagtgtgcatgatattggtggtgtaacatgttggagaggacagccgagaaattgggttgtaggttttttttttttgttttccgacagagtctctatctgttacccaggttggagtgcagtggtgcaatctcccggctcactgcaacctctgcctctggggttcaggcgattctcctgtgtcagcctcccgagtagctgggattacaggcgtgcacaaccacgcccggctaatttttgtatttttagtagagacgggagtttcatcgtgttggccaggctggtctcgaactttgtacctcaggtgatctgcccgcttcggtgggttgtagcttttagcgggagctaaagggttctgggatggaggtgggaagtaggatttggccggctgagtcttctagaggcaatattggggtgttggtcttccccaaggggaagggtggtgaggctgagggagaagcagttatgttttcagctgggcaaacatggacggttgcccgtagaaactttgccactgtacttcagaacgttgccctagtcgttggaggagaacaatgtgttccctttctagccaccctggtccacggagggaggagggagagagagaatgtttcctcttcggctgttgtggcttgagagtttctcttctttcggaggttttgtggtagtggctggcagttattagtatgcctcatggcttttaaatttccagatctttttgatttagaagtggaaatttcctaattacttgacaagtcttgtagaattccataatgttgtgattcttgcccactatcttaagtgagactttgcatgagacctatggaaattatggcagcattccccttagaatctggcttgaatcagcttttgtgtaggaaactgctagccttctaaaaaaatatattgtaaccttgtttcatcctcaaatctaaatgtgtaatgagttttcttttggtggggaggggcggtgggtttgagttaagaccacagctaggatgaaagacaaagagaaaaacaaactgtggaagccaagcctgttctgtggctggattttacttatattggaagaagttctatgttttgtaaatttgtgtattggttttgatttgtttcctctgatagtttagtatttggatagtttagtgttaacctcagctacactgaaggaatagaccttagtcctcacaagtataagttctagcttggaagcctgggttctgcagtagctgtggaacttaagcctgtgagctcagggatgcagaggcattgagttactaccaagggcctgatcttttctttagcaggcatctgtgttaattgtttcaaaaggtggtgatcagttttacagcctattataaaggagatttttgcctactataaaactaatccccctgaaagagtgagtaaacataactttttgtgtgttgacttccacaagggaaggagttggcacttacactctgacttttgattcagtcgtccttcttgagccatttttgcaggggatcagtttggagtgggcgttaacaatgttattctttttttcttctccagaacaccttccaccatgaccacctcagcaagttcccacttaaataaaggcatcaagcaggtgtacatgtccctgcctcagggtgagaaagtccaggccatgtatatctggatcgatggtactggagaaggactgcgctgcaagacccggaccctggacagtgagcccaagtgtgtggaagagttgcctgagtggaatttcgatggctctagtactttacagtctgagggttccaacagtgacatgtatctcgtgcctgctgccatgtttcgggaccccttccgtaaggaccctaacaagctggtgttatgtgaagttttcaagtacaatcgaaggcctgcaggtgtgttatagcacagctatggatacccctcctcaatctgtgaatgctgtgaaggggagggagaagacattctgaaatcagcattgggaagactaggcaatttcagcactattttaagaatctgagtgattcttttccctgaacttctgctttgaggaagagataatatggcccatctttctatggtcttctctgttggttgcataaaatagcattggatttgtccagatctgtttgccggtcttggagtccccagtaacagccttcctgcctggaatgtaggccaggacaaatgtaaaccaatggacaaatgtttctcaaaaattatagaatggctccaagtgcctgagaaatgaagaataaatctgacaaccagaagcagctgtcttgtgaatagagggttaagtgcctggcatttggtgcttgggaggtggccagaatgcagataaggtgaaagttgccctgttctaaatccactcccatgtgacttggttgtaactgagtttagttaaaactgaagtctttcagagtcttcctacagatgtacaattaacagcttctctcatttttctgactcggtgatcccaagaaggcctatactgggtcagttcataccatagtgcacacctcagttgtatagaatccaaggactattctcccatcagcatcggtattcagcatctatgtctttagatccctgatggcgtattattgactcttttttctagagaccaatttgaggcacacctgtaaacggataatggacatggtgagcaaccagcacccctggtttggcatggagcaggagtataccctcatggggacagatgggcacccctttggttggccttccaacggcttcccagggccccagggtaagtctccttgggttagaggtgaaattcccagaagtgtctaactgtgcaggaatgccccttcccagggatgggaatgactttcagaatcaagaagcaaaataatacagtaaaggcgaaacagccctcacatcaccaaagtccaaaaatggatatgaatatataaagtaaggttttagggggaacgtttggccccactgaagctgtggtgaagaggaactcccctattgcccctcccctgccccgcacctgcagatgaaggcaaggatagtgattcaagagggcaaggcttaagggccttctgatctctgactttgggattctctggatttcttgactcttagtgttttgtcctgatgcttctgtaggtccatattactgtggtgtgggagcagacagagcctatggcagggacatcgtggaggcccattaccgggcctgcttgtatgctggagtcaagattgcggggactaatgccgaggtcatgcctgcccaggtaagtatagctccaatccatcaatgaagaagggtaggtaggtgtacataggacttttgctagtaagggctgctgatacaccactcactaacccaaaacctaagaacgggttggagtacaggtgagaagagaacaggtttaggagattctgagttggagtgagcagttagctttgttttaatggccaagcttctcgtt[450 bp omitted]ataatttatataatatatattagtcatatatcattatataaatatatatcgatatatatatttgtgacatatgtcatggtgacagggaaaagttgacaaattcatgcatttgaaaatcttttagaactaaattagtaacaatacaggcatgtggataagcttaatgcttatgagggggagaaagtttcaaatgattagtcttttcaacaaacagtaactttgtactgcttgtcgggcactgttctcaccactgagacacacaggtaagaagatgcagccactgccctcatgaagtatttgttctactggtatcatattttggtgcacttcattcttggctccatacctggagacaaggttggactgccatcttttctgtttactctaggtacatcgaggaggccattgagaaactaagcaagcggcaccagtaccacatccgtgcctatgatcccaagggaggcctggacaatgcccgacgtctaactggattccatgaaacctccaacatcaacgacttttctgctggtgtagccaatcgtagcgccagcatacgcattccccggactgttggccaggagaagaagggttactttgaagatcgtcgcccctctgccaactgcgaccccttttcggtgacagaagccctcatccgcacgtgtcttctcaatgaaaccggcgatgagcccttccagtacaaaaattaagtggactagacctccagctgttgagcccctcctagttcttcatcccactccaactcttccccctctcccagttgtcccgattgtaactcaaagggtggaatatcaaggtcgtttttttcattccatgtgcccagttaatcttgctttctttgtttggctgggatagaggggtcaagttattaatttcttcacacctaccctcctttttttccctatcactgaagctttttagtgcattagtggggaggagggtggggagacataaccactgcttccatttaatggggtgcacctgtccaataggcgtagctatccggacagagcacgtttgcagaagggggtctcttcttccaggtagctgaaaggggaagacctgacgtactctggttaggttaggacttgccctcgtggtggaaacttttcttaaaaagttataaccaacttttctattaaaagtgggaattaggagagaaggtaggggttgggaatcagagagaatggctttggtctcttgcttgtgggactagcctggcttgggactaaatgccctgctctgaacacgaagcttagtataaactgatggatatccctaccttgaaagaagaaaaggttcttactgcttggtccttgatttatcacacaaagcagaatagtatttttatatttaaatgtaaagacaaaaaactatatgtatggttttgtggattatgtgtgttttgctaaaggaaaaaaccatccaggtcacggggcaccaaatttgagacaaatagtcggattagaaataaagcatctcattttgagtagagagcaagggaagtggttcttagatggtgatctgggattaggccctcaagacccttttgggtttctgccctgcccaccctctggagaaggtgggcactggattagttaacagacaacacgttactagcagtcacttgatctccgtggctttggtttaaaagacacacttgtccacataggtttagagataagagttggctggtcaacttgagcatgttactgacagagggggtattggggttattttctggtaggaatagcatgtcactaaagcaggccttttgatattaaattttttaaaaagcaaaattatagaagtttagattttaatcaaatttgtagggtttctaggtaatttttacagaattgcttgtttgcttcaactgtctcctacctctgctcttggaggagatggggacagggctggagtcaaaacacttgtaattttgtatcttgatgtctttgttaagactgctgaagaattattttttttcttttataataaggaataaaccccacctttattccttcatttcatctaccattttctggttcttgtgttggctgtggcaggccagctgtggttttcttttgccatgacaacttctaattgccatgtacagtatgttcaaagtcaaataactcctcattgtaaacaaactgtgtaactgcccaaagcagcacttataaatcagcctaacataaga

SEQ ID NO: 8567 - DNA, 3942 bp, Homo sapiens
  source 1..3942: mol_type = unassigned DNA; mol_type = unassigned DNA
gcagagtcgagagtgggagaagagcggagcgtgtgagcagtactgcggcctcctctcctctcctaacctcgctctcgcggcctagctttacccgcccgcctgctcggcgaccaggtaagcccccggacggcccggtgtcacgcaagcgaggcgcgccgcccctgctaccccgcgaggcgcgccgcccagcctcttttttcggctgcctgcccctccagtcccagccctacgctgcggcctctccggcccatgcctgagatccggcatgagtgctcctcccgcgtgcttccgccgctggtggcttggacccgtcggggctggcgctggtggggcgcgcccttggccaggctctgggaagggcggggtgagttgttttgatcttcttttcactacttgcggccgaagcgccgcccctggaggccgttgggccggcctgcgccctggggctcgcagtggtttgtttgcgctgtggatggagtggcggtgcggtcccctgtggagcgcaaacaaggcgcttggttggcgcgggcgcctggctgccttcctcgtggtggggccttcggagcaatcgtcctggttctggcgatggttgagacgcctcgattgcggcgtgtaacggtgagcgttgtttgggcggccggctcccgcctcggggtcccgggggccttccaatgtgaccgaacaatggagagcccgggcctcggcgcagtcagtggagaagccggtccgggcggaggcagcagcagcgcgcagtccctacggcctgcgcccccaccctcccccggaccccccaacccctcggcggcagggtatggccacctccgtgaggccctgagattcggacgggggcccgaggggcagggcgcccactttagggacatttcagtgggaaggggctgctctcaaagtggataattataactccctcgggggcgggaagcggggatcctcccccagccgcaagtccacgaagaaagcaacgaatgaaaattatgaagacaacgagaagtcagactcctccgggtcgcgctccagctgcttcggcttcgtcgcctactctgtgaactccggggagagatctcgagtcaagattaagaccttaacccaccaacctgcctgttcggacaccccccgggccggccgctgtctgtccccttctccatcgccctctcccagaaagctccggtgcttggaccagctagagtctgagaaagaggagaggcgcgaacgccactccaaaaagagaagggttaaagagggcaaccctaacgatacgcttgactttctgtggctgggaacaccttccaccatgaccacctcagcaagttcccacttaaataaaggcatcaagcaggtgtacatgtccctgcctcagggtgagaaagtccaggccatgtatatctggatcgatggtactggagaaggactgcgctgcaagacccggaccctggacagtgagcccaagtgtgtggaagagttgcctgagtggaatttcgatggctctagtactttacagtctgagggttccaacagtgacatgtatctcgtgcctgctgccatgtttcgggaccccttccgtaaggaccctaacaagctggtgttatgtgaagttttcaagtacaatcgaaggcctgcagagaccaatttgaggcacacctgtaaacggataatggacatggtgagcaaccagcacccctggtttggcatggagcaggagtataccctcatggggacagatgggcacccctttggttggccttccaacggcttcccagggccccagggtccatattactgtggtgtgggagcagacagagcctatggcagggacatcgtggaggcccattaccgggcctgcttgtatgctggagtcaagattgcggggactaatgccgaggtcatgcctgcccagtgggaatttcagattggaccttgtgaaggaatcagcatgggagatcatctctgggtggcccgtttcatcttgcatcgtgtgtgtgaagactttggagtgatagcaacctttgatcctaagcccattcctgggaactggaatggtgcaggctgccataccaacttcagcaccaaggccatgcgggaggagaatggtctgaagtacatcgaggaggccattgagaaactaagcaagcggcaccagtaccacatccgtgcctatgatcccaagggaggcctggacaatgcccgacgtctaactggattccatgaaacctccaacatcaacgacttttctgctggtgtagccaatcgtagcgccagcatacgcattccccggactgttggccaggagaagaagggttactttgaagatcgtcgcccctctgccaactgcgaccccttttcggtgacagaagccctcatccgcacgtgtcttctcaatgaaaccggcgatgagcccttccagtacaaaaattaagtggactagacctccagctgttgagcccctcctagttcttcatcccactccaactcttccccctctcccagttgtcccgattgtaactcaaagggtggaatatcaaggtcgtttttttcattccatgtgcccagttaatcttgctttctttgtttggctgggatagaggggtcaagttattaatttcttcacacctaccctcctttttttccctatcactgaagctttttagtgcattagtggggaggagggtggggagacataaccactgcttccatttaatggggtgcacctgtccaataggcgtagctatccggacagagcacgtttgcagaagggggtctcttcttccaggtagctgaaaggggaagacctgacgtactctggttaggttaggacttgccctcgtggtggaaacttttcttaaaaagttataaccaacttttctattaaaagtgggaattaggagagaaggtaggggttgggaatcagagagaatggctttggtctcttgcttgtgggactagcctggcttgggactaaatgccctgctctgaacacgaagcttagtataaactgatggatatccctaccttgaaagaagaaaaggttcttactgcttggtccttgatttatcacacaaagcagaatagtatttttatatttaaatgtaaagacaaaaaactatatgtatggttttgtggattatgtgtgttttgctaaaggaaaaaaccatccaggtcacggggcaccaaatttgagacaaatagtcggattagaaataaagcatctcattttgagtagagagcaagggaagtggttcttagatggtgatctgggattaggccctcaagacccttttgggtttctgccctgcccaccctctggagaaggtgggcactggattagttaacagacaacacgttactagcagtcacttgatctccgtggctttggtttaaaagacacacttgtccacataggtttagagataagagttggctggtcaacttgagcatgttactgacagagggggtattggggttattttctggtaggaatagcatgtcactaaagcaggccttttgatattaaattttttaaaaagcaaaattatagaagtttagattttaatcaaatttgtagggtttctaggtaatttttacagaattgcttgtttgcttcaactgtctcctacctctgctcttggaggagatggggacagggctggagtcaaaacacttgtaattttgtatcttgatgtctttgttaagactgctgaagaattattttttttcttttataataaggaataaaccccacctttattccttcatttcatctaccattttctggttcttgtgttggctgtggcaggccagctgtggttttcttttgccatgacaacttctaattgccatgtacagtatgttcaaagtcaaataactcctcattgtaaacaaactgtgtaactgcccaaagcagcacttataaatcagcctaacataaga

SEQ ID NO: 8568 - DNA, 939 bp, Homo sapiens
  source 1..939: mol_type = unassigned DNA; mol_type = unassigned DNA
tgagcagtactgcggcctcctctcctctcctaacctcgctctcgcggcctagctttacccgcccgcctgctcggcgaccagaacaccttccaccatgaccacctcagcaagttcccacttaaataaagacatcgtggaggcccattaccgggcctgcttgtatgctggagtcaagattgcggggactaatgccgaggtcatgcctgcccagtgggaatttcagattggaccttgtgaaggaatcagcatgggagatcatctctgggtggcccgtttcatcttgcatcgtgtgtgtgaagactttggagtgatagcaacctttgatcctaagcccattcctgggaactggaatggtgcaggctgccataccaacttcagcaccaaggccatgcgggaggagaatggtctgaagtacatcgaggaggccattgagaaactaagcaagcggcaccagtaccacatccgtgcctatgatcccaagggaggcctggacaatgcccgacgtctaactggattccatgaaacctccaacatcaacgacttttctgctggtgtagccaatcgtagcgccagcatacgcattccccggactgttggccaggagaagaagggttactttgaagatcgtcgcccctctgccaactgcgaccccttttcggtgacagaagccctcatccgcacgtgtcttctcaatgaaaccggcgatgagcccttccagtacaaaaattaagtggactagacctccagctgttgagcccctcctagttcttcatcccactccaactcttccccctctcccagttgtcccgattgtaactcaaagggtggaatatcaaggtcgtttttttcattccatgtgcccagttaatcttgctttctttgtttggctgggatagaggggtcaagttattaatttcttcacacctaccctcctttttt

SEQ ID NO: 8569 - DNA, 689 bp, Homo sapiens
  source 1..689: mol_type = unassigned DNA; mol_type = unassigned DNA
gggattctctggatttcttgactcttagtgttttgtcctgatgcttctgtaggtccatattactgtggtgtgggagcagacagagcctatggcagggacatcgtggaggcccattaccgggcctgcttgtatgctggagtcaagattgcggggactaatgccgaggtcatgcctgcccagtgggaatttcagattggaccttgtgaaggaatcagcatgggagatcatctctgggtggcccgtttcatcttgcatcgtgtgtgtgaagactttggagtgatagcaacctttgatcctaagcccattcctgggaactggaatggtgcaggctgccataccaacttcagcaccaaggccatgcgggaggagaatggtctgaagtacatcgaggaggccattgagaaactaagcaagcggcaccagtaccacatccgtgcctatgatcccaagggaggcctggacaatgcccgacgtctaactggattccatgaaacctccaacatcaacgacttttctgctggtgtagccaatcgtagcgccagcatacgcattccccggactgttggccaggagaagaagggttactttgaagatcgtcgcccctctgccaactgcgaccccttttcggtgacagaagccctcatccgcacgtgtcttctcaatgaaaccggcgatgagcccttccagta

SEQ ID NO: 8570 - DNA, 1369 bp, Homo sapiens
  source 1..1369: mol_type = unassigned DNA; mol_type = unassigned DNA
aagagcggagcgtgtgagcagtactgcggcctcctctcctctcctaacctcgctctcgcggcctagctttacccgcccgcctgctcggcgaccaggtaagcccccggacggcccggtgtcacgcaagcgaggcgcgccgcccctgctaccccgcgaggcgcgccgcccagcctcttttttcggctgcctgcccctccagtcccagccctacgctgcggcctctccggcccatgcctgagatccggcatgagtgctcctcccgcgtgcttccgccgctggtggcttggacccgtcggggctggcgctggtggggcgcgcccttggccaggctctgggaagggcggggtgagttgttttgatcttcttttcactacttgcggccgaagcgccgcccctggaggccgttgggccggcctgcgccctggggctcgcagtggtttgtttgcgctgtggatggagtggcggtgcggtcccctgtggagcgcaaacaaggcgcttggttggcgcgggcgcctggctgccttcctcgtggtggggccttcggagcaatcgtcctggttctggcgatggttgagacgcctcgattgcggcgtgtaacgaacaccttccaccatgaccacctcagcaagttcccacttaaataaaggcatcaagcaggtgtacatgtccctgcctcagggtgagaaagtccaggccatgtatatctggatcgatggtactggagaaggactgcgctgcaagacccggaccctggacagtgagcccaagtgtgtggaagagttgcctgagtggaatttcgatggctctagtactttacagtctgagggttccaacagtgacatgtatctcgtgcctgctgccatgtttcgggaccccttccgtaaggaccctaacaagctggtgttatgtgaagttttcaagtacaatcgaaggcctgcagagaccaatttgaggcacacctgtaaacggataatggacatggtgagcaaccagcacccctggtttggcatggagcaggagtataccctcatggggacagatgggcacccctttggttggccttccaacggcttcccagggccccagggtccatattactgtggtgtgggagcagacagagcctatggcagggacatcgtggaggcccattaccgggcctgcttgtatgctggagtcaagattgcggggactaatgccgaggtcatgcctgcccagtgggaatttcagattggaccttgtgaaggaatcagcatgggagatcatctctgggtggcccgtttcatcttgcatcgtgtgtgtgaagactttggagtgatagcaacctttgatcctaagcccattcctgggaactggaatggtgcaggctgcc

SEQ ID NO: 8571 - DNA, 683 bp, Homo sapiens
  source 1..683: mol_type = unassigned DNA; mol_type = unassigned DNA
agagtcgagagtgggagaagagcggagcgtgtgagcagtactgcggcctcctctcctctcctaacctcgctctcgcggcctagctttacccgcccgcctgctcggcgaccagaacaccttccaccatgaccacctcagcaagttcccacttaaataaaggcatcaagcaggtgtacatgtccctgcctcagggtgagaaagtccaggccatgtatatctggatcgatggtactggagaaggactgcgctgcaagacccggaccctggacagtgagcccaagtgtgtggaagagttgcctgagtggaatttcgatggctctagtactttacagtctgagggttccaacagtgacatgtatctcgtgcctgctgccatgtttcgggaccccttccgtaaggaccctaacaagctggtgttatgtgaagttttcaagtacaatcgaaggcctgcagagaccaatttgaggcacacctgtaaacggataatggacatggtccatattactgtggtgtgggagcagacagagcctatggcagggacatcgtggaggcccattaccgggcctgcttgtatgctggagtcaagattgcggggactaatgccgaggtcatgcctgcccaggtaagtatagctccaatccatcaatgaagaagggtaggtaggtgtacataggacttttgct

SEQ ID NO: 8572 - DNA, 868 bp, Homo sapiens
  source 1..868: mol_type = unassigned DNA; mol_type = unassigned DNA
ttaagcctgtgagctcagggatgcagaggcattgagttactaccaagggcctgatcttttctttagcaggcatctgtgttaattgtttcaaaaggtggtgatcagttttacagcctattataaaggagatttttgcctactataaaactaatccccctgaaagagtgagtaaacataactttttgtgtgttgacttccacaagggaaggagttggcacttacactctgacttttgattcagtcgtccttcttgagccatttttgcaggggatcagtttggagtgggcgttaacaatgttattctttttttcttctccagaacaccttccaccatgaccacctcagcaagttcccacttaaataaaggcatcaagcaggtgtacatgtccctgcctcagggtgagaaagtccaggccatgtatatctggatcgatggtactggagaaggactgcgctgcaagacccggaccctggacagtgagcccaagtgtgtggaagagttgcctgagtggaatttcgatggctctagtactttacagtctgagggttccaacagtgacatgtatctcgtgcctgctgccatgtttcgggaccccttccgtaaggaccctaacaagctggtgttatgtgaagttttcaagtacaatcgaaggcctgcagagaccaatttgaggcacacctgtaaacggataatggacatggtgagcaaccagcacccctggtttggcatggagcaggagtataccctcatggggacagatgggcacccctttggttggccttccaacggcttcccagggccccagggtaagtctccttgggttagaggtgaaattcccagaagtgtctaactgtgcaggaatgcccc

SEQ ID NO: 8573 - DNA, 908 bp, Homo sapiens
  source 1..908: mol_type = unassigned DNA; mol_type = unassigned DNA
tgagcagtactgcggcctcctctcctctcctaacctcgctctcgcggcctagctttacccgcccgcctgctcggcgaccagcggggatcctcccccagccgcaagtccacgaagaaagcaacgaatgaaaattatgaagacaacgagaagtcagactcctccgggtcgcgctccagctgcttcggcttcgtcgcctactctgtgaactccggggagagatctcgagtcaagattaagaccttaacccaccaacctgcctgttcggacaccccccgggccggccgctgtctgtccccttctccatcgccctctcccagaaagctccggtgcttggaccagctagagtctgagaaagaggagaggcgcgaacgccactccaaaaagagaagggttaaagagggcaaccctaacgatacgcttgactttctgtggctgggaacaccttccaccatgaccacctcagcaagttcccacttaaataaaggcatcaagcaggtgtacatgtccctgcctcagggtgagaaagtccaggccatgtatatctggatcgatggtactggagaaggactgcgctgcaagacccggaccctggacagtgagcccaagtgtgtggaagagttgcctgagtggaatttcgatggctctagtactttacagtctgagggttccaacagtgacatgtatctcgtgcctgctgccatgtttcgggaccccttccgtaaggaccctaacaagctggtgttatgtgaagttttcaagtacaatcgaaggcctgcagagaccaatttgaggcacacctgtaaacggataatggacatggtgagcaaccagcacccctggtttggcatggagcaggagtataccctcatggggacagatgggcacccctttggttggccttccaacgg

SEQ ID NO: 8574 - DNA, 793 bp, Homo sapiens
  source 1..793: mol_type = unassigned DNA; mol_type = unassigned DNA
gaagagcggagcgtgtgagcagtactgcggcctcctctcctctcctaacctcgctctcgcggcctagctttacccgcccgcctgctcggcgaccagaacaccttccaccatgaccacctcagcaagttcccacttaaataaaggcatcaagcaggtgtacatgtccctgcctcagggtgagaaagtccaggccatgtatatctggatcgatggtactggagaaggactgcgctgcaagacccggaccctggacagtgagcccaagtgtgtggaagagttgcctgagtggaatttcgatggctctagtactttacagtctgagggttccaacagtgacatgtatctcgtgcctgctgccatgtttcgggaccccttccgtaaggaccctaacaagctggtgttatgtgaagttttcaagtacaatcgaaggcctgcaggtgtgttatagcacagctatggatacccctcctcaatctgtgaatgctgtgaaggggagggagaagacattctgaaatcagcattgggaagactaggcaatttcagcactattttaagaatctgagtgattcttttccctgaacttctgctttgaggaagagataatatggcccatctttctatggtcttctctgttggttgcataaaatagcattggatttgtccagatctgtttgccggtcttggagtccccagtaacagccttcctgcctggaatgtaggccaggacaaatgtaaaccaatggacaaatgtttctcaaaaattatagaatggctccaagtgcctgagaaatga

SEQ ID NO: 8575 - DNA, 4719 bp, Homo sapiens
  source 1..4719: mol_type = unassigned DNA; mol_type = unassigned DNA
gtaaaactattccccgtgaaggcggcagggcagaggtccagggcgggctttgctgggagcctcgggaccccgggttgggggccgtggggcggcacctggcgagctggcgggtgggcggcgagccgaggcttcccggcctggcggcaactcgcccctctgccctcagccctcccggctccgctcccttcccccacgccgccctgcccctcccccacgcccctttctctttctttctttctttcccagttcgcttgcccccaccccagcggcgcccgccgggctcctcgcccaatggccgcggggcccgggaccgcatcagctgatcggcccgggctcctggccgctgggagccaatcagggcaccgggggcggccccgggccgcggataaagggtgcggggctgctggcggctctgcagagtcgagagtgggagaagagcggagcgtgtgagcagtactgcggcctcctctcctctcctaacctcgctctcgcggcctagctttacccgcccgcctgctcggcgaccagcggggatcctcccccagccgcaagtccacgaagaaagcaacgaatgaaaattatgaagacaacgagaagtcagactcctccgggtcgcgctccagctgcttcggcttcgtcgcctactctgtgaactccggggagagatctcgagtcaagattaagaccttaacccaccaacctgcctgttcggacaccccccgggccggccgctgtctgtccccttctccatcgccctctcccagaaagctccggtgcttggaccagctagagtctgagaaagaggagaggcgcgaacgccactccaaaaagagaagggttaaagagggcaaccctaacgatacgcttgactttctgtggctgggaacaccttccaccatgaccacctcagcaagttcccacttaaataaaggcatcaagcaggtgtacatgtccctgcctcagggtgagaaagtccaggccatgtatatctggatcgatggtactggagaaggactgcgctgcaagacccggaccctggacagtgagcccaagtgtgtggaagagttgcctgagtggaatttcgatggctctagtactttacagtctgagggttccaacagtgacatgtatctcgtgcctgctgccatgtttcgggaccccttccgtaaggaccctaacaagctggtgttatgtgaagttttcaagtacaatcgaaggcctgcagagaccaatttgaggcacacctgtaaacggataatggacatggtgagcaaccagcacccctggtttggcatggagcaggagtataccctcatggggacagatgggcacccctttggttggccttccaacggcttcccagggccccagggtccatattactgtggtgtgggagcagacagagcctatggcagggacatcgtggaggcccattaccgggcctgcttgtatgctggagtcaagattgcggggactaatgccgaggtcatgcctgcccagtgggaatttcagattggaccttgtgaaggaatcagcatgggagatcatctctgggtggcccgtttcatcttgcatcgtgtgtgtgaagactttggagtgatagcaacctttgatcctaagcccattcctgggaactggaatggtgcaggctgccataccaacttcagcaccaaggccatgcgggaggagaatggtctgaagtacatcgaggaggccattgagaaactaagcaagcggcaccagtaccacatccgtgcctatgatcccaagggaggcctggacaatgcccgacgtctaactggattccatgaaacctccaacatcaacgacttttctgctggtgtagccaatcgtagcgccagcatacgcattccccggactgttggccaggagaagaagggttactttgaagatcgtcgcccctctgccaactgcgaccccttttcggtgacagaagccctcatccgcacgtgtcttctcaatgaaaccggcgatgagcccttccagtacaaaaattaagtggactagacctccagctgttgagcccctcctagttcttcatcccactccaactcttccccctctcccagttgtcccgattgtaactcaaagggtggaatatcaaggtcgtttttttcattccatgtgcccagttaatcttgctttctttgtttggctgggatagaggggtcaagttattaatttcttcacacctaccctcctttttttccctatcactgaagctttttagtgcattagtggggaggagggtggggagacataaccactgcttccatttaatggggtgcacctgtccaataggcgtagctatccggacagagcacgtttgcagaagggggtctcttcttccaggtagctgaaaggggaagacctgacgtactctggttaggttaggacttgccctcgtggtggaaacttttcttaaaaagttataaccaacttttctattaaaagtgggaattaggagagaaggtaggggttgggaatcagagagaatggctttggtctcttgcttgtgggactagcctggcttgggactaaatgccctgctctgaacacgaagcttagtataaactgatggatatccctaccttgaaagaagaaaaggttcttactgcttggtccttgatttatcacacaaagcagaatagtatttttatatttaaatgtaaagacaaaaaactatatgtatggttttgtggattatgtgtgttttgctaaaggaaaaaaccatccaggtcacggggcaccaaatttgagacaaatagtcggattagaaataaagcatctcattttgagtagagagcaagggaagtggttcttagatggtgatctgggattaggccctcaagacccttttgggtttctgccctgcccaccctctggagaaggtgggcactggattagttaacagacaacacgttactagcagtcacttgatctccgtggctttggtttaaaagacacacttgtccacataggtttagagataagagttggctggtcaacttgagcatgttactgacagagggggtattggggttattttctggtaggaatagcatgtcactaaagcaggccttttgatattaaattttttaaaaagcaaaattatagaagtttagattttaatcaaatttgtagggtttctaggtaatttttacagaattgcttgtttgcttcaactgtctcctacctctgctcttggaggagatggggacagggctggagtcaaaacacttgtaattttgtatcttgatgtctttgttaagactgctgaagaattattttttttcttttataataaggaataaaccccacctttattccttcatttcatctaccattttctggttcttgtgttggctgtggcaggccagctgtggttttcttttgccatgacaacttctaattgccatgtacagtatgttcaaagtcaaataactcctcattgtaaacaaactgtgtaactgcccaaagcagcacttataaatcagcctaacataagatctctctgatgtgtttgtgattctttcaaatccctatgtgccattatatttctttatttcctaaaacaggcaaaataagctcaagtttatgtactctgagtttttaaaacactggagtgatgttgctgaccagccgtttcctgtacctctctaagttgggtatttgggacttaagggattaagtttttcacctagacttagttacacacaatcttggcatttcctagcctagaggtttgtagcagggtacaagccccactcctcccccttcctttgctcccctgagtttggttttggcttaccataacattgttttgaccattcctagcctaatacaatagcctaacataatgtaagattaactggctttacgatttctattctctgctctcagtgataagaaacaaatattagctaccctgctaccctggttgaagccttccaaggctggctatgccctaggcatgggctcatccttgggtgtatcttgccttgcaggaagaccagtggaccgattgtgattctcaaaagctctgtgttgtcacctgtgcccttgccccttgctcttatcttggtccgtgtatctgggagttcttccaccttatcttggccaattcctaccttcgttcattcctcatgaggttgggtaaaagctccctccggctcccatgatgctgtgcatatacctagcaaaaagcaattattggacacattggagtgcaatattattaatagcattaatactactaataatgtgggcaatagtgattgtttttaaaaggcagtatactcttaccagtgcgaggtagctggggcctgtgatagtttttagagataagttcttcaggcaactgtgtattttacactagtcaagtaatcctagatatccgtggtttttcttaagaaagttggctcgtaatatgatttaatattcaaagtagagtcatctacctattagcttgctggcgtggtcctagtttatgcctgtttcagcatgattgttgagtaccctgtttcatccttagcattttcttgattttgttgttaaatgatgtatacccttatttccattgaatctgtgcttccacccccccaactgaagttgtcttccctttgcttggccacccttacagcctcttggatggtgtatcctacagtgtaagcactaaactgaagaggcagtgacctg

SEQ ID NO: 8576 - DNA, 4065 bp, Homo sapiens
  source 1..4065: mol_type = unassigned DNA; mol_type = unassigned DNA
actacttgcggccgaagcgccgcccctggaggccgttgggccggcctgcgccctggggctcgcagtggtttgtttgcgctgtggatggagtggcggtgcggtcccctgtggagcgcaaacaaggcgcttggttggcgcgggcgcctggctgccttcctcgtggtggggccttcggagcaatcgtcctggttctggcgatggttgagacgcctcgattgcggcgtgtaacgaacaccttccaccatgaccacctcagcaagttcccacttaaataaaggcatcaagcaggtgtacatgtccctgcctcagggtgagaaagtccaggccatgtatatctggatcgatggtactggagaaggactgcgctgcaagacccggaccctggacagtgagcccaagtgtgtggaagagttgcctgagtggaatttcgatggctctagtactttacagtctgagggttccaacagtgacatgtatctcgtgcctgctgccatgtttcgggaccccttccgtaaggaccctaacaagctggtgttatgtgaagttttcaagtacaatcgaaggcctgcagagaccaatttgaggcacacctgtaaacggataatggacatggtgagcaaccagcacccctggtttggcatggagcaggagtataccctcatggggacagatgggcacccctttggttggccttccaacggcttcccagggccccagggtccatattactgtggtgtgggagcagacagagcctatggcagggacatcgtggaggcccattaccgggcctgcttgtatgctggagtcaagattgcggggactaatgccgaggtcatgcctgcccagtgggaatttcagattggaccttgtgaaggaatcagcatgggagatcatctctgggtggcccgtttcatcttgcatcgtgtgtgtgaagactttggagtgatagcaacctttgatcctaagcccattcctgggaactggaatggtgcaggctgccataccaacttcagcaccaaggccatgcgggaggagaatggtctgaagtacatcgaggaggccattgagaaactaagcaagcggcaccagtaccacatccgtgcctatgatcccaagggaggcctggacaatgcccgacgtctaactggattccatgaaacctccaacatcaacgacttttctgctggtgtagccaatcgtagcgccagcatacgcattccccggactgttggccaggagaagaagggttactttgaagatcgtcgcccctctgccaactgcgaccccttttcggtgacagaagccctcatccgcacgtgtcttctcaatgaaaccggcgatgagcccttccagtacaaaaattaagtggactagacctccagctgttgagcccctcctagttcttcatcccactccaactcttccccctctcccagttgtcccgattgtaactcaaagggtggaatatcaaggtcgtttttttcattccatgtgcccagttaatcttgctttctttgtttggctgggatagaggggtcaagttattaatttcttcacacctaccctcctttttttccctatcactgaagctttttagtgcattagtggggaggagggtggggagacataaccactgcttccatttaatggggtgcacctgtccaataggcgtagctatccggacagagcacgtttgcagaagggggtctcttcttccaggtagctgaaaggggaagacctgacgtactctggttaggttaggacttgccctcgtggtggaaacttttcttaaaaagttataaccaacttttctattaaaagtgggaattaggagagaaggtaggggttgggaatcagagagaatggctttggtctcttgcttgtgggactagcctggcttgggactaaatgccctgctctgaacacgaagcttagtataaactgatggatatccctaccttgaaagaagaaaaggttcttactgcttggtccttgatttatcacacaaagcagaatagtatttttatatttaaatgtaaagacaaaaaactatatgtatggttttgtggattatgtgtgttttgctaaaggaaaaaaccatccaggtcacggggcaccaaatttgagacaaatagtcggattagaaataaagcatctcattttgagtagagagcaagggaagtggttcttagatggtgatctgggattaggccctcaagacccttttgggtttctgccctgcccaccctctggagaaggtgggcactggattagttaacagacaacacgttactagcagtcacttgatctccgtggctttggtttaaaagacacacttgtccacataggtttagagataagagttggctggtcaacttgagcatgttactgacagagggggtattggggttattttctggtaggaatagcatgtcactaaagcaggccttttgatattaaattttttaaaaagcaaaattatagaagtttagattttaatcaaatttgtagggtttctaggtaatttttacagaattgcttgtttgcttcaactgtctcctacctctgctcttggaggagatggggacagggctggagtcaaaacacttgtaattttgtatcttgatgtctttgttaagactgctgaagaattattttttttcttttataataaggaataaaccccacctttattccttcatttcatctaccattttctggttcttgtgttggctgtggcaggccagctgtggttttcttttgccatgacaacttctaattgccatgtacagtatgttcaaagtcaaataactcctcattgtaaacaaactgtgtaactgcccaaagcagcacttataaatcagcctaacataagatctctctgatgtgtttgtgattctttcaaatccctatgtgccattatatttctttatttcctaaaacaggcaaaataagctcaagtttatgtactctgagtttttaaaacactggagtgatgttgctgaccagccgtttcctgtacctctctaagttgggtatttgggacttaagggattaagtttttcacctagacttagttacacacaatcttggcatttcctagcctagaggtttgtagcagggtacaagccccactcctcccccttcctttgctcccctgagtttggttttggcttaccataacattgttttgaccattcctagcctaatacaatagcctaacataatgtaagattaactggctttacgatttctattctctgctctcagtgataagaaacaaatattagctaccctgctaccctggttgaagccttccaaggctggctatgccctaggcatgggctcatccttgggtgtatcttgccttgcaggaagaccagtggaccgattgtgattctcaaaagctctgtgttgtcacctgtgcccttgccccttgctcttatcttggtccgtgtatctgggagttcttccaccttatcttggccaattcctaccttcgttcattcctcatgaggttgggtaaaagctccctccggctcccatgatgctgtgcatatacctagcaaaaagcaattattggacacattggagtgcaatattattaatagcattaatactactaataatgtgggcaatagtgattgtttttaaaaggcagtatactcttaccagtgcgaggtagctggggcctgtgatagtttttagagataagttcttcaggcaactgtgtattttacactagtcaagtaatcctagatatccgtggtttttcttaagaaagttggctcgtaatatgatttaatattcaaagtagagtcatctacctattagcttgctggcgtggtcctagtttatgcctgtttcagcatgattgttgagtaccctgtttcatccttagcattttcttgattttgttgttaaatgatgtatacccttatttccattgaatctgtgcttccacccccccaactgaagttgtcttccctttgcttggccacccttacagcctcttggatggtgtatcctacagtgtaagcactaaactgaagaggcagtgacctg

SEQ ID NO: 8577 - DNA, 1308 bp, Homo sapiens
  source 1..1308: mol_type = unassigned DNA; mol_type = unassigned DNA
aactacttaaatcttcccaaatctggtgcccataccttctatggcaggggcttttagcaccattctttaacgttagacacataaccacagcctaatcacttgaaccatttaatccttaccagcctctagcattatcctaaaaccctgaacctcttccagctttcttaaactttcagcttttcttgaaacgactttttctgattctaagattattttaactgtaagtaggagaagacatctgaaatttaactatgatcagaaattcagattacaaaaactttgtttgctgtgctgtttgtaataaaataattccaccagccccttttggaaaaaccttcaaacggatccatgaatacaagccacttaagacacgcttttacactcacaaagacatactagatattggggcaaatattctgaaaaaagaagagcagtttcaagaagatatactcagagaacacattgcgaaagcagaagctgaagtatgggctcaggctaatgaacgtcaaaaacaagcagtggagaaagcacttgaagaagcaaatgacagacacaaaattgaaattcagattttgaaagaggaacatcagaaagatttacaggaagtgacagctaaaactaagacagagatgtatcaaaacatggatgacgaaatgaagagagagcacttggctgcagaacagcgcatggtccacagaatccaaaggattatgatggaatgccacagagagaaggtcgaagctgtggagaaagccagggctgaagaaagacacatcgcccaggaagcaatccaggcccagaaaagcaaagccgtggaggaaattgtgaatactggtgtcacagttattaaggatgagaagaccagtgtggcccgactgatgagggaaaaagaacatgaaatgagcatcctctatggcatagctcagaggcagaggcaagaagaggtacaggaagtgcttcaagaagcagagaaaacacatcaggccactcttggcaatatgatggataaactggctaacacccagggggagctgctgtctatagcaaaacaactgggaatcatgacaaattggaaagatttcctagaggaggaattacaggaaaccaggatggcatttcaaaaatacatcaattatacctttcctaagctttcaccaggacatgcagattttattctgccagaaagaaagaaaacaccttctaatcttgttattaaggagaacaaaacaactcttgattagaagtcttcagttgaaattccactacaaaagacatcattccagactaaataaatttactcaaaaacca

SEQ ID NO: 8578 - DNA, 2110 bp, Homo sapiens
  source 1..2110: mol_type = unassigned DNA; mol_type = unassigned DNA
tatttctacacaatgttgggcttttgcagtatgtgtccatctccaccgtaatatatgctgccctgtgtttttaagattcgctgatgaactagtaggagactctgtgccgccaaacatatacttttaattgctagtgacagaaacataactcagaatagactgcatgaaatggaatttcttgactcttttaacagagaaacccaagggaaatctggcatcaaggctttcaatctgtccatgcttacccttttagtgagttggcttaatggtttactgctgcagctagacttactccggcagctgggaaaggaggaatgtggatccagatagctctaagaatctattaccttcagcttagaaatcccagaggaagaccaggcatggtggctcacgcctgtaatcctagcactttgggaggccgaagtgggcagatcacttgaggtcaagagttcgagaccagcctgaccaacatggtgaaagcccgtttctactaaaaatacaaaaattagtcaggcatggtggtgggcgcctgtaattccagctactcgggaggctgaggcaggagaatcacttgaaacgggaggcggaggttgcagtgagccgaaatggcgacactgcactgcaggctgggctacaaagcaagactccctctcaaaaaaaaagagaaatcccagtggaaaaagacctggctgtctgatattgcgtggtcctctagcctctctagacttttattaccttgtctgggtagagaggatattattatgggaatgttattatttggaaatcaaattagatcattgacagaaaaatagtaaacttctaccccttagctcactccatactgaagcagttaaacccacaaagaaccacatgctaaagaaaggcatgtaatgtgaaggcattccacttcccttctcctgatgctagccctagcacccaaataggaacagggagagagagagctgtataatgtgctaagacctcttgaatattcactcatcattctactttgggtgtacaaaatatgtccctttcttcgggcatttatttcacctccccagttgtctgctgtgtggactgggtgtgatgaggggaatgaccaactctatccaggcctgacagtgctgtgaattccctcctaatcagagaaaatcttactctttcaatgggtatctttgaaatatatatactggcatctcctaaaaggacgtgtctcctaaatagccctcataaataactagataatggtggaaaggaaagccaggaagcagtcggtggaggtttgtgaccattgctcttcaaatacacagatattggggcaaatattctgaaaaaagaagagcagtttcaagaagatatactcagagaacacattgcgaaagcagaagctgaagtatgggctcaggaagtgacagctaaaactaagacagagatgtatcaaaacatggatgacgaaatgaagagagagcacttggctgcagaacagcgcatggtccacagaatccaaaggattatgatggaatgccacagagagaaggtcgaagctgtggagaaagccagggctgaagaaagacacatcgcccaggaagcaatccaggcccagaaaagcaaagccgtggaggaaattgtgaatactggtgtcacagttattaaggatgagaagaccagtgtggcccgactgatgagggaaaaagaacatgaaatgagcatcctctatggcatagctcagaggcagaggcaagaagaggtacaggaagtgcttcaagaagcagagaaaacacatcaggccactcttggcaatatgatggataaactggctaacacccagggggagctgctgtctatagcaaaacaactgggaatcatgacaaattggaaagatttcctagaggaggaattacaggaaaccaggatggcatttcaaaaatacatcaattatacctttcctaagctttcaccaggacatgcagattttattctgccagaaagaaagaaaacaccttctaatcttgttattaaggagaacaaaacaactcttgattagaagtcttcagttgaaattccactacaaaagacatcattccagactaaataaatttactcaaaaacc

SEQ ID NO: 8579 - DNA, 718 bp, Homo sapiens
  source 1..718: mol_type = unassigned DNA; mol_type = unassigned DNA
aagttttccatatcatacacactcttcttttaaatcatcagtgttaacaggtacacttgctagcagatagataaaactatggtttaaatagcctcctaatgtgcagttttaaacattaagtctgtaatagctaaacctagttttgccattgcttcaggaagtgacagctaaaactaagacagagatgtatcaaaacatggatgacgaaatgaagagagagcacttggctgcagaacagcgcatggtccacagaatccaaaggattatgatggaatgccacagagagaaggtcgaagctgtggagaaagccagggctgaagaaagacacatcgcccaggaagcaatccaggcccagaaaagcaaagccgtggaggaaattgtgaatactggtgtcacagttattaaggatgagaagaccagtgtggcccgactgatgagggaaaaagaacatgaaatgagcatcctctatggcatagctcagaggcagaggcaagaagaggtacaggaagtgcttcaagaagcagagaaaacacatcaggccactcttggcaatatgatggataaactggctaacacccagggggagctgctgtctatagcaaaacaactgggaatcatgacaaattggaaagatttcctagaggaggaattacaggaaaccaggatggcatttcaaaaatacatcaattatacctttcctaagctttcaccaggacat

SEQ ID NO: 8580 - DNA, 612 bp, Homo sapiens
  source 1..612: mol_type = unassigned DNA; mol_type = unassigned DNA
gctgcccccaacaagcaaggctggatggactggtacaaatagcacataggtgctgcaagagttcaaagtcctggaaagatcaagcagtatgggtggggtatgtagtgagcaaagccgtggaggaaattgtgaatactggtgtcacagttattaaggatgagaagaccagtgtggcccgactgatgagggaaaaagaacatgaaatgagcatcctctatggcatagctcagaggcagaggcaagaagaggtacaggaagtgcttcaagaagcagagaaaacacatcaggccactcttggcaatatgatggataaactggctaacacccagggggagctgctgtctatagcaaaacaactgggaatcatgacaaattggaaagatttcctagaggaggaattacaggaaaccaggatggcatttcaaaaatacatcaattatacctttcctaagctttcaccaggacatgcagattttattctgccagaaagaaagaaaacaccttctaatcttgttattaaggagaacaaaacaactcttgattagaagtcttcagttgaaattccactacaaaagacatcattccagactaaataaatttactcaaaaacca

SEQ ID NO: 8581 - DNA, 2968 bp, Homo sapiens
  source 1..2968: mol_type = unassigned DNA; mol_type = unassigned DNA
gggctttgcctgtcattctgcagttctagtgtggggtctgggcgcagttcttttccctctccagcctcggagtcttcctctgtggactgcgcagataggactggtggcacggaccagctctgcagccctggagtcaggagcagagccccccggctcccagcccgccgtagccgctcctggcaccgagcgagccgcgatgacaatggctgcattgtgcttcatgtcccttcccatcaacatttctgtgctggactccttccactcgcgggtcgtctccagagctcagaaaatgaggtgatcagtgggacgagtaaggaaggggggttgggagaggggcgattgggcaacccggctgcacaaacacgggaggtcaaagattgcgcccagcccgcccaggccgggaatggaataaagggacgcggggcgccggaggctgcacagaagcgagtccgactgtgctcgctgctcagcgccgcacccggaagatgaggctcgccgtgggagccctgctggtctgcgccgtcctggggctgtgtctggctgtccctgataaaactgtgagatggtgtgcagtgtcggagcatgaggccactaagtgccagagtttccgcgaccatatgaaaagcgtcattccatccgatggtcccagtgttgcttgtgtgaagaaagcctcctaccttgattgcatcagggccattgcggcaaacgaagcggatgctgtgacactggatgcaggtttggtgtatgatgcttacctggctcccaataacctgaagcctgtggtggcagagttctatgggtcaaaagaggatccacagactttctattatgctgttgctgtggtgaagaaggatagtggcttccagatgaaccagcttcgaggcaagaagtcctgccacacgggtctaggcaggtccgctgggtggaacatccccataggcttactttactgtgacttacctgagccacgtaaacctcttgagaaagcagtggccaatttcttctcgggcagctgtgccccttgtgcggatgggacggacttcccccagctgtgtcaactgtgtccagggtgtggctgctccacccttaaccaatacttcggctactcgggagccttcaagtgtctgaaggatggtgctggggatgtggcctttgtcaagcactcgactatatttgagaacttggcaaacaaggctgacagggaccagtatgagctgctttgcctggacaacacccggaagccggtagatgaatacaaggactgccacttggcccaggtcccttctcataccgtcgtggcccgaagtatgggcggcaaggaggacttgatctgggagcttctcaaccaggcccaggaacattttggcaaagacaaatcaaaagaattccaactattcagctctcctcatgggaaggacctgctgtttaaggactctgcccacgggtttttaaaagtcccccccaggatggatgccaagatgtacctgggctatgagtatgtcactgccatccggaatctacgggaaggcacatgcccagaagccccaacagatgaatgcaagcctgtgaagtggtgtgcgctgagccaccacgagaggctcaagtgtgatgagtggagtgttaacagtgtagggaaaatagagtgtgtatcagcagagaccaccgaagactgcatcgccaagatcatgaatggagaagctgatgccatgagcttggatggagggtttgtctacatagcgggcaagtgtggtctggtgcctgtcttggcagaaaactacaataagagcgataattgtgaggatacaccagaggcagggtattttgctatagcagtggtgaagaaatcagcttctgacctcacctgggacaatctgaaaggcaagaagtcctgccatacggcagttggcagaaccgctggctggaacatccccatgggcctgctctacaataagatcaaccactgcagatttgatgaatttttcagtgaaggttgtgcccctgggtctaagaaagactccagtctctgtaagctgtgtatgggctcaggcctaaacctgtgtgaacccaacaacaaagagggatactacggctacacaggcgctttcaggtgtctggttgagaagggagatgtggcctttgtgaaacaccagactgtcccacagaacactgggggaaaaaaccctgatccatgggctaagaatctgaatgaaaaagactatgagttgctgtgccttgatggtaccaggaaacctgtggaggagtatgcgaactgccacctggccagagccccgaatcacgctgtggtcacacggaaagataaggaagcttgcgtccacaagatattacgtcaacagcagcacctatttggaagcaacgtaactgactgctcgggcaacttttgtttgttccggtcggaaaccaaggaccttctgttcagagatgacacagtatgtttggccaaacttcatgacagaaacacatatgaaaaatacttaggagaagaatatgtcaaggctgttggtaacctgagaaaatgctccacctcatcactcctggaagcctgcactttccgtagaccttaaaatctcagaggtagggctgccaccaaggtgaagatgggaacgcagatgatccatgagtttgccctggtttcactggcccaagtggtttgtgctaaccacgtctgtcttcacagctctgtgttgccatgtgtgctgaacaaaaaataaaaattattattgattttatatttcaaaaactccattctttcctaaatattttcaacaaaggatttctttatgcattctgcctaaatacctatgcaactgagcccttccttctcagctcaagattcgtctggtctttccctacagctttgtgtgtgccatggccacatctcctgggtacagttcaaggagacatcttttctaaaagggtctgcgtgatcattaaaatataatcaaatgta

SEQ ID NO: 8582 - DNA, 526 bp, Homo sapiens
  source 1..526: mol_type = unassigned DNA; mol_type = unassigned DNA
gactgcgcagataggactggtggcacggaccagctctgcagccctggagtcaggagcagagccccccggctcccagcccgccgtagccgctcctggcaccgagcgagccgcgatgacaatggctgcattgtgcttcatgtcccttcccatcaacatttctgtgctggactccttccactcgcgggtcgtctccagagctcagaaaatgagggctgtgtctggctgtccctgataaaactgtgagatggtgtgcagtgtcggagcatgaggccactaagtgccagagtttccgcgaccatatgaaaagcgtcattccatccgatggtcccagtgttgcttgtgtgaagaaagcctcctaccttgattgcatcagggccattgcggcaaacgaagcggatgctgtgacactggatgcaggtttggtgtatgatgcttacctggctcccaataacctgaagcctgtggtggcagagttctatgggtcaaaagaggatccacagactttctattatgctgttgctgtggt

SEQ ID NO: 8583 - DNA, 645 bp, Homo sapiens
  source 1..645: mol_type = unassigned DNA; mol_type = unassigned DNA
aaagattgcgcccagcccgcccaggccgggaatggaataaagggacgcggggcgccggaggctgcacagaagcgagtccgactgtgctcgctgctcagcgccgcacccggaagatgaggctcgccgtgggagccctgctggtctgcgccgtcctggggctgtgtctggctgtccctgataaaactgtgagatggtgtgcagtgtcggagcatgaggccactaagtgccagagtttccgcgaccatatgaaaagcgtcattccatccgatggtcccagtgttgcttgtgtgaagaaagcctcctaccttgattgcatcagggccattgcggcaaacgaagcggatgctgtgacactggatgcaggtttggtgtatgatgcttacctggctcccaataacctgaagcctgtggtggcagagttctatgggtcaaaagagggtaagttctccctgggaccccaggaaggagttgtcatccttattctatatgctgagtgctgtgttttacaggcaggttttggatatcagatataatgaacattcatctttggagagtgagtagagaatgaggggccctgtcagctgccacagccacacatcaaggcctctgggggctttgggctggctgaggactggtgctcctaaa

SEQ ID NO: 8584 - DNA, 577 bp, Homo sapiens
  source 1..577: mol_type = unassigned DNA
acagaagcgagtccgactgtgctcgctgctcagcgccgcacccggaagatgaggctcgccgtgggagccctgctggtctgcgccgtcctgggcaaacgaagcggatgctgtgacactggatgcaggtttggtgtatgatgcttacctggctcccaataacctgaagcctgtggtggcagagttctatgggtcaaaagagggtaagttctccctgggaccccaggaaggagttgtcatccttattctatatgctgagtgctgtgttttacaggcaggttttggatatcagatataatgaacattcatctttggagagtgagtagagaatgaggggccctgtcagctgccacagccacacatcaaggcctctgggggctttgggctggctgaggactggtgctcctaaaactgagccctgggccaggggcatatgcttatcagagaaacacagcaggctgtgtgcagcttgacctgaaggctactgcggtctactgatatgtctagggtccctggaggcctctggagccataggtaccactcacacaggaggggtcactctggagcacacactcagagg

SEQ ID NO: 8585 - DNA, 546 bp, Homo sapiens
  source 1..546: mol_type = unassigned DNA
acagaagcgagtccgactgtgctcgctgctcagcgccgcacccggaagatgaggctcgccgtgggagccctgctggtctgcgccgtcctggggctgtgtctggctgtccctgataaaactgtgagatggtgtgcagtgtcggagcatgaggccactaagtgccagagtttccgcgaccatatgaaaagcgtcattccatccgatggtcccagtgttgcttgtgtgaagaaagcctcctaccttgattgcatcagggccattgcggtaagtcgctgctgcctaaaagagagtggaagaaagccatactttctctgtttccagtcactttggaacaattctttactcacaggcaaacgaagcggatgctgtgacactggatgcaggtttggtgtatgatgcttacctggctcccaataacctgaagcctgtggtggcagagttctatgggtcaaaagaggatccacagactttctattatgctgttgctgtggtgaagaaggatagtggcttccagatgaaccagcttcgaggcaagaagtcctgcca

SEQ ID NO: 8586 - DNA, 594 bp, Homo sapiens
  source 1..594: mol_type = unassigned DNA
acagaagcgagtccgactgtgctcgctgctcagcgccgcacccggaagatgaggctcgccgtgggagccctgctggtctgcgccgtcctggggctgtgtctggctgtccctgataaaactgtgagatggtgtgcagtgtcggagcatgaggccactaagtgccagagtttccgcgaccatatgaaaagcgtcattccatccgatggtcccagtgttgcttgtgtgaagaaagcctcctaccttgattgcatcagggccattgcggcaaacgaagcggatgctgtgacactggatgcaggtttggtgtatgatgcttacctggctcccaataacctgaagcctgtggtggcagagttctatgggtcaaaagaggactttctattatgctgttgctgtggtgaagaaggatagtggcttccagatgaaccagcttcgaggcaagaagtcctgccacacgggtctaggcaggtccgctgggtggaacatccccataggcttactttactgtgacttacctgagccacgtaaacctcttgagaaagcagtggccaatttcttctcgggcagctgtgccccttgtgcggatgggacgga

SEQ ID NO: 8587 - DNA, 999 bp, Homo sapiens
  source 1..999: mol_type = unassigned DNA; mol_type = unassigned DNA
acagaagcgagtccgactgtgctcgctgctcagcgccgcacccggaagatgaggctcgccgtgggagccctgctggtctgcgccgtcctggggctgtgtctggctgtccctgataaaactgtgagatggtgtgcagtgtcggagcatgaggccactaagtgccagagtttccgcgaccatatgaaaagcgtcattccatccgatggtcccagtgttgcttgtgtgaagaaagcctcctaccttgattgcatcagggccattgcggcaaacgaagcggatgctgtgacactggatgcaggtttggtgtatgatgcttacctggctcccaataacctgaagcctgtggtggcagagttctatgggtcaaaagaggatccacagactttctattatgctgttgctgtggtgaagaaggatagtggcttccagatgaaccagcttcgaggcaagaagtcctgccacacgggtctaggcaggtccgctgggtggaacatccccataggcttactttactgtgacttacctgagccacgtaaacctcttgagaaagcagtggccaatttcttctcgggcagctgtgccccttgtgcggatgggacggacttcccccagctgtgtcaactgtgtccagggtgtggctgctccacccttaaccaatacttcggctactcgggagccttcaagtgagtgagatgtctgctgctccatggtggccaaagtgccaaatgtcctcagggtgagagttctttgctggtccaaagccgagccctgcctgcctacaggggcatcgaggtggcctaatcccctcccagtgagtcagaagcacaacctgggactcctaggccaagccagcccatgttccctttcatctgaccctgacaagtaggtccttttcctggggacccttcctttctccccagagccctcaagcctggtcagtgtctcctctcggtggatcgggcagagcctgaaaggacaatcatgcctctagtgtctggg

SEQ ID NO: 8588 - DNA, 659 bp, Homo sapiens
  source 1..659: mol_type = unassigned DNA; mol_type = unassigned DNA
acagaagcgagtccgactgtgctcgctgctcagcgccgcacccggaagatgaggctcgccgtgggagccctgctggtctgcgccgtcctgggcaaacgaagcggatgctgtgacactggatgcaggtttggtgtatgatgcttacctggctcccaataacctgaagcctgtggtggcagagttctatgggtcaaaagaggatccacagactttctattatgctgttgctgtggtgaagaaggatagtggcttccagatgaaccagcttcgaggcaagaagtcctgccacacgggtctaggcaggtccgctgggtggaacatccccataggcttactttactgtgacttacctgagccacgtaaacctcttgagaaagcagtggccaatttcttctcgggcagctgtgccccttgtgcggatgggacggacttcccccagctgtgtcaactgtgtccagggtgtggctgctccacccttaaccaatacttcggctactcgggagccttcaagtgtctgaaggatggtgctggggatgtggcctttgtcaagcactcgactatatttgagaacttggcaaacaaggctgacagggaccagtatgagctgctttgcctggacaacacccggaagccggtagatgaatacaaggactgccact

SEQ ID NO: 8589 - DNA, 580 bp, Homo sapiens
  source 1..580: mol_type = unassigned DNA; mol_type = unassigned DNA
acagaagcgagtccgactgtgctcgctgctcagcgccgcacccggaagatgaggctcgccgtgggagccctgctggtctgcgccgtcctggggctgtgtctggctgtccctgataaaactgtgagatggtgtgcagtgtcggagcatgaggccactaagtgccagagtttccgcgaccatatgaaaagcgtcattccatccgatggtcccttctcataccgtcgtggcccgaagtatgggcggcaaggaggacttgatctgggagcttctcaaccaggcccaggaacattttggcaaagacaaatcaaaagaattccaactattcagctctcctcatgggaaggacctgctgtttaaggactctgcccacgggtttttaaaagtcccccccaggatggatgccaagatgtacctgggctatgagtatgtcactgccatccggaatctacgggaaggcacatgcccagaagccccaacagatgaatgcaagcctgtgaagtggtgtgcgctgagccaccacgagaggctcaagtgtgatgagtggagtgttaacagtgtagggaaaatagagtgtgtatca

SEQ ID NO: 8590 - DNA, 586 bp, Homo sapiens
  source 1..586: mol_type = unassigned DNA; mol_type = unassigned DNA
attcatggggcatttgtcacactgttggggcttccacgtttagttttctctccccataagctagcaattccttgagagaggaccccacgttacttgcctttatccccgcacagagcacttcacaggctgtgcaagggctgtgtctggctgtccctgataaaactgtgagatggtgtgcagtgtcggagcatgaggccactaagtgccagagtttccgcgaccatatgaaaagcgtcattccatccgatggtcccagtgttgcttgtgtgaagaaagcctcctaccttgattgcatcagggccattgcggcaaacgaagcggatgctgtgacactggatgcaggtttggtgtatgatgcttacctggctcccaataacctgaagcctgtggtggcagagttctatgggtcaaaagaggatccacagactttctattatgctgttgctgtggtgaagaaggatagtggcttccagatgaaccagcttcgaggcaagaagtcctgccacacgggtctaggcaggtccgctgggtggaacatccccataggcttactttactgtgacttacctgagccacgtaaacctct

SEQ ID NO: 8591 - DNA, 719 bp, Homo sapiens
  source 1..719: mol_type = unassigned DNA; mol_type = unassigned DNA
agattgtcatctccagctgggaggtgatggccatgcctgcacccctctggccagcagagggtggtcagtaggaaactgggaggccattagggcaaccttctattggctcagactcagaatgcagtagaacttgtgccctgtagtgttcatggacaggagtgagaggaggacaggactgaggggatgtggctgtcaaggcctttctaggggcgatgctgtctctccctcagcatagggagtgggcccttccacctctggcctctctcccccagggctgtgtctggctgtccctgataaaactgtgagatggtgtgcagtgtcggagcatgaggccactaagtgccagagtttccgcgaccatatgaaaagcgtcattccatccgatggtcccagtgttgcttgtgtgaagaaagcctcctaccttgattgcatcagggccattgcggcaaacgaagcggatgctgtgacactggatgcaggtttggtgtatgatgcttacctggctcccaataacctgaagcctgtggtggcagagttctatgggtcaaaagaggatccacagactttctattatgctgttgctgtggtgaagaaggatagtggcttccagatgaaccagcttcgaggcaagaagtcctgccacacgggtctaggcaggtccgctgggtggaacatccccataggcttactttactgtgacttacctgagccacgtaaac

SEQ ID NO: 8592 - DNA, 990 bp, Homo sapiens
  source 1..990: mol_type = unassigned DNA; mol_type = unassigned DNA
ggtattttgctatagcagtggtgaagaaatcagcttctgacctcacctgggacaatctgaaaggcaagaagtcctgccatacggcagttggcagaaccgctggctggaacatccccatgggcctgctctacaataagatcaaccactgcagatttgatgaatttttcagtgaaggttgtgcccctgggtctaagaaagactccagtctctgtaagctgtgtatgggctcaggcctaaacctgtgtgaacccaacaacaaagagggatactacggctacacaggcgctttcaggtgtctggttgagaagggagatgtggcctttgtgaaacaccagactgtcccacagaacactggggagacaatacagaaaagaagaggcaaaggggccgagatgggatacagacctgtatcacacaggaaaaaaccctgatccatgggctaagaatctgaatgaaaaagactatgagttgctgtgccttgatggtaccaggaaacctgtggaggagtatgcgaactgccacctggccagagccccgaatcacgctgtggtcacacggaaagataaggaagcttgcgtccacaagatattacgtcaacagcagcacctatttggaagcaacgtaactgactgctcgggcaacttttgtttgttccggtcggaaaccaaggaccttctgttcagagatgacacagtatgtttggccaaacttcatgacagaaacacatatgaaaaatacttaggagaagaatatgtcaaggctgttggtaacctgagaaaatgctccacctcatcactcctggaagcctgcactttccgtagaccttaaaatctcagaggtagggctgccaccaaggtgaagatgggaacgcagatgatccatgagtttgccctggtttcactggcccaagtggtttgtgctaaccacgtctgtcttcacagctctgtgttgccatgtgtgctgaacaaaaaataaaaattattattgatt

SEQ ID NO: 8593 - DNA, 582 bp, Homo sapiens
  source 1..582: mol_type = unassigned DNA; mol_type = unassigned DNA
aatttttcagtgaaggttgtgcccctgggtctaagaaagactccagtctctgtaagctgtgtatgggctcaggcctaaacctgtgtgaacccaacaacaaagagggatactacggctacacaggcgctttcaggtgtctggttgagaagggagatgtggcctttgtgaaacaccagactgtcccacagaacactgggggtaagtgcacctgctcctctgtccccctagatcactagatcctggtcactggtattcacttgtattcagggatgcctttgtggaagtattatgtacactgtcagacttcaaagctctgattctcagtctgtctgctcagtgaagagagacatgttcacctgagtgcgcagaatgatcaggattatggggcccccaatggccctaaatcctccccaacacacactcccacagctgcaagccttgtgctcctttcccctaaatacttcagtgcctatttcctaagaataagacaatctcttgcatacccacagtatgattaccaagatcaggatcttttacattatgtggatttaatactcgtcacgtccacagtccacatttaac

SEQ ID NO: 8594 - DNA, 4602 bp, Homo sapiens
  source 1..4602: mol_type = unassigned DNA; mol_type = unassigned DNA
gacaacatgatttttaagagccaaagtaattttgatgtattgtaagtttgggaactactggtctaatacccctgacttaatatcacattcctgataaatattactaaatgtaagtcacatcatgtctgattcatcatacttatattttgcaccttcttaccttcttctgttattaatttgttgctttttcaacttatattttagattgagggtacatatgcaggtttgttacatggtatactgcatgatgctgaggtttgcggtatgattgaacctgtcacccaggtagtgagcatagcacacaacaggtagcttttcaactcttgcccccctctctccctcctccaaaatctgtcttaagtgctatggtatatacaagaaggaagacacaaaaccacgtgggctttttttttttcttttttttctttttgagatggagtctcactttgttgctaggctggagtgcagtgatgtgatctcagctcactgcaaactccgcctcccagatttaagtgattctcctgcctcagcctcccaagtagctgggactacaggcgtgcaccaccacgaccagctaatttttgtatttttagtagagacggggtttcaccatgttggccaggatggtctccatctcttggcctcatgatccgcccacctcggcctctcaaaagtgctgggattacaggtgtgacccaccgcgctcagcccacatgggctcttttatcacaatttgtgtgtgtgtgtgtgtgtgtgtgtgtgtgtatgtgcatattataggtgtgtgtaggaaaaagaatgttagaaatgtaccaattttgaaggcgtagactatgaaattacaaatgcttcaaaattttcttcccaatacttacgtggcattttataaatttccaccaataaacgtgtattatttttattgaaaaagcatatttttaacatgcccttctagatgccctcctagccagactgaatcacctcccatttgatttttcttaattttctacctttaggttctggctcattcattaacatcaatttccattcataagtcctcacaaacccacttttcctcttgcctgagtgcctcacataccctactgcctgagatggttccagaggcggtctcctctctcccttagaaacaccaggcacacacctgcccccagtctcgcctgcactctcctttcctcccgcagagaggcattcctttctcctcctctcatcctacacacactataagagacaactgaaatcttgcctcctccagccagcttcttaattcatttgttctcaaagccctggtttgagctcacacagcatctagagtgttttacaaaatataaaatattattatccctgccctgaattttttgttttggtatgtgtgttattttcccctccaataagattgtgccttggagagggctgagaacatagtatcatagataaatgaataaaataacataaaataaaataaaaatacatataccctttgaactaactattccacttctatgtaagcacaattatatgccagtaacactcattttaacgctactttagtggcaaaaaattgtaaacacctcagatgcctattaaaagaggaatggtttaaagatactattatagccacactatgaaatataatacagtagttaagaagaacgagcttgatttgtatgtactgacaagaagaatctataaggtatgtaaacagttgaaaaaaaagctacagagttttacatttgtcaagatctaacactaaacaaaattagaaacatgtgaaatccatatacacacgtagaaaaatacatataatgagccgtggatggaaactcgcaaatgtgatattaaagactagcactataagactgagtgagatttggagagtataggaaaggaggcttttagttaatatagagagatattcaaaaatttatgagtgtgatctcatgtattagttattcggttaaagaaacaaaattaaatgaaaaatacatttttaaaaaggttgcaattctgaattatgggagagaaataaaaattagcaaaacatatttgcaaagtggctcaggaggaaggagctgaaaccctaagaatgggtgagttttttttttttttcagagacaatacagaaaagaagaggcaaaggggccgagatgggatacagacctgtatcacacaggtgtgtgcacattctcatttagaactggaacaagggagtcagatttaaaattctggtgcagattccaaaggtgttctctgaggaaaagttcttttgtttggagatgccatgtgttacagcacagaaattgatcaacctggcttagagcgtcacattcttcctctgttggagcaagaggtacagaaggaattggaatttagtggaattgaagatctttttgaacagcatctgcagaatgtagttcattctcacctggctgggtagggaaggttggaaggggatggtcaataatcattcctggtcactgtgagtctggcatcaccttgtagaccacatgggtgtctcttcctgtccacatcactgtaaccccagtgtgggcacttctgctggcgagaaggcccaggttctctacacaccactgagtcagttccatctccccagcggggcaccttgaccaaagccatcagctgaaccaccttcttcctgtccctaggaaaaaaccctgatccatgggctaagaatctgaatgaaaaagactatgagttgctgtgccttgatggtaccaggaaacctgtggaggagtatgcgaactgccacctggccagagccccgaatcacgctgtggtcacacggaaagataaggaagcttgcgtccacaagatattacgtcaacagcagcacctatttggaagcaacgtaactgactgctcgggcaacttttgtttgttccggtcggaaaccaaggaccttctgttcagagatgacacagtatgtttggccaaacttcatgacagaaacacatatgaaaaatacttaggagaagaatatgtcaaggctgttggtaacctgagaaaatgctccacctcatgtgagtaggaggaacagcatggggaagtggcaaccaaacatggtggtgagtgctgggatggtgggtgggtacaggaggggtaggctgtggcccttgggataggacaacatggacaaaatgaaatggtgagtgaacaatctaagcccggcatgtatgacaggctagactgtaggggcagatagtaaggggatacaggctcagagcactaaggtagtgaacttattgggtatagagaattccatcttatttctaagaaaaggactgggtttatgtgtacatgccattgctctgcagtaaacttttgattagagttgccttgtccaatatggtagccaccagcaagatgtgactatttaaatttaagttaattaaaattaaactaaataaaagatgtatttcttcaatcccacctagctgcatttcaagtgctcaacagccacatgtggctccatattggtcagcaaagagaatgtttgcatcatcacagaaagctctttcagacagtgctgctctagacagcttcaacaatgataggttctggtaaccataaagttgctatgcatactactcatttggaacaccagtttctgagaactgaaatagaataaaacacatctttgcagtataactatgttgggtgtaactgagtcacctgaaaaagtttggaagctggggaataacatgtggtgtagggcagttagtctttccacaggagtatgcagataagggagtcttgatccttattaaaatgctgattctcagagccttgagatactgatttagaaagtctgtgctaggtcaggtatccgcatttgaaaagctgcccccatgtaattctgacggaagcagcaatgtgcttgtctaggttcgctattgtgagaatcaagttgatatttacctaacctatatcctccacaaaagcagacagtctggctctgctcttctttcctccatccttagcccacagcacagaaactggcacattgcaggtgctttttgctatgtcagttcctcacctgcttaaagaggtcagggaggacagtcttcctgggcgactcctggcctcaggaactcagatgtgtgagcctcgcccataagaaacaaggtggaggaccctgtagggcaggaaaatcatgttaacagctttggcgtggggcactccccaggataggcacaggagctgtgcaggcaagtagaaaagagcactgggagaacggcccagttcacagaagaggaggcagcaagtctgcacactttgtactatgctgaaattgttcaatcactcgacagttcagaaataaatataggaagattttgaaaatcctacctctctgctctgctccacagcactcctggaagcctgcactttccgtagaccttaaaatctcagaggtagggctgccaccaaggtgaagatgggaacgcagatgatccatgagtttgccctggtttcactggcccaagtggtttgtgctaaccacgtctgtcttcacagctctgtgttgccatgtgtgctgaacaaaaaataaaaattattattgatttt

SEQ ID NO: 8595 - DNA, 2968 bp, Homo sapiens; identical to SEQ ID NO: 8581
  source 1..2968: mol_type = unassigned DNA; mol_type = unassigned DNA

SEQ ID NO: 8596 - DNA, 526 bp, Homo sapiens; identical to SEQ ID NO: 8582
  source 1..526: mol_type = unassigned DNA; mol_type = unassigned DNA

SEQ ID NO: 8597 - DNA, 645 bp, Homo sapiens; identical to SEQ ID NO: 8583
  source 1..645: mol_type = unassigned DNA; mol_type = unassigned DNA

SEQ ID NO: 8598 - DNA, 577 bp, Homo sapiens; identical to SEQ ID NO: 8584
  source 1..577: mol_type = unassigned DNA; mol_type = unassigned DNA

SEQ ID NO: 8599 - DNA, 546 bp, Homo sapiens; identical to SEQ ID NO: 8585
  source 1..546: mol_type = unassigned DNA; mol_type = unassigned DNA

SEQ ID NO: 8600 - DNA, 594 bp, Homo sapiens; identical to SEQ ID NO: 8586
  source 1..594: mol_type = unassigned DNA; mol_type = unassigned DNA

SEQ ID NO: 8601 - DNA, 999 bp, Homo sapiens; identical to SEQ ID NO: 8587
  source 1..999: mol_type = unassigned DNA; mol_type = unassigned DNA

SEQ ID NO: 8602 - DNA, 659 bp, Homo sapiens; identical to SEQ ID NO: 8588
  source 1..659: mol_type = unassigned DNA; mol_type = unassigned DNA

SEQ ID NO: 8603 - DNA, 580 bp, Homo sapiens; identical to SEQ ID NO: 8589
  source 1..580: mol_type = unassigned DNA; mol_type = unassigned DNA

SEQ ID NO: 8604 - DNA, 586 bp, Homo sapiens; identical to SEQ ID NO: 8590
  source 1..586: mol_type = unassigned DNA; mol_type = unassigned DNA

SEQ ID NO: 8605 - DNA, 719 bp, Homo sapiens; identical to SEQ ID NO: 8591
  source 1..719: mol_type = unassigned DNA; mol_type = unassigned DNA

SEQ ID NO: 8606 - DNA, 990 bp, Homo sapiens; identical to SEQ ID NO: 8592
  source 1..990: mol_type = unassigned DNA; mol_type = unassigned DNA

SEQ ID NO: 8607 - DNA, 582 bp, Homo sapiens; identical to SEQ ID NO: 8593
  source 1..582: mol_type = unassigned DNA; mol_type = unassigned DNA

SEQ ID NO: 8608 - DNA, 4602 bp, Homo sapiens; identical to SEQ ID NO: 8594
  source 1..4602: mol_type = unassigned DNA; mol_type = unassigned DNA

SEQ ID NO: 8609 - DNA, 4378 bp, Homo sapiens
  source 1..4378: mol_type = unassigned DNA; mol_type = unassigned DNA
ggcgacgagtgcgggcctcggagcgactgcagcggcggcggcggacgcggcctgaggcgagcggcggggcgtggggcggtgcctcggcccgggctcgccctcgccggcgggagcgtccatggcccccgggcgccggcggggcgcggccgcggcctgaggggccatgtccggggtggtgcggaccctcagccgctgcctgctgccggccgaggccggcggggcccgcgagcgcagggcgggcagcggcgcgcgcgacgcggagcgcgaggcccggaggcgtagccgcgacatcgacgcgctgctggcccgcgagcggcgcgcggtccggcgcctggtgaagatcctgctgctgggcgcgggcgagagcggcaagtccacgttcctcaagcagatgcgcatcatccacggccgcgagttcgaccagaaggcgctgctggagttccgcgacaccatcttcgacaacatcctcaagggctcaagggttcttgttgatgcacgagataagcttggcattccttggcagtattctgaaaatgagaagcatgggatgttcctgatggccttcgagaacaaggcggggctgcctgtggagccggccaccttccagctgtacgtcccggccctgagcgcactctggagggattctggcatcagggaggctttcagccggagaagcgagtttcagctgggggagtcggtgaagtacttcctggacaacttggaccggatcggccagctgaattactttcctagtaagcaagatatcctgctggctaggaaagccaccaagggaattgtggagcatgacttcgttattaagaagatcccctttaagatggtggatgtgggcggccagcggtcccagcgccagaagtggttccagtgcttcgacgggatcacgtccatcctgttcatggtctcctccagcgagtacgaccaggtcctcatggaggacaggcgcaccaaccggctggtggagtccatgaacatcttcgagaccatcgtcaacaacaagctcttcttcaacgtctccatcattctcttcctcaacaagatggacctcctggtggagaaggtgaagaccgtgagcatcaagaagcacttcccggacttcaggggcgacccgcacaggctggaggacgtccagcgctacctggtccagtgcttcgacaggaagagacggaaccgcagcaagccactcttccaccacttcaccaccgccatcgacaccgagaacgtccgcttcgtgttccatgctgtgaaagacaccatcctgcaggagaacctgaaggacatcatgctgcagtgagcgaggaagccccggggtttgtcgtcgttgagcagcccccacggctgtcggtcagactcttgggtgtgtgttgtctgtgtggtccttgagtgggtttctcggatccgtgccctggaatacctggctcaggaatgctgtcagaccagccagccagcgagctctaggcaaaaggacatggaaactgtcacgttagctactgaatcctgggggcgagtgaaactactgaaaatccgagtgatgatgttgtgaatacggaacacctaatcacacagcttgctttgcttttacagaaacgttcctctttttctgacgcagtttaattgaggaccgtgttgtgtgtgtatgtgtgtacacacgctctgtctttaatgacagaaacacaaaaaccagctggccttgcagacggcttttctaactcacaagtcttccctgagacagactaacctgaaagctttgcctaacagtagcttgtagagatccagtgcacgccgatgctgctaaactcagtgcctgagcccggccctgcagccccagccgcagtgtctgaaggccacctcccaaagggagcacgttgccttttcaaactcccgtgccgatttcctaagagcccctagtccaagcctctcagatgaagctgaggagccgtgcctaggatcccttcccagctctgaggacgggctgcagagctctgcaggtgtggattcaccttacgcccctacagcaggctcagcccttcccaccctgccccatgcccagcagcacaacacggagtgagacaggatgcccacggtgactgccgctccgtccgtgcacacacagcggtgctcttctccccttagccacccactgcccaacccaacggcaaagacacagaaaccaggtccccttgcagacggctctcccatcttcctgcaagtcatctgctcacacacagttggcagcacatagcgtttccttctttcagaaacattcctcttctggggcttcagaaagctggcaaggccactagcagagcttttgttaatgccccagctgcttggcgagctaacagctgacctttcgggaagcccacagacgctggaggaatcttgagtttctccaaactgccgctccaccagtgcctttggacagccgtgcctgttcgccgctctccctaagtctgattctcatcgaggcccctcgcttctatgactgtgcttgcagaagagtaaacactctcggatgccgctgtcctgggggagcccgcgggagcctgtgaatgttgatacgagctggccagtcctgggcccagctcacttgtccagctacctgccaggtggctttcactgtgtttaaaatacattgcattccaagctggtcccctctgtgtatcactctactgagaaatcctgcctagtgtgttttgggatgtgtcctagcatttacaagaaaatgaaaagcgtcctcttaattggcacccgaatgttgctgtggctcagtcacatatcccagggccctcgtcccgaggccgtgctgccccgagccccgagcccctctgcagctcacccttggcttgttttccgcaaacccggtaaacgcaagcccttggggcagatgcagaagcagaagagggaggggaaacctgcctctgggtcaccctgttagcacagcgttctcatcgggagacagcatggaactctctctcgcagtgctcgaggctgtgtgtcagtgtttgctgggcttgtggctccttttttggctggataaagaagtcgctgtttttgtactgcttctgtggctcttcacagacctcacggatgtgaccggagatgagtgccgatgaccacgttttaaaggagaaagagagctcctggtggggccctcggggtggtctcaggtcccatttgcagtctgcaacagtgacgcgcagcccggtccggagcgtggtgagctttgtttgccttctgggtcagctttcgctgtgtctcctgtgtgtgttagaatccagagcccagaggaagtgcaagcgggtcctccgccaacggggagagcctcttcgcggcgctgttggcgacagcagcgctgtgattcgcgtagcaggggagttgtttgaaacaccttcctgagtagtccggccttgtcaatgagtgcttgttttcctttaaacagtctgacatatttactcgtcactttcaaaccagaagcatgagaggaaggagatattgtggggtccgtttaactcgatagaaagcgcagggggatggcccccggcgcgggctcttgacccgctcagcgctgaccccaccgccctggccgaggcacttggccttgctgagctggacttcctcctcctcctcctcatgaccggggtgaattagaacgtttttaaagacacccccttccaaattctgtaacacattgtaattggagaagaaggaaactctgcaaggctaaactgtcattcacaacttggctacacatagactctagtcagttttgtctccagaaccttaggcttttgtattttttaattttaatttcactgttaatccttattgtcttttttattaagatgttggaaaagcaggaggtagttgtgcctcaattattgcaaaaatgtaacaataaagttcctcaaaataagatctgttcctcatagctatactgtgtacacataagacgcatatagggttttactgaaatctatttttaactcttatgttcgtagagaaattgtttcaaggattttgagtcataggtctgtaatttatagagatctctagaattcttattgtaattttcctacttctttgataaaagaaaaataagtcagattgttaactccaagattgaaaaaaaaaactcttgaaagaagattattagttgtaactaatttaggggttctgggcacagacatctaacctggtattgtaaggcagaggctcccattggaatggtagtggtccgggtcagttgttcatggtgtaagctttgcacagtgtattaacattgggagggtctggcttgaaaatttggccaccctcagcctctgaatgtttattaaaataaatttagtctttctttgcttaa

SEQ ID NO: 8610 - DNA, 3375 bp, Homo sapiens
  source 1..3375: mol_type = unassigned DNA; mol_type = unassigned DNA
gtgtgtgtgtgtgtgtgttggggtgtcttgtgaagtcctgctaacctcttgtcagcagaatattcgagaaatgcttctgagaagagagaggaagatgacttcagaggctgcttgtggtctctcactcaaggctgggggagtcggtgaagtacttcctggacaacttggaccggatcggccagctgaattactttcctagtaagcaagatatcctgctggctaggaaagccaccaagggaattgtggagcatgacttcgttattaagaagatcccctttaagatggtggatgtgggcggccagcggtcccagcgccagaagtggttccagtgcttcgacgggatcacgtccatcctgttcatggtctcctccagcgagtacgaccaggtcctcatggaggacaggcgcaccaaccggctggtggagtccatgaacatcttcgagaccatcgtcaacaacaagctcttcttcaacgtctccatcattctcttcctcaacaagatggacctcctggtggagaaggtgaagaccgtgagcatcaagaagcacttcccggacttcaggggcgacccgcacaggctggaggacgtccagcgctacctggtccagtgcttcgacaggaagagacggaaccgcagcaagccactcttccaccacttcaccaccgccatcgacaccgagaacgtccgcttcgtgttccatgctgtgaaagacaccatcctgcaggagaacctgaaggacatcatgctgcagtgagcgaggaagccccggggtttgtcgtcgttgagcagcccccacggctgtcggtcagactcttgggtgtgtgttgtctgtgtggtccttgagtgggtttctcggatccgtgccctggaatacctggctcaggaatgctgtcagaccagccagccagcgagctctaggcaaaaggacatggaaactgtcacgttagctactgaatcctgggggcgagtgaaactactgaaaatccgagtgatgatgttgtgaatacggaacacctaatcacacagcttgctttgcttttacagaaacgttcctctttttctgacgcagtttaattgaggaccgtgttgtgtgtgtatgtgtgtacacacgctctgtctttaatgacagaaacacaaaaaccagctggccttgcagacggcttttctaactcacaagtcttccctgagacagactaacctgaaagctttgcctaacagtagcttgtagagatccagtgcacgccgatgctgctaaactcagtgcctgagcccggccctgcagccccagccgcagtgtctgaaggccacctcccaaagggagcacgttgccttttcaaactcccgtgccgatttcctaagagcccctagtccaagcctctcagatgaagctgaggagccgtgcctaggatcccttcccagctctgaggacgggctgcagagctctgcaggtgtggattcaccttacgcccctacagcaggctcagcccttcccaccctgccccatgcccagcagcacaacacggagtgagacaggatgcccacggtgactgccgctccgtccgtgcacacacagcggtgctcttctccccttagccacccactgcccaacccaacggcaaagacacagaaaccaggtccccttgcagacggctctcccatcttcctgcaagtcatctgctcacacacagttggcagcacatagcgtttccttctttcagaaacattcctcttctggggcttcagaaagctggcaaggccactagcagagcttttgttaatgccccagctgcttggcgagctaacagctgacctttcgggaagcccacagacgctggaggaatcttgagtttctccaaactgccgctccaccagtgcctttggacagccgtgcctgttcgccgctctccctaagtctgattctcatcgaggcccctcgcttctatgactgtgcttgcagaagagtaaacactctcggatgccgctgtcctgggggagcccgcgggagcctgtgaatgttgatacgagctggccagtcctgggcccagctcacttgtccagctacctgccaggtggctttcactgtgtttaaaatacattgcattccaagctggtcccctctgtgtatcactctactgagaaatcctgcctagtgtgttttgggatgtgtcctagcatttacaagaaaatgaaaagcgtcctcttaattggcacccgaatgttgctgtggctcagtcacatatcccagggccctcgtcccgaggccgtgctgccccgagccccgagcccctctgcagctcacccttggcttgttttccgcaaacccggtaaacgcaagcccttggggcagatgcagaagcagaagagggaggggaaacctgcctctgggtcaccctgttagcacagcgttctcatcgggagacagcatggaactctctctcgcagtgctcgaggctgtgtgtcagtgtttgctgggcttgtggctccttttttggctggataaagaagtcgctgtttttgtactgcttctgtggctcttcacagacctcacggatgtgaccggagatgagtgccgatgaccacgttttaaaggagaaagagagctcctggtggggccctcggggtggtctcaggtcccatttgcagtctgcaacagtgacgcgcagcccggtccggagcgtggtgagctttgtttgccttctgggtcagctttcgctgtgtctcctgtgtgtgttagaatccagagcccagaggaagtgcaagcgggtcctccgccaacggggagagcctcttcgcggcgctgttggcgacagcagcgctgtgattcgcgtagcaggggagttgtttgaaacaccttcctgagtagtccggccttgtcaatgagtgcttgttttcctttaaacagtctgacatatttactcgtcactttcaaaccagaagcatgagaggaaggagatattgtggggtccgtttaactcgatagaaagcgcagggggatggcccccggcgcgggctcttgacccgctcagcgctgaccccaccgccctggccgaggcacttggccttgctgagctggacttcctcctcctcctcctcatgaccggggtgaattagaacgtttttaaagacacccccttccaaattctgtaacacattgtaattggagaagaaggaaactctgcaaggctaaactgtcattcacaacttggctacacatagactctagtcagttttgtctccagaaccttaggcttttgtattttttaattttaatttcactgttaatccttattgtcttttttattaagatgttggaaaagcaggaggtagttgtgcctcaattattgcaaaaatgtaacaataaagttcctcaaaat

SEQ ID NO: 8611 - DNA, 3918 bp, Homo sapiens
  source 1..3918: mol_type = unassigned DNA; mol_type = unassigned DNA
atttaagcagcctccttgactgtaggtccgctgactggcttcctccttgagagcacactcacagtgccggaccgcaggcacctcgccgatgttcctgtccacttgctttttgtattgctccttctccagtgagcttggaagcctcatgcgggcaaggccttgtctgtctggttctctgttgtgtcctcggagcctgccacagtggcggcgcttggtggctttgacaggggactggattgggtggaaggggcgagattagacctggatacagtgacgtccttgtcagccatgccgagtgcagagcgcctactgtattgtaggcatttgaaatgaaacggagaatgtttcccaggccgtgcctagcaaggatgcctggcagtcgtggttcgggaagcacaccagatggaaaccgaaagtgctgccgttttgagcacctactcattgcacaccctgggtccaggggctcaagggttcttgttgatgcacgagataagcttggcattccttggcagtattctgaaaatgagaagcatgggatgttcctgatggccttcgagaacaaggcggggctgcctgtggagccggccaccttccagctgtacgtcccggccctgagcgcactctggagggattctggcatcagggaggctttcagccggagaagcgagtttcagctgggggagtcggtgaagtacttcctggacaacttggaccggatcggccagctgaattactttcctagtaagcaagatatcctgctggctaggaaagccaccaagggaattgtggagcatgacttcgttattaagaagatcccctttaagatggtggatgtgggcggccagcggtcccagcgccagaagtggttccagtgcttcgacgggatcacgtccatcctgttcatggtctcctccagcgagtacgaccaggtcctcatggaggacaggcgcaccaaccggctggtggagtccatgaacatcttcgagaccatcgtcaacaacaagctcttcttcaacgtctccatcattctcttcctcaacaagatggacctcctggtggagaaggtgaagaccgtgagcatcaagaagcacttcccggacttcaggggcgacccgcacaggctggaggacgtccagcgctacctggtccagtgcttcgacaggaagagacggaaccgcagcaagccactcttccaccacttcaccaccgccatcgacaccgagaacgtccgcttcgtgttccatgctgtgaaagacaccatcctgcaggagaacctgaaggacatcatgctgcagtgagcgaggaagccccggggtttgtcgtcgttgagcagcccccacggctgtcggtcagactcttgggtgtgtgttgtctgtgtggtccttgagtgggtttctcggatccgtgccctggaatacctggctcaggaatgctgtcagaccagccagccagcgagctctaggcaaaaggacatggaaactgtcacgttagctactgaatcctgggggcgagtgaaactactgaaaatccgagtgatgatgttgtgaatacggaacacctaatcacacagcttgctttgcttttacagaaacgttcctctttttctgacgcagtttaattgaggaccgtgttgtgtgtgtatgtgtgtacacacgctctgtctttaatgacagaaacacaaaaaccagctggccttgcagacggcttttctaactcacaagtcttccctgagacagactaacctgaaagctttgcctaacagtagcttgtagagatccagtgcacgccgatgctgctaaactcagtgcctgagcccggccctgcagccccagccgcagtgtctgaaggccacctcccaaagggagcacgttgccttttcaaactcccgtgccgatttcctaagagcccctagtccaagcctctcagatgaagctgaggagccgtgcctaggatcccttcccagctctgaggacgggctgcagagctctgcaggtgtggattcaccttacgcccctacagcaggctcagcccttcccaccctgccccatgcccagcagcacaacacggagtgagacaggatgcccacggtgactgccgctccgtccgtgcacacacagcggtgctcttctccccttagccacccactgcccaacccaacggcaaagacacagaaaccaggtccccttgcagacggctctcccatcttcctgcaagtcatctgctcacacacagttggcagcacatagcgtttccttctttcagaaacattcctcttctggggcttcagaaagctggcaaggccactagcagagcttttgttaatgccccagctgcttggcgagctaacagctgacctttcgggaagcccacagacgctggaggaatcttgagtttctccaaactgccgctccaccagtgcctttggacagccgtgcctgttcgccgctctccctaagtctgattctcatcgaggcccctcgcttctatgactgtgcttgcagaagagtaaacactctcggatgccgctgtcctgggggagcccgcgggagcctgtgaatgttgatacgagctggccagtcctgggcccagctcacttgtccagctacctgccaggtggctttcactgtgtttaaaatacattgcattccaagctggtcccctctgtgtatcactctactgagaaatcctgcctagtgtgttttgggatgtgtcctagcatttacaagaaaatgaaaagcgtcctcttaattggcacccgaatgttgctgtggctcagtcacatatcccagggccctcgtcccgaggccgtgctgccccgagccccgagcccctctgcagctcacccttggcttgttttccgcaaacccggtaaacgcaagcccttggggcagatgcagaagcagaagagggaggggaaacctgcctctgggtcaccctgttagcacagcgttctcatcgggagacagcatggaactctctctcgcagtgctcgaggctgtgtgtcagtgtttgctgggcttgtggctccttttttggctggataaagaagtcgctgtttttgtactgcttctgtggctcttcacagacctcacggatgtgaccggagatgagtgccgatgaccacgttttaaaggagaaagagagctcctggtggggccctcggggtggtctcaggtcccatttgcagtctgcaacagtgacgcgcagcccggtccggagcgtggtgagctttgtttgccttctgggtcagctttcgctgtgtctcctgtgtgtgttagaatccagagcccagaggaagtgcaagcgggtcctccgccaacggggagagcctcttcgcggcgctgttggcgacagcagcgctgtgattcgcgtagcaggggagttgtttgaaacaccttcctgagtagtccggccttgtcaatgagtgcttgttttcctttaaacagtctgacatatttactcgtcactttcaaaccagaagcatgagaggaaggagatattgtggggtccgtttaactcgatagaaagcgcagggggatggcccccggcgcgggctcttgacccgctcagcgctgaccccaccgccctggccgaggcacttggccttgctgagctggacttcctcctcctcctcctcatgaccggggtgaattagaacgtttttaaagacacccccttccaaattctgtaacacattgtaattggagaagaaggaaactctgcaaggctaaactgtcattcacaacttggctacacatagactctagtcagttttgtctccagaaccttaggcttttgtattttttaattttaatttcactgttaatccttattgtcttttttattaagatgttggaaaagcaggaggtagttgtgcctcaattattgcaaaaatgtaacaataaagttcctcaaaat

SEQ ID NO: 8612 - DNA, 3785 bp, Homo sapiens
  source 1..3785: mol_type = unassigned DNA; mol_type = unassigned DNA
aatgcttctgagaagagagaggaagatgacttcagaggctgcttgtggtctctcactcaaggctggtagggagccccggtctgcgtcctggaggaacggcacgctgagtcctgggccagtggccggcggggctgttggcgaccacagtagcacacaagggctctttctgaggagcaggagaccctggcacgggccccacgggagtgtctggggcgtccccgcctgtggcctcttctccccgccgcagcaccaatggctccacgagcagggctcggagctggccctctcctgcttcggagccgcgctgactgggtgtgtggcggatgggaggccgccctgagtgctcctcctcccttttgtacagcctgggtggaaaggacgggcctggtgcacttcctgcgggagggaggacatggggcctgcttccctctggcgctcctccacccgggcagcgtggtttctttccaaatgatttatcctctcatcgtcctgccgctctgtgcttcatggcattggggtcttatccggaaggggattgtccttttttggggggagtcggtgaagtacttcctggacaacttggaccggatcggccagctgaattactttcctagtaagcaagatatcctgctggctaggaaagccaccaagggaattgtggagcatgacttcgttattaagaagatcccctttaagatggtggatgtgggcggccagcggtcccagcgccagaagtggttccagtgcttcgacgggatcacgtccatcctgttcatggtctcctccagcgagtacgaccaggtcctcatggaggacaggcgcaccaaccggctggtggagtccatgaacatcttcgagaccatcgtcaacaacaagctcttcttcaacgtctccatcattctcttcctcaacaagatggacctcctggtggagaaggtgaagaccgtgagcatcaagaagcacttcccggacttcaggggcgacccgcacaggctggaggacgtccagcgctacctggtccagtgcttcgacaggaagagacggaaccgcagcaagccactcttccaccacttcaccaccgccatcgacaccgagaacgtccgcttcgtgttccatgctgtgaaagacaccatcctgcaggagaacctgaaggacatcatgctgcagtgagcgaggaagccccggggtttgtcgtcgttgagcagcccccacggctgtcggtcagactcttgggtgtgtgttgtctgtgtggtccttgagtgggtttctcggatccgtgccctggaatacctggctcaggaatgctgtcagaccagccagccagcgagctctaggcaaaaggacatggaaactgtcacgttagctactgaatcctgggggcgagtgaaactactgaaaatccgagtgatgatgttgtgaatacggaacacctaatcacacagcttgctttgcttttacagaaacgttcctctttttctgacgcagtttaattgaggaccgtgttgtgtgtgtatgtgtgtacacacgctctgtctttaatgacagaaacacaaaaaccagctggccttgcagacggcttttctaactcacaagtcttccctgagacagactaacctgaaagctttgcctaacagtagcttgtagagatccagtgcacgccgatgctgctaaactcagtgcctgagcccggccctgcagccccagccgcagtgtctgaaggccacctcccaaagggagcacgttgccttttcaaactcccgtgccgatttcctaagagcccctagtccaagcctctcagatgaagctgaggagccgtgcctaggatcccttcccagctctgaggacgggctgcagagctctgcaggtgtggattcaccttacgcccctacagcaggctcagcccttcccaccctgccccatgcccagcagcacaacacggagtgagacaggatgcccacggtgactgccgctccgtccgtgcacacacagcggtgctcttctccccttagccacccactgcccaacccaacggcaaagacacagaaaccaggtccccttgcagacggctctcccatcttcctgcaagtcatctgctcacacacagttggcagcacatagcgtttccttctttcagaaacattcctcttctggggcttcagaaagctggcaaggccactagcagagcttttgttaatgccccagctgcttggcgagctaacagctgacctttcgggaagcccacagacgctggaggaatcttgagtttctccaaactgccgctccaccagtgcctttggacagccgtgcctgttcgccgctctccctaagtctgattctcatcgaggcccctcgcttctatgactgtgcttgcagaagagtaaacactctcggatgccgctgtcctgggggagcccgcgggagcctgtgaatgttgatacgagctggccagtcctgggcccagctcacttgtccagctacctgccaggtggctttcactgtgtttaaaatacattgcattccaagctggtcccctctgtgtatcactctactgagaaatcctgcctagtgtgttttgggatgtgtcctagcatttacaagaaaatgaaaagcgtcctcttaattggcacccgaatgttgctgtggctcagtcacatatcccagggccctcgtcccgaggccgtgctgccccgagccccgagcccctctgcagctcacccttggcttgttttccgcaaacccggtaaacgcaagcccttggggcagatgcagaagcagaagagggaggggaaacctgcctctgggtcaccctgttagcacagcgttctcatcgggagacagcatggaactctctctcgcagtgctcgaggctgtgtgtcagtgtttgctgggcttgtggctccttttttggctggataaagaagtcgctgtttttgtactgcttctgtggctcttcacagacctcacggatgtgaccggagatgagtgccgatgaccacgttttaaaggagaaagagagctcctggtggggccctcggggtggtctcaggtcccatttgcagtctgcaacagtgacgcgcagcccggtccggagcgtggtgagctttgtttgccttctgggtcagctttcgctgtgtctcctgtgtgtgttagaatccagagcccagaggaagtgcaagcgggtcctccgccaacggggagagcctcttcgcggcgctgttggcgacagcagcgctgtgattcgcgtagcaggggagttgtttgaaacaccttcctgagtagtccggccttgtcaatgagtgcttgttttcctttaaacagtctgacatatttactcgtcactttcaaaccagaagcatgagaggaaggagatattgtggggtccgtttaactcgatagaaagcgcagggggatggcccccggcgcgggctcttgacccgctcagcgctgaccccaccgccctggccgaggcacttggccttgctgagctggacttcctcctcctcctcctcatgaccggggtgaattagaacgtttttaaagacacccccttccaaattctgtaacacattgtaattggagaagaaggaaactctgcaaggctaaactgtcattcacaacttggctacacatagactctagtcagttttgtctccagaaccttaggcttttgtattttttaattttaatttcactgttaatccttattgtcttttttattaagatgttggaaaagcaggaggtagttgtgcctcaattattgcaaaaatgtaacaataaagttcctc

SEQ ID NO: 8613 - DNA, 2450 bp, Homo sapiens
  source 1..2450: mol_type = unassigned DNA; mol_type = unassigned DNA
tttgtgccgtcagcaagccgggctgtgtctcagcctcacagcactcctcccacgggcctgggaaggcaaatgtgttttctgaactgtgttgagaccgtgtgtgtgtgtgtgtgtgtgtgtgtgtgtgtgtgtgtgttggggtgtcttgtgaagtcctgctaacctcttgtcagcagaatattcgagaaatgcttctgagaagagagaggaagatgacttcagaggctgcttgtggtctctcactcaagtgaggaaagtgggaaccgccataccgtgtctggattcggtgggatcgtgtgtgtccagcagcagtcgcgcagcgcctggcgtgagtggtgggtgcacgccggccccgccatgtgcaccttctgtgacgaccctaagtcagggtggtgtttcctagcagtgcagaacacgaagcccttacaacttctcctagaaacgaagcctgggttgacccctccacctcaggggggagtcggtgaagtacttcctggacaacttggaccggatcggccagctgaattactttcctagtaagcaagatatcctgctggctaggaaagccaccaagggaattgtggagcatgacttcgttattaagaagatcccctttaagatggtggatgtgggcggccagcggtcccagcgccagaagtggttccagtgcttcgacgggatcacgtccatcctgttcatggtctcctccagcgagtacgaccaggtcctcatggaggacaggcgcaccaaccggctggtggagtccatgaacatcttcgagaccatcgtcaacaacaagctcttcttcaacgtctccatcattctcttcctcaacaagatggacctcctggtggagaaggtgaagaccgtgagcatcaagaagcacttcccggacttcaggggcgacccgcacaggctggaggacgtccagcgctacctggtccagtgcttcgacaggaagagacggaaccgcagcaagccactcttccaccacttcaccaccgccatcgacaccgagaacgtccgcttcgtgttccatgctgtgaaagacaccatcctgcaggagaacctgaaggacatcatgctgcagtgagcgaggaagccccggggtttgtcgtcgttgagcagcccccacggctgtcggtcagactcttgggtgtgtgttgtctgtgtggtccttgagtgggtttctcggatccgtgccctggaatacctggctcaggaatgctgtcagaccagccagccagcgagctctaggcaaaaggacatggaaactgtcacgttagctactgaatcctgggggcgagtgaaactactgaaaatccgagtgatgatgttgtgaatacggaacacctaatcacacagcttgctttgcttttacagaaacgttcctctttttctgacgcagtttaattgaggaccgtgttgtgtgtgtatgtgtgtacacacgctctgtctttaatgacagaaacacaaaaaccagctggccttgcagacggcttttctaactcacaagtcttccctgagacagactaacctgaaagctttgcctaacagtagcttgtagagatccagtgcacgccgatgctgctaaactcagtgcctgagcccggccctgcagccccagccgcagtgtctgaaggccacctcccaaagggagcacgttgccttttcaaactcccgtgccgatttcctaagagcccctagtccaagcctctcagatgaagctgaggagccgtgcctaggatcccttcccagctctgaggacgggctgcagagctctgcaggtgtggattcaccttacgcccctacagcaggctcagcccttcccaccctgccccatgcccagcagcacaacacggagtgagacaggatgcccacggtgactgccgctccgtccgtgcacacacagcggtgctcttctccccttagccacccactgcccaacccaacggcaaagacacagaaaccaggtccccttgcagacggctctcccatcttcctgcaagtcatctgctcacacacagttggcagcacatagcgtttccttctttcagaaacattcctcttctggggcttcagaaagctggcaaggccactagcagagcttttgttaatgccccagctgcttggcgagctaacagctgacctttcgggaagcccacagacgctggaggaatcttgagtttctccaaactgccgctccaccagtgcctttggacagccgtgcctgttcgccgctctccctaagtctgattctcatcgaggcccctcgcttctatgactgtgcttgcagaagagtaaacactctcggatgccgctgtcctgggggagcccgcgggagcctgtgaatgttgatacgagctggccagtcctgggcccagctcacttgtccagctacctgccaggtggctttcactgtgtttaaaatacattgcattccaagctgg

SEQ ID NO: 8614 - DNA, 1205 bp, Homo sapiens
  source 1..1205: mol_type = unassigned DNA; mol_type = unassigned DNA
agggctcaagggttcttgttgatgcacgagataagcttggcattccttggcagtattctgaaaatgagaagcatgggatgttcctgatggccttcgagaacaaggcggggctgcctgtggagccggccaccttccagctgtacgtcccggccctgagcgcactctggagggattctggcatcagggaggctttcagccggagaagcgagtttcagctggtgagtgagtaggccttcttgctgggcacctgatagtgtgttttttacatgactattttggaccgttagttgaatttccttaaaaactgtgtaacagtccaagcaagctctaaatcaccgtaagttgtaatgatcaacaaccaaaacacgggatggaggcagatgctatataaaaggctcaagaggggaaggagcaagagccactcagggggagtcggtgaagtacttcctggacaacttggaccggatcggccagctgaattactttcctagtaagcaagatatcctgctggctaggaaagccaccaagggaattgtggagcatgacttcgttattaagaagatcccctttaagatggtggatgtgggcggccagcggtcccagcgccagaagtggttccagtgcttcgacgggatcacgtccatcctgttcatggtctcctccagcgagtacgaccaggtcctcatggaggacaggcgcaccaaccggctggtggagtccatgaacatcttcgagaccatcgtcaacaacaagctcttcttcaacgtctccatcattctcttcctcaacaagatggacctcctggtggagaaggtgaagaccgtgagcatcaagaagcacttcccggacttcaggggcgacccgcacaggctggaggacgtccagcgctacctggtccagtgcttcgacaggaagagacggaaccgcagcaagccactcttccaccacttcaccaccgccatcgacaccgagaacgtccgcttcgtgttccatgctgtgaaagacaccatcctgcaggagaacctgaaggacatcatgctgcagtgagcgaggaagccccggggtttgtcgtcgttgagcagcccccacggctgtcggtcagactcttgggtgtgtgttgtctgtgtggtccttgagtgggtttctcggatccgtgccctggaatacctggctcaggaatgctgtcagaccagccagccagcgag

SEQ ID NO: 8615 - DNA, 562 bp, Homo sapiens
  source 1..562: mol_type = unassigned DNA; mol_type = unassigned DNA
tgcttaccacagcgtccgggaaagaccactgacattgattgctttgatctcctgggtgattggcagtgagccagttcagatcctctgacttggtgtccccctggtgtactgggggagtcggtgaagtacttcctggacaacttggaccggatcggccagctgaattactttcctagtaagcaagatatcctgctggctaggaaagccaccaagggaattgtggagcatgacttcgttattaagaagatcccctttaagatggtggatgtgggcggccagcggtcccagcgccagaagtggttccagtgcttcgacgggatcacgtccatcctgttcatggtctcctccagcgagtacgaccaggtcctcatggaggacaggcgcaccaaccggctggtggagtccatgaacatcttcgagaccatcgtcaacaacaagctcttcttcaacgtctccatcattctcttcctcaacaagatggacctcctggtggagaaggtgaagaccgtgagcatcaagaagcacttcccggacttcaggggcgacccgcacaggctggagg

SEQ ID NO: 8616 - DNA, 559 bp, Homo sapiens
  source 1..559: mol_type = unassigned DNA; mol_type = unassigned DNA
tttaagcagcctccttgactgtaggtccgctgactggcttcctccttgagagcacactcacagtgccggaccgcaggcacctcgccgatgttcctgtccacttgctttttgtattgctccttctccagtgagcttggaagcctcatgcgggcaaggccttgtctgtctggttctctgttgtgtcctcggagcctgccacagtggcggcgcttggtggctttgacaggggactggattgggtggaaggggcgagattagacctggatacagtgacgtccttgtcagccatgccgagtgcagagcgcctactgtattgtaggcatttgaaatgaaacggagaatgtttcccaggccgtgcctagcaaggatgcctggcagtcgtggctcaagggttcttgttgatgcacgagataagcttggcattccttggcagtattctgaaaatgagaagcatgggatgttcctgatggccttcgagaacaaggcggggctgcctgtggagccggccaccttccagctgtacgtcccggccctgagcgcactctggagggattctggc

SEQ ID NO: 8617 - DNA, 6535 bp, Homo sapiens
  source 1..6535: mol_type = unassigned DNA; mol_type = unassigned DNA
tcctacacccagctttccgtcctcggttactatcgcccaagatcaaagccaccctggttttctgattgccgcaactgcggctccaggtgctgagtgcacagccactgcggcactgtccgcagctgcgcgccgggctcagacggcattatttacggtacagaatactcgcccgcgcgacggtatttacggtaacggggaccagcctgggcggcagtatttacggtaacgaaagccagctgtatttacggtagcgagggctggaccggcggcggcatttacggtaacgggggccgggctcgcggaggcccgtcggttcggtccgctctgggcgttagcaagtgatctccagccaaggcggccgccaccccttgcacacagcagaaaatgcaaaatgaccctctggggcagtgaggggctgtggccctcggccccggcctgccgcacccccttcccgcagctggcggccggcagcgccgaacagggtccgggtgcagccccctcccgcccctccgctgaggcgccggcctgaactgggcgcgggaaccaggccgccctcggcgcccagcctgccctagtcccgcgcgccgcccccgctgtgccgcgcccacatgggtctgtgctacagtctgcggccgctgcttttcgggggcccaggggacgacccctgcgcggcctcggagccgccggtggaggacgcgcagcccgccccggccccggccctggccccagtccgggcggccgcaagggacacggcccggaccctgctccctcggggcggcgaagggagcccggcatgcgctcggcccaaagcagacaagccgaaggagaagcggcagcgcaccgagcagctgagtgccgaggagcgcgaggcggccaaggagcgcgaggcggtcaaggaggcgaggaaagtgagccggggcatcgaccgcatgctgcgcgaccagaagcgcgacctgcagcagacgcaccggctcctgctgctcggggctggtgagtctgggaaaagcactatcgtcaaacagatgaggatcctgcacgtcaatgggtttaatcccgaggaaaagaaacagaaaattctggacatccggaaaaatgttaaagatgctatcgtgacaattgtttcagcaatgagtactataatacctccagttccgctggccaaccctgaaaaccaatttcgatcagactacatcaagagcatagcccctatcactgactttgaatattcccaggaattctttgaccatgtgaaaaaactttgggacgatgaaggcgtgaaggcatgctttgagagatccaacgaataccagctgattgactgtgcacaatacttcctggaaagaatcgacagcgtcagcttggttgactacacacccacagaccaggacctcctcagatgcagagttctgacatctgggatttttgagacacgattccaagtggacaaagtaaacttccacatgtttgatgttggtggccagagggatgagaggagaaaatggatccagtgctttaacgatgtcacagctatcatttacgtcgcagcctgcagtagctacaacatggtgattcgagaagataacaacaccaacaggctgagagagtccctggatctttttgaaagcatctggaacaacaggtggttacggaccatttctatcatcttgttcttgaacaaacaagatatgctggcagaaaaagtcttggcagggaaatcaaaaattgaagactatttcccagaatatgcaaattatactgttcctgaagacgcaacaccagatgcaggagaagatcccaaagttacaagagccaagttctttatccgggacctgtttttgaggatcagcacggccaccggtgacggcaaacattactgctacccgcacttcacctgcgccgtggacacagagaacatccgcagggtgttcaacgactgccgcgacatcatccagcggatgcacctcaagcagtatgagctcttgtgaggatgctgccgccaccctgcgacggagcggcgccccggactgcctgactgccagccccatgccatggtaggaggcagagtctctagttccatctcgctgccgtctgtcccgttctgtgtcgaccaccaagcctctggctacctctgtcccctcaggtttggttgtgtagcttctgttgtcattgaatacggcctcccgcagcatcccacccccaaaccaccgactctcattgccgacactgcagcagaatctctccgggtgggagccccattattcattctccctttattgattcatcgaggagaacttggtagatggggagaaaacacagttggtttttttttccacgttatcaaccgtgactgcaagagcgttcgtgcagtgccctgagccacggccgtctctgattctccctttatgaagctgcaggctgacgagagatggtcccttcccattggccttagcccaagacttggagtcgaccccaagcgacagagtgaccagaaacccttttacagtcacattcagagtcgctgctggcctcaggcatttgaattagagctactttgagcctcttaggcagaaaacctaccacattcactactgcaaaatgtgtcctgtctaaaaatgattctctaaactttccctatacttaggcatagtcttctttcttagattctctttgttgttgtccctattgctggtttattacactgtacagaccacaaaatgtaatattcttttgtataactactaaagaaaaatccttgtagatctttgtgccttcaccatggctatctatacctgtacatgaaatgtgtttgtattgtgctgaagagcttaatgtcaacattacctgctgcttactctgaaaaaaggaatgaatggtagctgtagaatttaggatattttatcaggttggcactttataaaatactccctgatttaaaaaattgtaagttatacacgttaatcatccacattctatcgacaatgtaccaacatcacaagctgttgcaaccacctgctgttacttctctgagctgtaaaaacctgaactcaattcaggggtacaaattgcaatctaatcttttcagggaaccagggatttttttctctctctctagacaatatgtttcctcattagtctgctaatgaaacacttcttcaagttccccaagtgggaacaggtccatcattcccttagtcaaaactttggacacaggctacgtcatacaagtaagcaaacagtaagagaaaaacaaaatgtggccaggcgcggtggctcacgcctgtaatcccagcactttgggaggccgaggcaggcggatcacgaggccaggagatcaagaccatcctggctaacatggcgaaaccctgtctctaccaaaaatacaaaaattagccaggcgtggtggcgggcacctgtaatctcagctactcgagaggctgaggcaggagaatctcttgaacctgggaggtggagattgcagtgagccgaggtcgtgccatcgcactccagcctggacatcaaagtgagactcaggccaaaaaaaaaaaaaaaaaaaaccttgacgtgtcaatgtttgtgtctggcctaggagaatgaggatgacagcttcacttgccttttgaagaagaaacattacaaaaccttaatctgaagtataaagtcaaaagatacggctctttctcacacttgcaagacttacaaatacagcctcaaacattatgacacaccaacaatatctagaaagtaagaactggtgtagcaatgatgcttcatattctagctgtagccacagagttgagggtagtttttgtaggtctaaaataataatctataaagatgtccaaagttaaattttcaacaatacaaatctagagaagtgacagcctacattacttcattattactcttcttttagtctttagtctttaatattttaaagtttactctataaatcagcattttgtaatcctttataaactcatccagatttaaatgctactttttcatgaagaaaggataactttatagacagtcagtgcaacacacacattttatctcatcaccgtcttactgcctccccatccactgtctcataaagccctcagctgaactaagataaataatacaatggaaattattttcagttccccttgcactgtcaaagtaaaacaagaaaactgaaaagctgcacccccagcaagaaagggaagtatgctgttgtatgcatcattactcaacaattaccctctaactaaacatcctgtttaagagtttaattcaaacaacagccagactgttaagaaaaaaaacaaaaagaataacttttatctggcttacaattattaaagcatttattttcaggtaccaaaagccatatcccattccactttttaagtttcttttgatcactgacaggcattaacagatgtagcaacgtggtctcctatagagaaaattacacttatctaaaaatctgattccattaattgatcaagtataaaaatctacgaaaacaatatgttctgcacatcacatctgtacttttttttttttaaatatattttttgagacggagtctcactctgttgcccaggctggagtgcagtggcatgatcttggctcactgcaacctccgcctcccgggctcaagggattctcctgcctcagcctcagctggtattataggcacttgctaccatgcttggctaatttttgtatttctagcggagacgaggtttcaccatgttggccaggctggtcttgaactcctgacctcaagtgatccacccgcctcagcctcccaaagtgctgggattacaggtgtgagccactgtgcccggccacatctgtacttttaagggtacagctttacagtacataggaatttgagaaccacttcacaggaagagggaaacagcccaatatttatttatgtatacacataatcccaagtgtgtgctggggccaccaggcccttcctgggggaacaaggactgtcgtgcatgtgagtgacgacattaatagcatttacatactgtacagatgcaacctttgatgatacatatatttgataaaaatgagaaaacagatttgttgtagagtacctgtccacttttatagcatgagaacagtacaatcaactatttattttgcagttactcatttcagtgattgagaatttctgtgctgtgcagagagacggcctgtaattggtctcatcatccacttgattctaacatgatctctgcccaaagttccatttcttgggctttgatatttataatggcgcctgctcttcatcttgtcttacgctttccgagcaagttcaaaccagaaagaaaaggtgaggctagaagcccaaagtgagtgagtgtgaggaccacaaggaagcccaccactccacagtagatgatcaaaaccacatcctcacgtgggaggtagcacttggagagggtgtagtctgtgggcgtgatgctaccctggaaaggagaagggaaagttatgctgagagcaccaggcacacgttgaacaccgcagtcttagaaacagcagagggaagactgccttctcaggtccccctcaggtgaggcagggaacgggccctcctcacctgagaccaagggggcccagccttctccctgcacagctcacccccgaccagcccaggctccagcaggagagacaagtaaggcccaagtgtgcctgagtggaaaatgtctgggacactgacctgtcaaaactggcccctggctcactgggttcccatcaaatatagtgggggatccataacagagattcagagaggcaccgtggagttccagggtcatcggtcagcgaggaacaaggagggaaaggtgtcttcctgccccttgatgctcaactaagcatctgttccctagaaatacatgtgtccaggtcgtctccatgggcttttctttgcagatacttttatgtggaacaacagtggcaaatgttttcatttactttgaatttgaaaatgttagggtttcctccacctttttatgaagtaaaagaacctgtcgtaccagcatcatgagctggatgcaggagcccatggctgaaaggagttaaaacgcccagtggtcattaagtgaaacatcttttatcaacctgcaaaagctgcagcgttctctgccaggtcaaatgggcatgtttagaaaataagagaagatggctgagtatagctaatgaataaatggttgtttctttagaaaattaaacacacacagagtgtaagaggagaggatacggccctccctgaaggataaagtccacctggacggtgccctgccctcgcttctcacattaactgcccaggaatgtcatgctgattggttcccggaagggtgtttggcaaggggcagtgtatggagctacgtgtagaaggagagaaatttgtgtgtggcttttgtaaattttgaccgattgcagcaattaaatagttgattactgtgttgatttaaatacttatgaaagctttcagacaaaaataaactttcacgttaccatgatgaaa

SEQ ID NO: 8618 - DNA, 471 bp, Homo sapiens
  source 1..471: mol_type = unassigned DNA; mol_type = unassigned DNA
gcggccgcaagggacacggcccggaccctgctccctcggggcggcgaagggagcccggcatgcgctcggcccaaagcagacaagccgaaggagaagcggcagcgcaccgagcagctgagtgccgaggagcgcgaggcggccaaggagcgcgaggcggtcaaggaggcgaggaaagtgagccggggcatcgaccgcatgctgcgcgaccagaagcgcgacctgcagcagacgcaccggctcctgctgctcggtacttcgggagcatctagagggcgtgatttggagtctgctagccaggaggccacaggagaaacacaggtcagccccagaatcatggagcacacatttgcctcgaccccagctgtattttcttttctgggaaaatatcagcccctggaattaggccagacacaggaatctgtagatacaaagctcgctagcagagcaagactcagaacgcaagagtggcac

SEQ ID NO: 8619 - DNA, 1285 bp, Homo sapiens
  source 1..1285: mol_type = unassigned DNA; mol_type = unassigned DNA
agtctagaagctgagcagaacaaaggcggtgtgactgcaggaaagagaggagccgtcgcaggagccgcacacgtctccaactctctattgctttttgcgcacattcctaacttcctgacgtccatcccagcgggcaggcatggggtgtttgggcggcaacagcaagacgacggaagaccagggcgtcgatgaaaaagaacgacgcgaggccaacaaaaagatcgagaagcagttgcagaaagagcgcctggcttacaaggctacccaccgcctgctgctcctgggggctggtgagtctgggaaaagcactatcgtcaaacagatgaggatcctgcacgtcaatgggtttaatcccgaggaaaagaaacagaaaattctggacatccggaaaaatgttaaagatgctatcgtgacaattgtttcagcaatgagtactataatacctccagttccgctggccaaccctgaaaaccaatttcgatcagactacatcaagagcatagcccctatcactgactttgaatattcccaggaattctttgaccatgtgaaaaaactttgggacgatgaaggcgtgaaggcatgctttgagagatccaacgaataccagctgattgactgtgcacaatacttcctggaaagaatcgacagcgtcagcttggttgactacacacccacagaccaggacctcctcagatgcagagttctgacatctgggatttttgagacacgattccaagtggacaaagtaaacttccacatgtttgatgttggtggccagagggatgagaggagaaaatggatccagtgctttaacgatgtcacagctatcatttacgtcgcagcctgcagtagctacaacatggtgattcgagaagataacaacaccaacaggctgagagagtccctggatctttttgaaagcatctggaacaacaggtggttacggaccatttctatcatcttgttcttgaacaaacaagatatgctggcagaaaaagtcttggcagggaaatcaaaaattgaagactatttcccagaatatgcaaattatactgttcctgaagacgcaacaccagatgcaggagaagatcccaaagttacaagagccaagttctttatccgggacctgtttttgaggatcagcacggccaccggtgacggcaaacattactgctacccgcacttcacctgcgccgtggacacagagaacatccgcagggtgttcaacgactgccgcgacatcatccagcggatgcacctcaagcagtatgagctcttgtga

SEQ ID NO: 8620 - DNA, 1722 bp, Homo sapiens
  source 1..1722: mol_type = unassigned DNA; mol_type = unassigned DNA
ggtgagcctcggagggatcctcctccctgctagaatatgcatgatcctccgcgagtcttcgcccgccaggagcagggacgcgtccgagccaacacggggcgcgcgcccagacgcactttcccggctcggggtgcaagagagccaggcggccgcggcgcagcggaggggctgcgggcccggaacccaggccggtcagcgtcaggaaagagaggagccgtcgcaggagccgcacacgtctccaactctctattgctttttgcgcacattcctaacttcctgacgtccatcccagcgggcaggcatggggtgtttgggcggcaacagcaagacgacggaagaccagggcgtcgatgaaaaagaacgacgcgaggccaacaaaaagatcgagaagcagttgcagaaagagcgcctggcttacaaggctacccaccgcctgctgctcctgggggctggtgagtctgggaaaagcactatcgtcaaacagatgaggatcctgcacgtcaatgggtttaatcccgaggaaaagaaacagaaaattctggacatccggaaaaatgttaaagatgctatcgtgacaattgtttcagcaatgagtactataatacctccagttccgctggccaaccctgaaaaccaatttcgatcagactacatcaagagcatagcccctatcactgactttgaatattcccaggaattctttgaccatgtgaaaaaactttgggacgatgaaggcgtgaaggcatgctttgagagatccaacgaataccagctgattgactgtgcacaatacttcctggaaagaatcgacagcgtcagcttggttgactacacacccacagaccaggacctcctcagatgcagagttctgacatctgggatttttgagacacgattccaagtggacaaagtaaacttccacatgtttgatgttggtggccagagggatgagaggagaaaatggatccagtgctttaacgatgtcacagctatcatttacgtcgcagcctgcagtagctacaacatggtgattcgagaagataacaacaccaacaggctgagagagtccctggatctttttgaaagcatctggaacaacaggtggttacggaccatttctatcatcttgttcttgaacaaacaagatatgctggcagaaaaagtcttggcagggaaatcaaaaattgaagactatttcccagaatatgcaaattatactgttcctgaagacgcaacaccagatgcaggagaagatcccaaagttacaagagccaagttctttatccgggacctgtttttgaggatcagcacggccaccggtgacggcaaacattactgctacccgcacttcacctgcgccgtggacacagagaacatccgcagggtgttcaacgactgccgcgacatcatccagcggatgcacctcaagcagtatgagctcttgtgaggatgctgccgccaccctgcgacggagcggcgccccggactgcctgactgccagccccatgccatggtaggaggcagagtctctagttccatctcgctgccgtctgtcccgttctgtgtcgaccaccaagcctctggctacctctgtcccctcaggtttggttgtgtagcttctgttgtcattgaatacggcctcccgcagcatcccacccccaaaccaccgactctcattgccgacactgcagcagaatctctccgggtgggagccccattatt

SEQ ID NO: 8621 - DNA, 2255 bp, Homo sapiens
  source 1..2255: mol_type = unassigned DNA; mol_type = unassigned DNA
gtctccagcggagaccggcgccctcgccccccgtctccgttcattgtgctgtattcatccagcagattttgaaacaattctcgtgtaaaaaggcattttactccgcgcgtcttccttacagccatttagttgggagtttgcggtgggcagggggagggagaagaaacgcctgctctgaatcggaaaacaccgaagagaccagaccatctctttcagcagcaggaaagagaggagccgtcgcaggagccgcacacgtctccaactctctattgctttttgcgcacattcctaacttcctgacgtccatcccagcgggcaggcatggggtgtttgggcggcaacagcaagacgacggaagaccagggcgtcgatgaaaaagaacgacgcgaggccaacaaaaagatcgagaagcagttgcagaaagagcgcctggcttacaaggctacccaccgcctgctgctcctgggggctggtgagtctgggaaaagcactatcgtcaaacagatgaggatcctgcacgtcaatgggtttaatcccgaggaaaagaaacagaaaattctggacatccggaaaaatgttaaagatgctatcgtgacaattgtttcagcaatgagtactataatacctccagttccgctggccaaccctgaaaaccaatttcgatcagactacatcaagagcatagcccctatcactgactttgaatattcccaggaattctttgaccatgtgaaaaaactttgggacgatgaaggcgtgaaggcatgctttgagagatccaacgaataccagctgattgactgtgcacaatacttcctggaaagaatcgacagcgtcagcttggttgactacacacccacagaccaggacctcctcagatgcagagttctgacatctgggatttttgagacacgattccaagtggacaaagtaaacttccacatgtttgatgttggtggccagagggatgagaggagaaaatggatccagtgctttaacgatgtcacagctatcatttacgtcgcagcctgcagtagctacaacatggtgattcgagaagataacaacaccaacaggctgagagagtccctggatctttttgaaagcatctggaacaacaggtggttacggaccatttctatcatcttgttcttgaacaaacaagatatgctggcagaaaaagtcttggcagggaaatcaaaaattgaagactatttcccagaatatgcaaattatactgttcctgaagacgcaacaccagatgcaggagaagatcccaaagttacaagagccaagttctttatccgggacctgtttttgaggatcagcacggccaccggtgacggcaaacattactgctacccgcacttcacctgcgccgtggacacagagaacatccgcagggtgttcaacgactgccgcgacatcatccagcggatgcacctcaagcagtatgagctcttgtgaggatgctgccgccaccctgcgacggagcggcgccccggactgcctgactgccagccccatgccatggtaggaggcagagtctctagttccatctcgctgccgtctgtcccgttctgtgtcgaccaccaagcctctggctacctctgtcccctcaggtttggttgtgtagcttctgttgtcattgaatacggcctcccgcagcatcccacccccaaaccaccgactctcattgccgacactgcagcagaatctctccgggtgggagccccattattcattctccctttattgattcatcgaggagaacttggtagatggggagaaaacacagttggtttttttttccacgttatcaaccgtgactgcaagagcgttcgtgcagtgccctgagccacggccgtctctgattctccctttatgaagctgcaggctgacgagagatggtcccttcccattggccttagcccaagacttggagtcgaccccaagcgacagagtgaccagaaacccttttacagtcacattcagagtcgctgctggcctcaggcatttgaattagagctactttgagcctcttaggcagaaaacctaccacattcactactgcaaaatgtgtcctgtctaaaaatgattctctaaactttccctatacttaggcatagtcttctttcttagattctctttgttgttgtccctattgctggtttattacactgtacagaccacaaaatgtaatattcttttgtataactactaaagaaaaatccttgtagatctttgtgccttca

SEQ ID NO: 8622 - DNA, 623 bp, Homo sapiens
  source 1..623: mol_type = unassigned DNA; mol_type = unassigned DNA
agcgatatccggacacagatcacagcgttctttctgtttgtttgcaggggctggtgagtctgggaaaagcactatcgtcaaacagatgaggatcctgcacgtcaatgggtttaatcccgaggaaaagaaacagaaaattctggacatccggaaaaatgttaaagatgctatcgtgacaattgtttcagcaatgagtactataatacctccagttccgctggccaaccctgaaaaccaatttcgatcagactacatcaagagcatagcccctatcactgactttgaatattcccaggaattctttgaccatgtgaaaaaactttgggacgatgaaggcgtgaaggcatgctttgagagatccaacgaataccagctgattgactgtgcacaatacttcctggaaagaatcgacagcgtcagcttggttgactacacacccacagaccaggacctcctcagatgcagagttctgacatctgggatttttgagacacgattccaagtggacaaagtaaacttccacatgtttgatgttggtggccagagggatgagaggagaaaatggatccagtgctttaacgatgtcacagctatcatttacgtcgcagcctgcagtagctaca

SEQ ID NO: 8623 - DNA, 477 bp, Homo sapiens
  source 1..477: mol_type = unassigned DNA; mol_type = unassigned DNA
caaacagatgaggatcctgcacgtcaatgggtttaatcccgaggaaaagaaacagaaaattctggacatccggaaaaatgttaaagatgctatcgtgacaattgtttcagcaatgagtactataatacctccagttccgctggccaaccctgaaaaccaatttcgatcagactacatcaagagcatagcccctatcactgactttgaatattcccaggaattctttgaccatgtgaaaaaactttgggacgatgaaggcgtgaaggcatgctttgagagatccaacgaataccagctgattgactgtgcacaataaaacccttgccctgagacatccagaagaaaatttttagtgggattaccacaaatgtttttgtgtgtaaaacctgtttttaaaatatctcagaaaatctacttacttgggtggagaactgcagtggcttcccattccttatctaacgtaaccctcagacttcc

SEQ ID NO: 8624 - DNA, 585 bp, Homo sapiens
  source 1..585: mol_type = unassigned DNA; mol_type = unassigned DNA
ggaaatttaaaatcccactcaattgattggaatcagtgctaagagtaaattaagctaataacaactctctttcaatacagggaaaagaaacagaaaattctggacatccggaaaaatgttaaagatgctatcgtgacaattgtttcagcaatgagtactataatacctccagttccgctggccaaccctgaaaaccaatttcgatcagactacatcaagagcatagcccctatcactgactttgaatattcccaggaattctttgaccatgtgaaaaaactttgggacgatgaaggcgtgaaggcatgctttgagagatccaacgaataccagctgattgactgtgcacaatacttcctggaaagaatcgacagcgtcagcttggttgactacacacccacagaccaggacctcctcagatgcagagttctgacatctgggatttttgagacacgattccaagtggacaaagtaaacttccacatgtttgatgttggtggccagagggatgagaggagaaaatggatccagtgctttaacgatgtcacagctatcatttacgtcgcagcctgcagtagctacaac

SEQ ID NO: 8625 - DNA, 1038 bp, Homo sapiens
  source 1..1038: mol_type = unassigned DNA; mol_type = unassigned DNA
aaaagagactgaaggggagactggacagactgcaaagggctggaggccacattaaaagtgtggactttaccccatgggaaggaggaagcgcaggagtcatgagaaatgatggttcaggcagagattagagcataaagcagggaggtggggaaagccaagaggaacacgctcttggatgacgagtcaccatgaatcactgatcacctgggacatggttcagctgcacatgctgacgcagtgggtctgccagtgacgccgatatgctgcgagtctgggaaccccttttaaggagcagggaatcttaactctggctgtgcattacaactgcctggtactttgtcaccaccttcctggaaagaatcgacagcgtcagcttggttgactacacacccacagaccaggacctcctcagatgcagagttctgacatctgggatttttgagacacgattccaagtggacaaagtaaacttccacatgtttgatgttggtggccagagggatgagaggagaaaatggatccagtgctttaacgatgtcacagctatcatttacgtcgcagcctgcagtagctacaacatggtgattcgagaagataacaacaccaacaggctgagagagtccctggatctttttgaaagcatctggaacaacaggtggttacggaccatttctatcatcttgttcttgaacaaacaagatatgctggcagaaaaagtcttggcagggaaatcaaaaattgaagactatttcccagaatatgcaaattatactgttcctgaagacgcaacaccagatgcaggagaagatcccaaagttacaagagccaagttctttatccgggacctgtttttgaggatcagcacggccaccggtgacggcaaacattactgctacccgcacttcacctgcgccgtggacacagagaacatccgcagggtgttcaacgactgccgcgacatcatccagcggatgcacctcaagcagtatgagctcttgtgaggatgctgccgccaccctgcgacggagcggcgccccg

SEQ ID NO: 8626 - DNA, 451 bp, Homo sapiens
  source 1..451: mol_type = unassigned DNA; mol_type = unassigned DNA
gaacaaacaagatatgctggcagaaaaagtcttggcagggaaatcaaaaattgaagactatttcccagaatatgcaaattatactgttcctgaagacggagcaccaaggagaagcaccaccactggctgacagccaaggccacctgcccagccgcgggtgctgaagggcttccgtccaggggctgaggggaccctggcttgctgcctcggtgccaggcccagtgactgctcttcacccagcagcatgcgtcatctccatctgtgccctgcctctcccaagagactcacccatccctgagcatctgcagcacctgctggaagcctgggaccaccatcaactccaacgtcaactctcacttagcaattaaaaggaactaacagttggtccatgtgacggcatgggttaaactcacagtaattgtgctgacagaaagaatcaaagcaaaaacta

SEQ ID NO: 8627 - DNA, 3337 bp, Homo sapiens
  source 1..3337: mol_type = unassigned DNA; mol_type = unassigned DNA
cagctggcggcccgcggagccgggtgcgcagagccgctggcgcactcgcgcgctgcgctggcctcctccccgccccgggcccaggcgcgcgcgcgcttgttcgctctcccattttttttttcccctccctccctgcctctctctctctccctctccctcgagctcccggctggctgcggctccctggcgctctccctctctctccggtaggctcaccgagcgatgcgagctctgggagacagcgacgccgcctcccgctagagacctgcccctcggcccggccccctgcccaaccctgcccagcgcgcgggggtcggcgaaggcgccgcggacgcaccgacggctgaagagcggcgatgcacatgcactagcagcaccccctaactcactccctccacatcccgcgccgccgccgccgcctcctccacctcctcctccgccgccgccgcctcctcctcctccggcagccgcggcagcaggacccaccctgccccccaccccaccctctgtcggctccggctgcggctccagcctcgactattattttatttattttgggtcgtgcacaagcctcagtgcctgcagtccgcgcctcctcggcccgcgggcgcctcctcccttggctccggagccccagaccccggccaccctcgattcgacaaccccagacccctgccagctgccgcgagtctccgctgctggaatcttgttagcggctgtctttttggagggttctggtttcccgacatttttgtttccagcccaggagaggatatcgtgattttccccccttgagcccaggctctgctctctgggggggtggggggcgctccaagccggggagccgtgccagccgagtcgtgcgggctgtggcagggaaggggccaccatgggatgtactctgagcgcagaggagagagccgccctcgagcggagcaaggcgattgagaaaaacctcaaagaggatggcatcagcgccgccaaagacgtgaaattactcctgctcggggctggagaatcaggaaaaagcaccattgtgaagcagatgaagatcatccatgaagatggcttctccggagaagacgtgaaacagtacaagcctgttgtctacagcaacactatccagtccctggcagccatcgtccgggccatggacactttgggcatcgaatatggtgataaggagagaaaggctgacgccaagatggtgtgtgatgtggtgagtcggatggaagacaccgagcccttctctgcagagctgctttctgccatgatgcggctctggggcgactcaggaatccaagagtgcttcaaccggtcccgggagtatcagctcaacgactctgccaaatactacctggacagcctggatcggattggggccgccgactaccagcccaccgagcaggacatcctccgaaccagggtcaaaaccactggcatcgtagaaacccacttcacattcaagaacctccacttcaggctgtttgacgtcggaggccagcgatctgaacgcaagaagtggatccattgcttcgaggacgtcacggccatcattttctgtgtcgcgctcagcggctatgaccaggtgctccacgaagacgaaaccacgaaccgcatgcacgagtctctcatgctcttcgactccatctgtaacaacaagttcttcatcgatacctccatcattctcttcctcaacaagaaagatctctttggcgagaagatcaagaagtcacctttgaccatctgctttcctgaatacacaggccccaatacctatgaagacgcagccgcctacatccaagcacaatttgaaagcaaaaaccgctcacccaacaaagaaatatattgtcacatgacttgtgccacagacacgaataacatccaggtggtgttcgacgccgtcaccgacatcatcattgccaacaacctccggggctgcggcttgtactgacctcttgtcctgtatagcaacctatttgactgcttcacggactctttgctgttgacgttgatctcctggtagcatgaccttttggcctttgtaagacacacagcctttctgtatcaagcccctgtctaacctacgaccccagagtgactgacggctgtgtatttctgtagaatgctgtagaatccggttttagttgagtcttcacatttagaatttgaaaggaaaaacagaacatttctcatgtgctttgtagcttaaaaaaaggaaaactcaccatttcatccatatttctttttcttgcaaaacaaacatacccatctgcaccgacgcctgcccccgtcccacctcgcggcgcagcccctggagctcctgctggggggcagggcccatctgccgcctggggctccggtgcggtgcactggtccgaggagtgtgctcaggccgggctttccagaaggccacaggccactgcaaaccctgctgcctgccggccgcccagacaccacagacgccacctggcggccctaagccactcccgccacacgctcactccaggttcgtatagaaaaagcacagctctcactggccagtagctgccaaaaagaacacccatcgtataaggaaatccagccccatagaaaacaatctgcccaccgaccccctttctaaggatagcctttgtaggggttttttggttccttttttttttttttcagtttttgtttttacttttgtcccgccgagtactatgtattaccagccccccaccccacagatcagttttcctagtctttgggaaacgggttgtgttttttttcctttgccgtgttggatttccggtcccggctgacacctcccttcgtgtgtgcgcccctccccacccctgcctttgtttcggtgccctgtgtccgctctctcatgtggggatgtttgtgctgcagacaaaaagaacaaaaaaaaatttttaaataccacaagatggaaaaaaaaaacaaaaaaatttaaaaagatggaatgtagtgtttacattaaagccgccgttttcatgaccaatcctatgtcatttctactttgactaatacccaaaccctaaacctcttcacggtttcacttttaagacttaatctttgctgaagaagaccagtcacagccatttcaaataaagaggaggcaaaaagacaaaacacacaaaaaattaaaaaaaaaaacttaaaaaaaaaaggaaaaaagaaaaaaaagcccacgggtctttgtaagcctttctattcccaatcggtgaggtttctgtgatatcttacacactgccagtctacttctctgactaatggaaaattcctgtgtagctcaataaaagagaatgtttgtctgtactcctgagtctca

SEQ ID NO: 8628 - DNA, 930 bp, Homo sapiens
  source 1..930: mol_type = unassigned DNA; mol_type = unassigned DNA
tctccggtaggctcaccgagcgatgcgagctctgggagacagcgacgccgcctcccgctagagacctgcccctcggcccggccccctgcccaaccctgcccagcgcgcgggggtcggcgaaggcgccgcggacgcaccgacggctgaagagcggcgatgcacatgcactagcagcaccccctaactcactccctccacatcccgcgccgccgccgccgcctcctccacctcctcctccgccgccgccgcctcctcctcctccggcagccgcggcagcaggacccaccctgccccccaccccaccctctgtcggctccggctgcggctccagcctcgactattattttatttattttgggtcgtgcacaagcctcagtgcctgcagtccgcgcctcctcggcccgcgggcgcctcctcccttggctccggagccccagaccccggccaccctcgattcgacaaccccagacccctgccagctgccgcgagtctccgctgctggaatcttgttagcggctgtctttttggagggttctggtttcccgacatttttgtttccagcccaggagaggatatcgtgattttccccccttgagcccaggctctgctctctgggggggtggggggcgctccaagccggggagccgtgccagccgagtcgtgcgggctgtggcagggaaggggccaccatgggatgtactctgagcgcagaggagagagccgccctcgagcggagcaaggcgattgagaaaaacctcaaagaggatggcatcagcgccgccaaagacgtgaaattactcctgctcggggctggagaatcaggaaaaagcaccattgtgaagcagatgaagtaagtccctgtggcattgggattcgtacttttattaagaataatttttaaatcgtttttattacattgcttactccaca

SEQ ID NO: 8629 - DNA, 3529 bp, Homo sapiens
  source 1..3529: mol_type = unassigned DNA; mol_type = unassigned DNA
actccctccacatcccgcgccgccgccgccgcctcctccacctcctcctccgccgccgccgcctcctcctcctccggcagccgcggcagcaggacccaccctgccccccaccccaccctctgtcggctccggctgcggctccagcctcgactattattttatttattttgggtcgtgcacaagcctcagtgcctgcagtccgcgcctcctcggcccgcgggcgcctcctcccttggctccggagccccagaccccggccaccctcgattcgacaaccccagacccctgccagctgccgcgagtctccgctgctggaatcttgttagcggctgtctttttggagggttctggtttcccgacatttttgtttccagcccaggagaggatatcgtgattttccccccttgagcccaggctctgctctctgggggggtggggggcgctccaagccggggagccgtgccagccgagtcgtgcgggctgtggcagggaaggggccaccatgggatgtactctgagcgcagaggagagagccgccctcgagcggagcaaggcgattgagaaaaacctcaaagaggatggcatcagcgccgccaaagacgtgaaattactcctgctcggggctggagaatcaggaaaaagcaccattgtgaagcagatgaagatcatccatgaagatggcttctccggagaagacgtgaaacagtacaagcctgttgtctacagcaacactatccagtccctggcagccatcgtccgggccatggacactttgggcatcgaatatggtgataaggagagaaaggctgacgccaagatggtgtgtgatgtggtgagtcggatggaagacaccgagcccttctctgcagagctgctttctgccatgatgcggctctggggcgactcaggaatccaagagtgcttcaaccggtcccgggagtatcagctcaacgactctgccaaatactacctggacagcctggatcggattggggccgccgactaccagcccaccgagcaggacatcctccgaaccagggtcaaaaccactggcatcgtagaaacccacttcacattcaagaacctccacttcaggctgtttgacgtcggaggccagcgatctgaacgcaagaagtggatccattgcttcgaggacgtcacggccatcattttctgtgtcgcgctcagcggctatgaccaggtgctccacgaagacgaaaccacgaaccgcatgcacgagtctctcatgctcttcgactccatctgtaacaacaagttcttcatcgatacctccatcattctcttcctcaacaagaaagatctctttggcgagaagatcaagaagtcacctttgaccatctgctttcctgaatacacaggccccaatacctatgaagacgcagccgcctacatccaagcacaatttgaaagcaaaaaccgctcacccaacaaagaaatatattgtcacatgacttgtgccacagacacgaataacatccaggtggtgttcgacgccgtcaccgacatcatcattgccaacaacctccggggctgcggcttgtactgacctcttgtcctgtatagcaacctatttggtaatgattccagcacccacagaacagcttgcgtgcgcgcgcatacacacacacacacacacacacacacacaccactaacaaatgcaagttggtaaataaactttaaagaggcataacaaaaccttatatatatatatatatatacaaatatatatttaaaaaatctttttagtttgtactagaaagagctgcggacagaactgaccaccatcccatagctcatggaggttttcctgggacggcacgtgagcatgcacgtgtgtgtgtgtacacacactcacacatgtccagatgggagcttggtttgggagtccctccttttgaggatagccccggggtgttcctctcagccccatttctgagaacaggtgaatggcagaacagccctggccttggcccagccagctctctgtgttgcgcccttagagcctctgcgccctcagttccgtcctgctcttggcaaattccagaccctttcagaaatggccgaagccctaagcctctcctcactctgcactcccaaaaacagaacaatttaaggatgcttctctttcgggtggtggtggttgttaatttcaggaatttagaagaatcattgctccgaccaatccactgtctcctgagttttctttattcatgttaagatggcaagaatcagagaacagggagacttggtctgctttctaaaagcagctgacaggaggggactcaagttcacctgcagagttgaaaccagccccgctccaagagggcatgtgggaaggtggggagcgaggggaacaggcgtggcggggagggccggacttgtgggcctgacccgagtcagggtctcaggggggggccaggcttccccaggtgcccgggatgggcttcaatggggttcctgacccctcgtgctgctgccccatctcgcccaaccccagcagtagtcaaaatgttctagggttttttggttggttggttggtttttaaaatcaaagaaaatggtcagactggaccccttatctctctctctacagactgcttcacggactctttgctgttgacgttgatctcctggtagcatgaccttttggcctttgtaagacacacagcctttctgtatcaagcccctgtctaacctacgaccccagagtgactgacggctgtgtatttctgtagaatgctgtagaatccggttttagttgagtcttcacatttagaatttgaaaggaaaaacagaacatttctcatgtgctttgtagcttaaaaaaaggaaaactcaccatttcatccatatttctttttcttgcaaaacaaacatacccatctgcaccgacgcctgcccccgtcccacctcgcggcgcagcccctggagctcctgctggggggcagggcccatctgccgcctggggctccggtgcggtgcactggtccgaggagtgtgctcaggccgggctttccagaaggccacaggccactgcaaaccctgctgcctgccggccgcccagacaccacagacgccacctggcggccctaagccactcccgccacacgctcactccaggttcgtatagaaaaagcacagctctcactggccagtagctgccaaaaagaacacccatcgtataaggaaatccagccccatagaaaacaatctgcccaccgaccccctttctaaggatagcctttgtaggggttttttggttccttttttttttttttcagtttttgtttttacttttgtcccgccgagtactatgtattaccagccccccaccccacagatcagttttcctagtctttgggaaacgggttgtgttttttttcctttgccgtgttggatttccggtcccggctgacacctcccttcgtgtgtgcgcccctccccacccctgcctttgtttcggtgccctgtgtccgctctctcatgtggggatgtttgtgctgcag

SEQ ID NO: 8630 - DNA, 5767 bp, Homo sapiens
  source 1..5767: mol_type = unassigned DNA; mol_type = unassigned DNA
ccgccgccgccgcctcctcctcctccggcagccgcggcagcaggacccaccctgccccccaccccaccctctgtcggctccggctgcggctccagcctcgactattattttatttattttgggtcgtgcacaagcctcagtgcctgcagtccgcgcctcctcggcccgcgggcgcctcctcccttggctccggagccccagaccccggccaccctcgattcgacaaccccagacccctgccagctgccgcgagtctccgctgctggaatcttgttagcggctgtctttttggagggttctggtttcccgacatttttgtttccagcccaggagaggatatcgtgattttccccccttgagcccaggctctgctctctgggggggtggggggcgctccaagccggggagccgtgccagccgagtcgtgcgggctgtggcagggaaggggccaccatgggatgtactctgagcgcagaggagagagccgccctcgagcggagcaaggcgattgagaaaaacctcaaagaggatggcatcagcgccgccaaagacgtgaaattactcctgctcggggctggagaatcaggaaaaagcaccattgtgaagcagatgaagatcatccatgaagatggcttctccggagaagacgtgaaacagtacaagcctgttgtctacagcaacactatccagtccctggcagccatcgtccgggccatggacactttgggcatcgaatatggtgataaggagagaaaggctgacgccaagatggtgtgtgatgtggtgagtcggatggaagacaccgagcccttctctgcagagctgctttctgccatgatgcggctctggggcgactcaggaatccaagagtgcttcaaccggtcccgggagtatcagctcaacgactctgccaaatactacctggacagcctggatcggattggggccgccgactaccagcccaccgagcaggacatcctccgaaccagggtcaaaaccactggcatcgtagaaacccacttcacattcaagaacctccacttcaggctgtttgacgtcggaggccagcgatctgaacgcaagaagtggatccattgcttcgaggacgtcacggccatcattttctgtgtcgcgctcagcggctatgaccaggtgctccacgaagacgaaaccacgaaccgcatgcacgaatccctgaagctttttgacagcatctgcaacaacaaatggttcacagacacgtccatcatcctgtttcttaacaagaaggacatatttgaagagaagatcaagaagtccccgctcaccatctgctttcctgaatatacaggccccagcgccttcacagaagccgtggcttacatccaggcccagtacgagagcaagaacaagtcagcccacaaagagatctacacccacgtcacctgcgccacggacaccaacaacatccagtttgtctttgatgctgtgacggacgtcatcatcgccaaaaacctgcggggctgtggactctactgagcccagccgccctgcccggcacccttgccctgcctggcctgccgccccccctcccctggaaccaggctccaccactctcagaccactctttgcacttgaggaagaagacctcagaggctggcaccaagggagggaggagggagcatcctccacccgcaccccccaacagaacttgtggtaacgcaggggcggggcggggctgctgagtgcatgctgcaaggccaggagactccacgctcacagcctctgtgtcatctctgagtgcttgatcgggaagctggggggacagggcagggcccagatgggcacaccctgcacctgatgactcactggaagcctcggagtgtcctcctgtcatcttgggtggtgcaggggcgcagatggccctgcagcagggtgctggcagggtggggtcataggagccatccttcagctttgcctggggtctctggtggagggcagttccgtcaacaaaagccagggtgggatcaggccaacttggtgtgggttggaggactcaggccttggcgatggcctccgtctccctgctccctcccctgggtctcagcccttccttctctgggtcatcctcccttgcctttgctctcccagagaactcccatccctgactcctccgagttctggaaatgcttcttgagactgatttatggctcagatagatggtggcgtggagcggggggagggagagatgggaggtgcggggaagggaggtggaagctcctgtgtcacctgggctggggcctcccgcccagtcctcgcaggccaaagggtgacccatttcttttttccagtcaccaggagctcggatggtcactctgaggtgtgaatagatatgtttttccttcagtccacactgaattcaactcaaaccagcaaaggcctttgggctggggattctgtggttgcagaggtctagagggggtggacttttgcagccagtgcctccgcctcaccgtcttggtgaagaaatcagcgagtttgttcacagccgttggtgtcttcccagcccctggggacagaggacagcagggggatggagctgacaccctggagtatttggacccaggccagcacaaacacacccccctgtccccaactctaaagggagagtcctaggactccttagaggaggcttcactgcggagatccctgagcagaagggggcggggtagcttctcccggtgacggtgacgcaggtctggctggccttgggcaaccaacacacctctcccactccaagatgcctccaggtggctgaggccaacgcccacacccaggccagtcgtgtgcttgtacagcaggctgtgcctggggacctagatgtgccatgggagggaggagggtacccactgacaggcctctgcctccctcctcaagccctctgttctccctgcccccactctggacactgcttagtccccagccaggcagggcccctgggtttccacttgcagcccccggactgccccagagccgggaagcaccagtgccaacagctctggacttgttggacccacaggcacagagctctgagtggtgcccaggagacccaggaaccttccctagtgccaaatgcctgcagggaccggtgcctggggagcctctggcagccggactgcaggagccaccccatcagcccaagtccacctctgttttgttcacctcggtcatgttttggaccttgcaccaggtgctgggacgtggcagaggacaggccctgggaaccaacagtgtcctaccatggacagccagggccagctaagctaagccatcccgcccaacacagaagacatggcagttatttctcagcagcaccacgctgggtgaggccagttgttccgcttactctgctccgaactgtaaccccaggctcagaagcagccggcaaaagggggatgctggccacgccccacctctaaggccatcaccctggaggtggaagtcactgggctggagggctctccatgtcccccagcagccgccctcagaacacagtggccagagcaccaggctgggtccaggcctccaatccaggccttccctgtccctagaactggggctggaggagtgggtgctcagcccttcctgccctccatccccagcctgcctttctcttcctttggatgctccatcctccttggtttcttgcactgctctcaatcctcccaccctagcctgggggtggtccttggtcctcaggggtatccggggagaaattctctccctgtgcatgacacctgtcatccatgtcgtaaccagcggctccatcttgtggggtggtgactgagggtgacaaatgagatttggctccgtcgtggatgtggatgtgggaggaatgttgcgagtgacacgtgtgggtttctaatccacagtggtcctgcgtgtgccctgaggggccatggtaacctctccgatggctcggatttagcaggccaagcagaaactgatttctacgaagagcgtctttgccaaactcatgaaaattgtgcctgccactttcatgcctatgggccagttttgtgacctgcgccgctgaccatcctaagaaccaggtcttggccttccctctgagcactgatagaggtccccaaggctctctggcctgaggagggtgtggggtctgcccagccccaagcagagagcacagtctgggcccctgaccaacagctttggcattctgggttccatggggaccctagagctcaggcacaagaacaacaccatacctgctgccaggacgcagctgtctcccaggccctccccacagcccagctcccactggcaggaactggacacatccctgccctccatggtctgcactggtcttctctgagtattcttaggagcagaggcagccccaagttccaacttgcaagccctgtaactaagctgtctataaaccccagcagggaaggccaagggatggtctcacccatgcccttccctttggccaacatgagtcctgcagtggggagcttagcccctgctcccacctaacactctacagttagcacccaggggttgattcaggaagttcttcctttttctagcctgcatccttcctggccaccccctttatttctcagtctgacctggtgcactcttggcaagtgagtccattgcagtcccaggtggatatttaatgagcactcggactgtttcctccaagtcagctagtggcctgccctcctccttttcaagaagtctggggcacagagcctcctctggctgcctcttctcttctctgagcctctgggagccttcaggcaaaacctggcagttctcaggaacccagacctgaggctccagctccgcggccaccagagattcagtgtgcagtgccgaaggcagtcacccccaggcagttcctgctgtcaggccgcaagcctagagcgcaggatcccagcagcccagggaacagggccggcgtgtgagctgctgccgtggggtctgtggtagggctccccatctcccacccctcagcaagaagagtcctgacccctgaccccaccctgcccagagaggagctggggcctccagacagaccccactgcagccagatgaaggcccctgtcaaagaaggggcaggctgggggaaaagcagaaagaatggcccccagtccaaactcctggatcccctccatgagagaggggctccccctggaacagaagctctcatccccaggcccagtgcacaagaccaccagcagagacccaccgcccttcctggcagagcaccacttcctggcagtgcagctccgaggcaccactactgtcctccccttccctccccacccctcccctccctttccctcctctcccctcccctccacacctgccctgttactcccacagctctgggcagccaggccctcccctcctgcctcctggtcttctctactccgctggttctgacccatcccctggctctgcccgccgtcccccaccctgcccctgctgagtatcttcttcctccccacgcacccccctcccccatctaggcgaggtgggctcgggcgtcccaggccctccttagaaaagccgtctctctcgagtgcagtggtcccacctcccaaccccatcactgctgcccaccccatattaactgtaattttgtaagaagagtgacttgttggtttaataaatctctagttattgtaataatttattggctgccataatgtatttattagtcgcctaccgttaataaaaagtgcccgctttccta

SEQ ID NO: 8631 - DNA, 568 bp, Homo sapiens
  source 1..568: mol_type = unassigned DNA; mol_type = unassigned DNA
cttggctccggagccccagaccccggccaccctcgattcgacaaccccagacccctgccagctgccgcgagtctccgctgctggaatcttgttagcggctgtctttttggagggttctggtttcccgacatttttgtttccagcccaggagaggatatcgtgattttccccccttgagcccaggctctgctctctgggggggtggggggcgctccaagccggggagccgtgccagccgagtcgtgcgggctgtggcagggaaggggccaccatgggatgtactctgagcgcagaggagagagccgccctcgagcggagcaaggcgattgagaaaaacctcaaagaggatggcatcagcgccgccaaagacgtgaaattactcctgctcggggctggagaatcaggaaaaagcaccattgtgaagcagatgaaatatccattgagcttctactctgtaccgagcaccatcttaagtgttgtaactgagcaagacacacaaaatctctgccctcctggagtgttctgacattcttgttaggggagacaggcaataaataaggaaaataca

SEQ ID NO: 8632 - DNA, 1351 bp, Homo sapiens
  source 1..1351: mol_type = unassigned DNA; mol_type = unassigned DNA
cccaggctctgctctctgggggggtggggggcgctccaagccggggagccgtgccagccgagtcgtgcgggctgtggcagggaaggggccaccatgggatgtactctgagcgcagaggagagagccgccctcgagcggagcaaggcgattgagaaaaacctcaaagaggatggcatcagcgccgccaaagacgtgaaattactcctgctcggggctggagaatcaggaaaaagcaccattgtgaagcagatgaagatcatccatgaagatggcttctccggagaagacgtgaaacagtacaagcctgttgtctacagcaacactatccagtccctggcagccatcgtccgggccatggacactttgggcatcgaatatggtgataaggagagaaaggtaggcccctgagcccataagcacagcaacaagaggttctgtctgtgttaccccactgcctcctctttatagtgctgggctgccttaaatgaacgagaagagactccgctatgtttgaaagatatatggtggcacagtcaccaacctaagccattgcatccacccctctggcaaactcccagcaaactcaccaactttgcaagttgcaggggctacaaaactcccggatttattttgcagatgaggaagagttggtgacagttctaaattggagctgccacaacactgtctaagtacctgtccttgggcaattaacttgtacagaaaaaaatatgtattaaacaaaacaagccttgtctggccaccatctcccctccttagaagaactttccttgccttgttgtggagtgaggatagccatttgaattgactgcctttcctcttttacaccaagggctatgttttctgcctcccctgggtaagtatgaggacctacagggctctccttcctgtagaaagtcagtgtcctagaacagggactgtttgggggtaacatttccagtcttctattaagtggtgaatggaataagtactatataaaagcctctaatttgcaaacatttatattaactgttaagactgaactatatacagctacactggcaaggctaaataaaaggagggagggagagagggagaggagaaaatagcctcagaattctttccagaagcagctctttgtccctgtttgggactgaatctcagtgatcctccctctgggacctggagattggagaagggggcggagggcaggtacagcctccaagcacctgggctctgcatctgagcctctggatggagagcattcatctctgattgctgtgtgatttgattgtctattatacacatgtcctgtctttgctaaaaatcatcttcctcacagaggaaaactgtc

SEQ ID NO: 8633 - DNA, 926 bp, Homo sapiens
  source 1..926: mol_type = unassigned DNA; mol_type = unassigned DNA
agggaaggggccaccatgggatgtactctgagcgcagaggagagagccgccctcgagcggagcaaggcgattgagaaaaacctcaaagaggatggcatcagcgccgccaaagacgtgaaattactcctgctcggggctggagaatcaggaaaaagcaccattgtgaagcagatgaagatcatccatgaagatggcttctccggagaagacgtgaaacagtacaagcctgttgtctacagcaacactatccagtccctggcagccatcgtccgggccatggacactttgggcatcgaatatggtgataaggagagaaaggctgacgccaagatggtgtgtgatgtggtgagtcggatggaagacaccgagcccttctctgcagagctgctttctgccatgatgcggctctggggcgactcaggaatccaagagtgcttcaaccggtcccgggagtatcagctcaacgactctgccaaatagtgagtgtcccagcgggcgcatggcctggagccgggcagtgatgcgggagtggaagggactggtgatggggattggcagagcaaggaggattctcggctgaggtcacgcctgccgggagatgttctcccataggtagagggtgtcaggaaggaatgagaaggggcctctcttcctgcaccccaggaggagaaagaggccagaggaggcagaggacgcaagagacaaccaaacagtggaaattcccagagggccgggaccttgtcactggcttgtcctggagagtgcctggcactgcaaaaagacagctttcaagtgtagcagctttgtttttttatagggagcccctgaccgcataaatacaaaccaaaacaacagccatataggcagaaaagaaatggtgccattttgttttattttagaaaaaataataagctttccattcccca

SEQ ID NO: 8634 - DNA, 2043 bp, Homo sapiens
  source 1..2043: mol_type = unassigned DNA; mol_type = unassigned DNA
catgggatgtactctgagcgcagaggagagagccgccctcgagcggagcaaggcgattgagaaaaacctcaaagaggatggcatcagcgccgccaaagacgtgaaattactcctgctcggggctggagaatcaggaaaaagcaccattgtgaagcagatgaagatcatccatgaagatggcttctccggagaagacgtgaaacagtacaagcctgttgtctacagcaacactatccagtccctggcagccatcgtccgggccatggacactttgggcatcgaatatggtgataaggagagaaagctacctggacagcctggatcggattggggccgccgactaccagcccaccgagcaggacatcctccgaaccagggtcaaaaccactggcatcgtagaaacccacttcacattcaagaacctccacttcaggctgtttgacgtcggaggccagcgatctgaacgcaagaagtggatccattgcttcgaggacgtcacggccatcattttctgtgtcgcgctcagcggctatgaccaggtgctccacgaagacgaaaccacgaaccgcatgcacgagtctctcatgctcttcgactccatctgtaacaacaagttcttcatcgatacctccatcattctcttcctcaacaagaaagatctctttggcgagaagatcaagaagtcacctttgaccatctgctttcctgaatacacaggccccaatacctatgaagacgcagccgcctacatccaagcacaatttgaaagcaaaaaccgctcacccaacaaagaaatatattgtcacatgacttgtgccacagacacgaataacatccaggtggtgttcgacgccgtcaccgacatcatcattgccaacaacctccggggctgcggcttgtactgacctcttgtcctgtatagcaacctatttgactgcttcacggactctttgctgttgacgttgatctcctggtagcatgaccttttggcctttgtaagacacacagcctttctgtatcaagcccctgtctaacctacgaccccagagtgactgacggctgtgtatttctgtagaatgctgtagaatccggttttagttgagtcttcacatttagaatttgaaaggaaaaacagaacatttctcatgtgctttgtagcttaaaaaaaggaaaactcaccatttcatccatatttctttttcttgcaaaacaaacatacccatctgcaccgacgcctgcccccgtcccacctcgcggcgcagcccctggagctcctgctggggggcagggcccatctgccgcctggggctccggtgcggtgcactggtccgaggagtgtgctcaggccgggctttccagaaggccacaggccactgcaaaccctgctgcctgccggccgcccagacaccacagacgccacctggcggccctaagccactcccgccacacgctcactccaggttcgtatagaaaaagcacagctctcactggccagtagctgccaaaaagaacacccatcgtataaggaaatccagccccatagaaaacaatctgcccaccgaccccctttctaaggatagcctttgtaggggttttttggttccttttttttttttttcagtttttgtttttacttttgtcccgccgagtactatgtattaccagccccccaccccacagatcagttttcctagtctttgggaaacgggttgtgttttttttcctttgccgtgttggatttccggtcccggctgacacctcccttcgtgtgtgcgcccctccccacccctgcctttgtttcggtgccctgtgtccgctctctcatgtggggatgtttgtgctgcagacaaaaagaacaaaaaaaaatttttaaataccacaagatggaaaaaaaaaacaaaaaaatttaaaaagatggaatgtagtgtttacattaaagccgccgttttcatgaccaatcctatgtcatttctactttgactaatacccaaaccctaaacctcttcacggtttcacttttaagacttaatctttgctgaagaa

SEQ ID NO: 8635 - DNA, 1515 bp, Homo sapiens
  source 1..1515: mol_type = unassigned DNA; mol_type = unassigned DNA
gccctcgagcggagcaaggcgattgagaaaaacctcaaagaggatggcatcagcgccgccaaagacgtgaaattactcctgctcggggctggagaatcaggaaaaagcaccattgtgaagcagatgaagcaatatgttctttctgtctggaagcttttaagattttgtgttcatcttgaagtttagcagttgtaccaaggatcatccatgaagatggcttctccggagaagacgtgaaacagtacaagcctgttgtctacagcaacactatccagtccctggcagccatcgtccgggccatggacactttgggcatcgaatatggtgataaggagagaaaggctgacgccaagatggtgtgtgatgtggtgagtcggatggaagacaccgagcccttctctgcagagctgctttctgccatgatgcggctctggggcgactcaggaatccaagagtgcttcaaccggtcccgggagtatcagctcaacgactctgccaaatactacctggacagcctggatcggattggggccgccgactaccagcccaccgagcaggacatcctccgaaccagggtcaaaaccactggcatcgtagaaacccacttcacattcaagaacctccacttcaggctgtttgacgtcggaggccagcgatctgaacgcaagaagtggatccattgcttcgaggacgtcacggccatcattttctgtgtcgcgctcagcggctatgaccaggtgctccacgaagacgaaaccacgaaccgcatgcacgagtctctcatgctcttcgactccatctgtaacaacaagttcttcatcgatacctccatcattctcttcctcaacaagaaagatctctttggcgagaagatcaagaagtcacctttgaccatctgctttcctgaatacacaggccccaatacctatgaagacgcagccgcctacatccaagcacaatttgaaagcaaaaaccgctcacccaacaaagaaatatattgtcacatgacttgtgccacagacacgaataacatccaggtggtgttcgacgccgtcaccgacatcatcattgccaacaacctccggggctgcggcttgtactgacctcttgtcctgtatagcaacctatttgactgcttcacggactctttgctgttgacgttgatctcctggtagcatgaccttttggcctttgtaagacacacagcctttctgtatcaagcccctgtctaacctacgaccccagagtgactgacggctgtgtatttctgtagaatgctgtagaatccggttttagttgagtcttcacatttagaatttgaaaggaaaaacagaacatttctcatgtgctttgtagcttaaaaaaaggaaaactcaccatttcatccatatttctttttcttgcaaaacaaacatacccatctgcaccgacgcctgcccccgtcccacctcgcggcgcagcccctggagctcctgctggggggcagggcccatctgccgcctggggctccggtgc

SEQ ID NO: 8636 - DNA, 847 bp, Homo sapiens
  source 1..847: mol_type = unassigned DNA; mol_type = unassigned DNA
tcgcatgccttagtccccccctccccctgttcccttaagctgacactcaccagtttttccccactgtctgtgtcccaacaggggctggagaatcaggaaaaagcaccattgtgaagcagatgaacccctcggggagtttaaataaggtgctgcggcacttgagttctgcaaaagacacctattcgctgaccagacaaagatgcttagccacaactcacaactctcagggtgcagttcgaagaggaggaagcagcatggcatataaagctcatgctcccttgaaggctggtgattgagacaagttatgtcttctagcatttgactccctcaaagagattgcaggacttccctctgattgcaggtggctcaatccactcagatcacctagaaacttgatagagatttagaatcttaaagaagacagaagcttagacagagcatgtagcccagcccatcaacagatgaagaagttgaatcctgcagggactacaaggaggatcatccatgaagatggcttctccggagaagacgtgaaacagtacaagcctgttgtctacagcaacactatccagtccctggcagccatcgtccgggccatggacactttgggcatcgaatatggtgataaggagagaaaggctgacgccaagatggtgtgtgatgtggtgagtcggatggaagacaccgagcccttctctgcagagctgctttctgccatgatgcggctctggggcgactcaggaatccaagagtgcttcaaccggtcccgggagtatcagctcaacgactctgccaaatactacctggacagcctggatcggattggggccgccgactaccagcccac

SEQ ID NO: 8637 - DNA, 1642 bp, Homo sapiens
  source 1..1642: mol_type = unassigned DNA; mol_type = unassigned DNA
tttttccccactgtctgtgtcccaacaggggctggagaatcaggaaaaagcaccattgtgaagcagatgaagatcatccatgaagatggcttctccggagaagacgtgaaacagtacaagcctgttgtctacagcaacactatccagtccctggcagccatcgtccgggccatggacactttgggcatcgaatatggtgataaggagagaaaggctgacgccaagatggtgtgtgatgtggtgagtcggatggaagacaccgagcccttctctgcagagctgctttctgccatgatgcggctctggggcgactcaggaatccaagagtgcttcaaccggtcccgggagtatcagctcaacgactctgccaaatactacctggacagcctggatcggattggggccgccgactaccagcccaccgagcaggacatcctccgaaccagggtcaaaaccactggcatcgtagaaacccacttcacattcaagaacctccacttcaggctgtttgacgtcggaggccagcgatctgaacgcaagaagtggatccattgcttcgaggacgtcacggccatcattttctgtgtcgcgctcagcggctatgaccaggtgctccacgaagacgaaaccacgaaccgcatgcacgagtctctcatgctcttcgactccatctgtaacaacaagttcttcatcgatacctccatcattctcttcctcaacaagaaagatctctttggcgagaagatcaagaagtcacctttgaccatctgctttcctgaatacacaggccccaatacctatgaagacgcagccgcctacatccaagcacaatttgaaagcaaaaaccgctcacccaacaaagaaatatattgtcacatgacttgtgccacagacacgaataacatccaggtggtgttcgacgccgtcaccgacatcatcattgccaacaacctccggggctgcggcttgtactgacctcttgtcctgtatagcaacctatttgactgcttcacggactctttgctgttgacgttgatctcctggtagcatgaccttttggcctttgtaagacacacagcctttctgtatcaagcccctgtctaacctacgaccccagagtgactgacggctgtgtatttctgtagaatgctgtagaatccggttttagttgagtcttcacatttagaatttgaaaggaaaaacagaacatttctcatgtgctttgtagcttaaaaaaaggaaaactcaccatttcatccatatttctttttcttgcaaaacaaacatacccatctgcaccgacgcctgcccccgtcccacctcgcggcgcagcccctggagctcctgctggggggcagggcccatctgccgcctggggctccggtgcggtgcactggtccgaggagtgtgctcaggccgggctttccagaaggccacaggccactgcaaaccctgctgcctgccggccgcccagacaccacagacgccacctggcggccctaagccactcccgccacacgctcactccaggttcgtatagaaaaagcacagctctcactggccagtagctgccaaaaagaacacccatcgtataaggaaatccagccccatagaaaacaatctgcccaccgaccccctttct

SEQ ID NO: 8638 - DNA, 1065 bp, Homo sapiens
  source 1..1065: mol_type = unassigned DNA; mol_type = unassigned DNA
actgtctgtgtcccaacaggggctggagaatcaggaaaaagcaccattgtgaagcagatgaagatcatccatgaagatggcttctccggagaagacgtgaaacagtacaagcctgttgtctacagcaacactatccagtccctggcagccatcgtccgggccatggacactttgggcatcgaatatggtgataaggagagaaaggctgacgccaagatggtgtgtgatgtggtgagtcggatggaagacaccgagcccttctctgcagagctgctttctgccatgatgcggctctggggcgactcaggaatccaagagtgcttcaaccggtcccgggagtatcagctcaacgactctgccaaatactacctggacagcctggatcggattggggccgccgactaccagcccaccgagcaggacatcctccgaaccagggtcaaaaccactggcatcgtagaaacccacttcacattcaagaacctccacttcaggctgtttgacgtcggaggccagcgatctgaacgcaagaagtggatccattgcttcgaggacgtcacggccatcattttctgtgtcgcgctcagcggctatgaccaggtgctccacgaagacgaaaccacgaaccgcatgcacgagtctctcatgctcttcgactccatctgtaacaacaagttcttcatcgatacctccatcattctcttcctcaacaagaaagatctctttggcgagaagatcaagaagtcacctttgaccatctgctttcctgaatacacaggccccaatacctatgaagacgcagccgcctacatccaagcacaatttgaaagcaaaaaccgctcacccaacaaagaaatatattgtcacatgacttgtgccacagacacgaataacatccaggtggtgttcgacgccgtcaccgacatcatcattgccaacaacctccggggctgcggcttgtactgacctcttgtcctgtatagcaacctatttggtaatgattccagcacccacagaacagcttgcgtgcgcgcgcatacacacacacacacacacacacacaca

SEQ ID NO: 8639 - DNA, 3078 bp, Homo sapiens
  source 1..3078: mol_type = unassigned DNA; mol_type = unassigned DNA
acactttctcaataaggagcctcgcccctcctttccacttgcaggctcgcttcttgccctatccactcggcagttcctggtgatcccacaggatcatccatgaagatggcttctccggagaagacgtgaaacagtacaagcctgttgtctacagcaacactatccagtccctggcagccatcgtccgggccatggacactttgggcatcgaatatggtgataaggagagaaaggctgacgccaagatggtgtgtgatgtggtgagtcggatggaagacaccgagcccttctctgcagagctgctttctgccatgatgcggctctggggcgactcaggaatccaagagtgcttcaaccggtcccgggagtatcagctcaacgactctgccaaatactacctggacagcctggatcggattggggccgccgactaccagcccaccgagcaggacatcctccgaaccagggtcaaaaccactggcatcgtagaaacccacttcacattcaagaacctccacttcaggctgtttgacgtcggaggccagcgatctgaacgcaagaagtggatccattgcttcgaggacgtcacggccatcattttctgtgtcgcgctcagcggctatgaccaggtgctccacgaagacgaaaccacgaaccgcatgcacgagtctctcatgctcttcgactccatctgtaacaacaagttcttcatcgatacctccatcattctcttcctcaacaagaaagatctctttggcgagaagatcaagaagtcacctttgaccatctgctttcctgaatacacaggccccaatacctatgaagacgcagccgcctacatccaagcacaatttgaaagcaaaaaccgctcacccaacaaagaaatatattgtcacatgacttgtgccacagacacgaataacatccaggtggtgttcgacgccgtcaccgacatcatcattgccaacaacctccggggctgcggcttgtactgacctcttgtcctgtatagcaacctatttggtaatgattccagcacccacagaacagcttgcgtgcgcgcgcatacacacacacacacacacacacacacacaccactaacaaatgcaagttggtaaataaactttaaagaggcataacaaaaccttatatatatatatatatatacaaatatatatttaaaaaatctttttagtttgtactagaaagagctgcggacagaactgaccaccatcccatagctcatggaggttttcctgggacggcacgtgagcatgcacgtgtgtgtgtgtacacacactcacacatgtccagatgggagcttggtttgggagtccctccttttgaggatagccccggggtgttcctctcagccccatttctgagaacaggtgaatggcagaacagccctggccttggcccagccagctctctgtgttgcgcccttagagcctctgcgccctcagttccgtcctgctcttggcaaattccagaccctttcagaaatggccgaagccctaagcctctcctcactctgcactcccaaaaacagaacaatttaaggatgcttctctttcgggtggtggtggttgttaatttcaggaatttagaagaatcattgctccgaccaatccactgtctcctgagttttctttattcatgttaagatggcaagaatcagagaacagggagacttggtctgctttctaaaagcagctgacaggaggggactcaagttcacctgcagagttgaaaccagccccgctccaagagggcatgtgggaaggtggggagcgaggggaacaggcgtggcggggagggccggacttgtgggcctgacccgagtcagggtctcaggggggggccaggcttccccaggtgcccgggatgggcttcaatggggttcctgacccctcgtgctgctgccccatctcgcccaaccccagcagtagtcaaaatgttctagggttttttggttggttggttggtttttaaaatcaaagaaaatggtcagactggaccccttatctctctctctacagactgcttcacggactctttgctgttgacgttgatctcctggtagcatgaccttttggcctttgtaagacacacagcctttctgtatcaagcccctgtctaacctacgaccccagagtgactgacggctgtgtatttctgtagaatgctgtagaatccggttttagttgagtcttcacatttagaatttgaaaggaaaaacagaacatttctcatgtgctttgtagcttaaaaaaaggaaaactcaccatttcatccatatttctttttcttgcaaaacaaacatacccatctgcaccgacgcctgcccccgtcccacctcgcggcgcagcccctggagctcctgctggggggcagggcccatctgccgcctggggctccggtgcggtgcactggtccgaggagtgtgctcaggccgggctttccagaaggccacaggccactgcaaaccctgctgcctgccggccgcccagacaccacagacgccacctggcggccctaagccactcccgccacacgctcactccaggttcgtatagaaaaagcacagctctcactggccagtagctgccaaaaagaacacccatcgtataaggaaatccagccccatagaaaacaatctgcccaccgaccccctttctaaggatagcctttgtaggggttttttggttccttttttttttttttcagtttttgtttttacttttgtcccgccgagtactatgtattaccagccccccaccccacagatcagttttcctagtctttgggaaacgggttgtgttttttttcctttgccgtgttggatttccggtcccggctgacacctcccttcgtgtgtgcgcccctccccacccctgcctttgtttcggtgccctgtgtccgctctctcatgtggggatgtttgtgctgcagacaaaaagaacaaaaaaaaatttttaaataccacaagatggaaaaaaaaaacaaaaaaatttaaaaagatggaatgtagtgtttacattaaagccgccgttttcatgaccaatcctatgtc

SEQ ID NO: 8640 - DNA, 2668 bp, Homo sapiens
  source 1..2668: mol_type = unassigned DNA; mol_type = unassigned DNA
gcgccatgatggtagggagtagcgactcggagacaattttcccatctgcttgacatgttcttatttttattcgagagctccctggggctttcttcgcagagccccccttggctcgccgcacccttctgagccaggggtaatttagcttggggcttctcttgagcttgtgcaacccaaattgatggggaggcggggcctggggaattgccctttgcaacaaggtgcatgttgcatctgtctggagcccttgcagatctgtaaatgcaagccgcgccacccctttctcccgaggggggacgttttaaaacttcagaagtctgtaatcagcagtggcggactcggagcccagtagaagccccagccacctgagctggatgaggtttcaggcgttgcaagtggtggacagcgcccagccgaggccggaaaagtcgatggggctcagttcggcgacgctcggctaggatcatccatgaagatggcttctccggagaagacgtgaaacagtacaagcctgttgtctacagcaacactatccagtccctggcagccatcgtccgggccatggacactttgggcatcgaatatggtgataaggagagaaaggctgacgccaagatggtgtgtgatgtggtgagtcggatggaagacaccgagcccttctctgcagagctgctttctgccatgatgcggctctggggcgactcaggaatccaagagtgcttcaaccggtcccgggagtatcagctcaacgactctgccaaatactacctggacagcctggatcggattggggccgccgactaccagcccaccgagcaggacatcctccgaaccagggtcaaaaccactggcatcgtagaaacccacttcacattcaagaacctccacttcaggctgtttgacgtcggaggccagcgatctgaacgcaagaagtggatccattgcttcgaggacgtcacggccatcattttctgtgtcgcgctcagcggctatgaccaggtgctccacgaagacgaaaccacgaaccgcatgcacgagtctctcatgctcttcgactccatctgtaacaacaagttcttcatcgatacctccatcattctcttcctcaacaagaaagatctctttggcgagaagatcaagaagtcacctttgaccatctgctttcctgaatacacaggccccaatacctatgaagacgcagccgcctacatccaagcacaatttgaaagcaaaaaccgctcacccaacaaagaaatatattgtcacatgacttgtgccacagacacgaataacatccaggtggtgttcgacgccgtcaccgacatcatcattgccaacaacctccggggctgcggcttgtactgacctcttgtcctgtatagcaacctatttgactgcttcacggactctttgctgttgacgttgatctcctggtagcatgaccttttggcctttgtaagacacacagcctttctgtatcaagcccctgtctaacctacgaccccagagtgactgacggctgtgtatttctgtagaatgctgtagaatccggttttagttgagtcttcacatttagaatttgaaaggaaaaacagaacatttctcatgtgctttgtagcttaaaaaaaggaaaactcaccatttcatccatatttctttttcttgcaaaacaaacatacccatctgcaccgacgcctgcccccgtcccacctcgcggcgcagcccctggagctcctgctggggggcagggcccatctgccgcctggggctccggtgcggtgcactggtccgaggagtgtgctcaggccgggctttccagaaggccacaggccactgcaaaccctgctgcctgccggccgcccagacaccacagacgccacctggcggccctaagccactcccgccacacgctcactccaggttcgtatagaaaaagcacagctctcactggccagtagctgccaaaaagaacacccatcgtataaggaaatccagccccatagaaaacaatctgcccaccgaccccctttctaaggatagcctttgtaggggttttttggttccttttttttttttttcagtttttgtttttacttttgtcccgccgagtactatgtattaccagccccccaccccacagatcagttttcctagtctttgggaaacgggttgtgttttttttcctttgccgtgttggatttccggtcccggctgacacctcccttcgtgtgtgcgcccctccccacccctgcctttgtttcggtgccctgtgtccgctctctcatgtggggatgtttgtgctgcagacaaaaagaacaaaaaaaaatttttaaataccacaagatggaaaaaaaaaacaaaaaaatttaaaaagatggaatgtagtgtttacattaaagccgccgttttcatgaccaatcctatgtcatttctactttgactaatacccaaaccctaaacctcttcacggtttcacttttaagacttaatctttgctgaagaagaccagtcacagccatttcaaataaagaggaggcaaaaagacaaaacacacaaaaaattaaaaaaaaaaacttaaaaaaaaaaggaaaaaagaaaaaaaagcccacgggtctttgtaagcctttctattcccaatcggtgaggtttctgtgatatcttacacact

SEQ ID NO: 8641 - DNA, 543 bp, Homo sapiens
  source 1..543: mol_type = unassigned DNA; mol_type = unassigned DNA
atattcccaccacagctggtttcaagctacccatctggccagtgagtgatgcaacgttagctcttgtgagccagcacaactcactccagcacaccactgggtcaggccatggaagatagaagcaagaaggactgaagagcattccatggctttgctctgagcacctgggtagatggggatgccgtctactgaggatcatccatgaagatggcttctccggagaagacgtgaaacagtacaagcctgttgtctacagcaacactatccagtccctggcagccatcgtccgggccatggacactttgggcatcgaatatggtgataaggagagaaaggctgacgccaagatggtgtgtgatgtggtgagtcggatggaagacaccgagcccttctctgcagagctgctttctgccatgatgcggctctggggcgactcaggaatccaagagtgcttcaaccggtcccgggagtatcagctcaacgactctgccaaatactacctggacagcctggatcggattggggccgccgactaccagccca

SEQ ID NO: 8642 - DNA, 1162 bp, Homo sapiens
  source 1..1162: mol_type = unassigned DNA; mol_type = unassigned DNA
acagcccctcggggagtttaaataaggtgctgcggcacttgagttctgcaaaagacacctattcgctgaccagacaaagatgcttagccacaactcacaactctcagggtgcagttcgaagaggaggaagcagcatggcatataaagctcatgctcccttgaaggctggtgattgagacaagttatgtcttctagcatttgactccctcaaagagattgcaggacttccctctgattgcaggtggctcaatccactcagatcacctagaaacttgatagagatttagaatcttaaagaagacagaagcttagacagagcatgtagcccagcccatcaacagatgaagaagttgaatcctgcagggactacaaggaggatcatccatgaagatggcttctccggagaagacgtgaaacagtacaagcctgttgtctacagcaacactatccagtccctggcagccatcgtccgggccatggacactttgggcatcgaatatggtgataaggagagaaaggctgacgccaagatggtgtgtgatgtggtgagtcggatggaagacaccgagcccttctctgcagagctgctttctgccatgatgcggctctggggcgactcaggaatccaagagtgcttcaaccggtcccgggagtatcagctcaacgactctgccaaatactacctggacagcctggatcggattggggccgccgactaccagcccaccgagcaggacatcctccgaaccagggtcaaaaccactggcatcgtagaaacccacttcacattcaagaacctccacttcaggctgtttgacgtcggaggccagcgatctgaacgcaagaagtggatccattgcttcgaggacgtcacggccatcattttctgtgtcgcgctcagcggctatgaccaggtgctccacgaagacgaaaccacgaaccgcatgcacgagtctctcatgctcttcgactccatctgtaacaacaagttcttcatcgatacctccatcattctcttcctcaacaagaaagatctctttggcgagaagatcaagaagtcacctttgaccatctgctttcctgaatacacaggccccaatacctatgaagacgcagccgcctacatccaagcacaatttgaaagcaaaaaccgctcacccaa

SEQ ID NO: 8643 - DNA, 1672 bp, Homo sapiens
  source 1..1672: mol_type = unassigned DNA
actccacagtcagtccttggttgttcagacctcctgttccttatggtgcttctggtttggtggcctggaacacccctgagcgtccctgagttttgggtggacatgaattcagaatctagcttgatctccctttgataccctggctttgcagtcataagaaatctagtaggtccccaccctgacacacacacacacacacacacacacataacacacacagggacacacacgtctgcctcctttagtgagtgctctggagagggacaggtctggtgcatctgtgtactcctgactcatgtagttatgtcccactttatccaagcactgtctggagctcaaccctatgccaggagatatgggaagaaagcagagataggtgagatgtggtgctttaattttaaaaattaaaaattagtaaacaagtcttctgggagatgatctctgattattattgttatcagggtacaaaatatgtaccttttagtcatgtctctgttggttctaagtggcagaagcccaaatcaaattagcttattcaaaattgagagggaattatttggctcatatcactcaaaagtatggggtgggcttcaggcatggttggacccaggggctcaaatgatgtttctgggacttgattctgcactcaatcgctcagctatgtagatgaacagcccacctggggctgctgcaatgtgagatgccactgactgttgctaaggtatctcgtggagcctcgctcctgatttccaaatcctggccttgtcacctccacaactcagacctgggctgtcacatgagactgaactctccagagctgtatctccaactccaacccagaggcctcctttccttgccagaacattgggcagatacaacagggatcatccatgaagatggcttctccggagaagacgtgaaacagtacaagcctgttgtctacagcaacactatccagtccctggcagccatcgtccgggccatggacactttgggcatcgaatatggtgataaggagagaaaggctgacgccaagatggtgtgtgatgtggtgagtcggatggaagacaccgagcccttctctgcagagctgctttctgccatgatgcggctctggggcgactcaggaatccaagagtgcttcaaccggtcccgggagtatcagctcaacgactctgccaaatactacctggacagcctggatcggattggggccgccgactaccagcccaccgagcaggacatcctccgaaccagggtcaaaaccactggcatcgtagaaacccacttcacattcaagaacctccacttcaggctgtttgacgtcggaggccagcgatctgaacgcaagaagtggatccattgcttcgaggacgtcacggccatcattttctgtgtcgcgctcagcggctatgaccaggtgctccacgaagacgaaaccacgaaccgcatgcacgagtctctcatgctcttcgactccatctgtaacaacaagttcttcatcgatacctccatcattctcttcctcaacaagaaagatctctttggcgagaagatcaagaagtcacctttgaccatctgctttcctgaatacacaggccccaatacctatgaagacgcagccgcctacatccaagcacaatttgaaagcaaaaaccgctcacccaacaaa

SEQ ID NO: 8644 - DNA, 829 bp, Homo sapiens
  source 1..829: mol_type = unassigned DNA
gtccctggcagccatcgtccgggccatggacactttgggcatcgaatatggtgataaggagagaaaggctgacgccaagatggtgtgtgatgtggtgagtcggatggaagacaccgagcccttctctgcagagctgctttctgccatgatgcggctctggggcgactcaggaatccaagagtgcttcaaccggtcccgggagtatcagctcaacgactctgccaaatagctgtttgacgtcggaggccagcgatctgaacgcaagaagtggatccattgcttcgaggacgtcacggccatcattttctgtgtcgcgctcagcggctatgaccaggtgctccacgaagacgaaaccacgaaccgcatgcacgagtctctcatgctcttcgactccatctgtaacaacaagttcttcatcgatacctccatcattctcttcctcaacaagaaagatctctttggcgagaagatcaagaagtcacctttgaccatctgctttcctgaatacacaggccccaatacctatgaagacgcagccgcctacatccaagcacaatttgaaagcaaaaaccgctcacccaacaaagaaatatattgtcacatgacttgtgccacagacacgaataacatccaggtggtgttcgacgccgtcaccgacatcatcattgccaacaacctccggggctgcggcttgtactgacctcttgtcctgtatagcaacctatttggtaatgattccagcacccacagaacagcttgcgtgcgcgcgcatacacacacacacacacacacacacacacaccactaacaaatgcaagttggtaaataa

SEQ ID NO: 8645 - DNA, 789 bp, Homo sapiens
  source 1..789: mol_type = unassigned DNA
agtcggatggaagacaccgagcccttctctgcagagctgctttctgccatgatgcggctctggggcgactcaggaatccaagagtgcttcaaccggtcccgggagtatcagctcaacgactctgccaaatactacctggacagcctggatcggattggggccgccgactaccagcccaccgagcaggacatcctccgaaccagggtcaaaaccactggcatcgtagaaacccacttcacattcaagaacctccacttcaggctgtttgacgtcggaggccagcgatctgaacgcaagaagtggatccattgcttcgaggacgtcacggccatcattttctgtgtcgcgctcagcggctatgaccaggtgctccacgaagacgaaaccacgaaccgcatgcacgagtctctcatgctcttcgactccatctgtaacaacaagttcttcatcgatacctccatcattctcttcctcaacaagaaagatctctttggcgagaagatcaagaagtcacctttgaccatctgctttcctgaatacacagactgcttcacggactctttgctgttgacgttgatctcctggtagcatgaccttttggcctttgtaagacacacagcctttctgtatcaagcccctgtctaacctacgaccccagagtgactgacggctgtgtatttctgtagaatgctgtagaatccggttttagttgagtcttcacatttagaatttgaaaggaaaaacagaacatttctcatgtgctttgtagcttaaaaaaaggaaaactca

SEQ ID NO: 8646 - DNA, 968 bp, Homo sapiens
  source 1..968: mol_type = unassigned DNA
gcctggatcggattggggccgccgactaccagcccaccgagcaggacatcctccgaaccagggtcaaaaccactggcatcgtagaaacccacttcacattcaagaacctccacttcaggctgtttgacgtcggaggccagcgatctgaacgcaagaagtggatccattgcttcgaggacgtcacggccatcattttctgtgtcgcgctcagcggctatgaccaggtgctccacgaagacgaaaccacgaaccgcatgcacgagtctctcatgctcttcgactccatctgtaacaacaagttcttcatcgatacctccatcattctcttcctcaacaagaaagatctctttggcgagaagatcaagaagtcacctttgaccatctgctttcctgaatacacaggccccaatacctatgaagacgcagccgcctacatccaagcacaatttgaaagcaaaaaccgctcacccaacaaagaaatatattgtcacatgacttgtgccacagacacgaataacatccaggtggtgttcgacgccgtcaccgacatcatcattgccaacaacctccggggctgcggcttgtactgacctcttgtcctgtatagcaacctatttgtttgtactagaaagagctgcggacagaactgaccaccatcccatagctcatggaggttttcctgggacggcacactgcttcacggactctttgctgttgacgttgatctcctggtagcatgaccttttggcctttgtaagacacacagcctttctgtatcaagcccctgtctaacctacgaccccagagtgactgacggctgtgtatttctgtagaatgctgtagaatccggttttagttgagtcttcacatttagaatttgaaaggaaaaacagaacatttctcatgtgctttgtagcttaaaaaaaggaaaactcaccatttcatccatatttctttttcttgcaaaa

SEQ ID NO: 8647 - DNA, 2620 bp, Homo sapiens
  source 1..2620: mol_type = unassigned DNA
gagcaaacccaggaaggaatagactgagaggagggtcctcatgcgaggaggactctcagaggcacttcctgggggtggctcaggtgcgccctcttagtaaaatgctcctcagatgcaagggcaggtctttgagtcatgatctgtgagcacagccagtcccaggacagactccaggggtagtgcctggggatggcagtgatccagctgtctgtcatcacctggagtgacaaggtcttctagtgagggcttttagcaaggctctgagcaccatggcccccatcctctgcctctcagcgtgctcacagcttaatccccaggcagccctcacctgcctggaccctgcgcctaccagctccctgcctcctacaggctgtttgacgtcggaggccagcgatctgaacgcaagaagtggatccattgcttcgaggacgtcacggccatcattttctgtgtcgcgctcagcggctatgaccaggtgctccacgaagacgaaaccacgaaccgcatgcacgagtctctcatgctcttcgactccatctgtaacaacaagttcttcatcgatacctccatcattctcttcctcaacaagaaagatctctttggcgagaagatcaagaagtcacctttgaccatctgctttcctgaatacacaggccccaatacctatgaagacgcagccgcctacatccaagcacaatttgaaagcaaaaaccgctcacccaacaaagaaatatattgtcacatgacttgtgccacagacacgaataacatccaggtggtgttcgacgccgtcaccgacatcatcattgccaacaacctccggggctgcggcttgtactgacctcttgtcctgtatagcaacctatttggtaatgattccagcacccacagaacagcttgcgtgcgcgcgcatacacacacacacacacacacacacacacaccactaacaaatgcaagttggtaaataaactttaaagaggcataacaaaaccttatatatatatatatatatacaaatatatatttaaaaaatctttttagtttgtactagaaagagctgcggacagaactgaccaccatcccatagctcatggaggttttcctgggacggcacgtgagcatgcacgtgtgtgtgtgtacacacactcacacatgtccagatgggagcttggtttgggagtccctccttttgaggatagccccggggtgttcctctcagccccatttctgagaacaggtgaatggcagaacagccctggccttggcccagccagctctctgtgttgcgcccttagagcctctgcgccctcagttccgtcctgctcttggcaaattccagaccctttcagaaatggccgaagccctaagcctctcctcactctgcactcccaaaaacagaacaatttaaggatgcttctctttcgggtggtggtggttgttaatttcaggaatttagaagaatcattgctccgaccaatccactgtctcctgagttttctttattcatgttaagatggcaagaatcagagaacagggagacttggtctgctttctaaaagcagctgacaggaggggactcaagttcacctgcagagttgaaaccagccccgctccaagagggcatgtgggaaggtggggagcgaggggaacaggcgtggcggggagggccggacttgtgggcctgacccgagtcagggtctcaggggggggccaggcttccccaggtgcccgggatgggcttcaatggggttcctgacccctcgtgctgctgccccatctcgcccaaccccagcagtagtcaaaatgttctagggttttttggttggttggttggtttttaaaatcaaagaaaatggtcagactggaccccttatctctctctctacagactgcttcacggactctttgctgttgacgttgatctcctggtagcatgaccttttggcctttgtaagacacacagcctttctgtatcaagcccctgtctaacctacgaccccagagtgactgacggctgtgtatttctgtagaatgctgtagaatccggttttagttgagtcttcacatttagaatttgaaaggaaaaacagaacatttctcatgtgctttgtagcttaaaaaaaggaaaactcaccatttcatccatatttctttttcttgcaaaacaaacatacccatctgcaccgacgcctgcccccgtcccacctcgcggcgcagcccctggagctcctgctggggggcagggcccatctgccgcctggggctccggtgcggtgcactggtccgaggagtgtgctcaggccgggctttccagaaggccacaggccactgcaaaccctgctgcctgccggccgcccagacaccacagacgccacctggcggccctaagccactcccgccacacgctcactccaggttcgtatagaaaaagcacagctctcactggccagtagctgccaaaaagaacacccatcgtataaggaaatccagccccatagaaaacaatctgcccaccgaccccctttctaaggatagcctttgtaggggttttttggttccttttttttttttttcagtttttgtttttacttttgtcccgccgagtactatgtattacc

SEQ ID NO: 8648 - DNA, 382 bp, Homo sapiens
  source 1..382: mol_type = unassigned DNA
aggccagcgatctgaacgcaagaagtggatccattgcttcgaggacgtcacggccatcattttctgtgtcgcgctcagcggctatgaccaggtgctccacgaagacgaaaccacggccccaatacctatgaagacgcagccgcctacatccaagcacaatttgaaagcaaaaaccgctcacccaacaaagaaatatattgtcacatgacttgtgccacagacacgaataacatccaggtggtgttcgacgccgtcaccgacatcatcattgccaacaacctccggggctgcggcttgtactgacctcttgtcctgtatagcaacctatttggtaatgattccagcacccacagaacagcttgcgtgcgcgcgcatacacaca

SEQ ID NO: 8649 - DNA, 641 bp, Homo sapiens
  source 1..641: mol_type = unassigned DNA
atccattgcttcgaggacgtcacggccatcattttctgtgtcgcgctcagcggctatgaccaggtgctccacgaagacgaaaccacgaaccgcatgcacgagtctctcatgctcttcgactccatctgtaacaacaagttcttcatcgatacctccatcattctcttcctcaacaagaaagatctctttggcgagaagatcaagaagtcacctttgaccatctgctttcctgaatacacaggccccaatacctatgaagacgcagccgcctacatccaagcacaatttgaaagcaaaaaccgctcacccaacaaagaaatatattgtcacatgacttgtgccacagacacgaataacatccaggtggtgttcgacgccgtcaccgacatcatcattgccaacaacctccggggctgcggcttgtactgacctcttgtcctgtatagcaacctatttgtttgtactagaaagagctgcggacagaactgaccaccatcccatagctcatggaggttttcctgggacggcacgtgagcatgcacgtgtgtgtgtgtacacacactcacacatgtccagatgggagcttggtttgggagtccctccttttgaggatagccccggggtgttcctctcagccccat

SEQ ID NO: 8650 - DNA, 332 bp, Homo sapiens
  source 1..332: mol_type = unassigned DNA
caggtgctccacgaagacgaaaccacgaaccgcatgcacgagtctctcatgctcttcgactccatctgtaacaacaagttcttcatcgatacctccatcattctcttcctcaacaagaaagatctctttggcgagaagatcaagaagtcacctttgaccatctgctttcctgaatacacaggccccaatacctatgaagacgcagccgcctacatccaagcacaatttgaaagcaaaaaccgctcacccaacaaagaaatatattgtcacatgacttgtgccacagacacgaataacatccagactgcttcacggactctttgctgttgacg

SEQ ID NO: 8651 - DNA, 771 bp, Homo sapiens
  source 1..771: mol_type = unassigned DNA
gcctgcagggccttatcttgccaaaccaaggccaaaaccagttctgagagaccctccaagcccggaagaaccgcatgcacgaatccctgaagctttttgacagcatctgcaacaacaaatggttcacagacacgtccatcatcctgtttcttaacaagaaggacatatttgaagagaagatcaagaagtccccgctcaccatctgctttcctgaatatacaggccccagcgccttcacagaagccgtggcttacatccaggcccagtacgagagcaagaacaagtcagcccacaaagagatctacacccacgtcacctgcgccacggacaccaacaacatccagtttgtctttgatgctgtgacggacgtcatcatcgccaaaaacctgcggggctgtggactctactgagcccagccgccctgcccggcacccttgccctgcctggcctgccgccccccctcccctggaaccaggctccaccactctcagaccactctttgcacttgaggaagaagacctcagaggctggcaccaagggagggaggagggagcatcctccacccgcaccccccaacagaacttgtggtaacgcaggggcggggcggggctgctgagtgcatgctgcaaggccaggagactccacgctcacagcctctgtgtcatctctgagtgcttgatcgggaagctggggggacagggcagggcccagatgggcacaccctgcacctgatgactcactggaagcctcggagtgtcctcctgtcatctt

SEQ ID NO: 8652 - DNA, 5062 bp, Homo sapiens
  source 1..5062: mol_type = unassigned DNA
ctcacccccgagacgctattccctggtgtctgcttccaactcgggattaattcgaggatctcttagtcctcagttaatgtttcccaactgaatgcgtgcacccttccaaccttgctgtcaaaaccgaatgagaccctggtagagaaatctgcatgagcagggttccgcgcagatgcgttcggtggtggttgcggcccctgcgctgtacgtgcatggtgcatgtcctctccgtgagctggagcctctccagtgacctcactgcccccacctggggccagctctctttggaagggggcagcatcccccaaccctgcccggccctgctccgccccgccctgcctgcgtgtggaatgaaacaggaccacgtcccgtctgtccttgtgggtcctcccgtctccgtcctggtggtctccgtcccggtggtgcatccagccacattggtggaccttccctttgcttgtcccgctgtgtcattggccgcggtgggtcagggccctggatgctgccgcccctcactcacccctccactctgttgcagaaccgcatgcacgaatccctgaagctttttgacagcatctgcaacaacaaatggttcacagacacgtccatcatcctgtttcttaacaagaaggacatatttgaagagaagatcaagaagtccccgctcaccatctgctttcctgaatatacaggccccagcgccttcacagaagccgtggcttacatccaggcccagtacgagagcaagaacaagtcagcccacaaagagatctacacccacgtcacctgcgccacggacaccaacaacatccagtttgtctttgatgctgtgacggacgtcatcatcgccaaaaacctgcggggctgtggactctactgagcccagccgccctgcccggcacccttgccctgcctggcctgccgccccccctcccctggaaccaggctccaccactctcagaccactctttgcacttgaggaagaagacctcagaggctggcaccaagggagggaggagggagcatcctccacccgcaccccccaacagaacttgtggtaacgcaggggcggggcggggctgctgagtgcatgctgcaaggccaggagactccacgctcacagcctctgtgtcatctctgagtgcttgatcgggaagctggggggacagggcagggcccagatgggcacaccctgcacctgatgactcactggaagcctcggagtgtcctcctgtcatcttgggtggtgcaggggcgcagatggccctgcagcagggtgctggcagggtggggtcataggagccatccttcagctttgcctggggtctctggtggagggcagttccgtcaacaaaagccagggtgggatcaggccaacttggtgtgggttggaggactcaggccttggcgatggcctccgtctccctgctccctcccctgggtctcagcccttccttctctgggtcatcctcccttgcctttgctctcccagagaactcccatccctgactcctccgagttctggaaatgcttcttgagactgatttatggctcagatagatggtggcgtggagcggggggagggagagatgggaggtgcggggaagggaggtggaagctcctgtgtcacctgggctggggcctcccgcccagtcctcgcaggccaaagggtgacccatttcttttttccagtcaccaggagctcggatggtcactctgaggtgtgaatagatatgtttttccttcagtccacactgaattcaactcaaaccagcaaaggcctttgggctggggattctgtggttgcagaggtctagagggggtggacttttgcagccagtgcctccgcctcaccgtcttggtgaagaaatcagcgagtttgttcacagccgttggtgtcttcccagcccctggggacagaggacagcagggggatggagctgacaccctggagtatttggacccaggccagcacaaacacacccccctgtccccaactctaaagggagagtcctaggactccttagaggaggcttcactgcggagatccctgagcagaagggggcggggtagcttctcccggtgacggtgacgcaggtctggctggccttgggcaaccaacacacctctcccactccaagatgcctccaggtggctgaggccaacgcccacacccaggccagtcgtgtgcttgtacagcaggctgtgcctggggacctagatgtgccatgggagggaggagggtacccactgacaggcctctgcctccctcctcaagccctctgttctccctgcccccactctggacactgcttagtccccagccaggcagggcccctgggtttccacttgcagcccccggactgccccagagccgggaagcaccagtgccaacagctctggacttgttggacccacaggcacagagctctgagtggtgcccaggagacccaggaaccttccctagtgccaaatgcctgcagggaccggtgcctggggagcctctggcagccggactgcaggagccaccccatcagcccaagtccacctctgttttgttcacctcggtcatgttttggaccttgcaccaggtgctgggacgtggcagaggacaggccctgggaaccaacagtgtcctaccatggacagccagggccagctaagctaagccatcccgcccaacacagaagacatggcagttatttctcagcagcaccacgctgggtgaggccagttgttccgcttactctgctccgaactgtaaccccaggctcagaagcagccggcaaaagggggatgctggccacgccccacctctaaggccatcaccctggaggtggaagtcactgggctggagggctctccatgtcccccagcagccgccctcagaacacagtggccagagcaccaggctgggtccaggcctccaatccaggccttccctgtccctagaactggggctggaggagtgggtgctcagcccttcctgccctccatccccagcctgcctttctcttcctttggatgctccatcctccttggtttcttgcactgctctcaatcctcccaccctagcctgggggtggtccttggtcctcaggggtatccggggagaaattctctccctgtgcatgacacctgtcatccatgtcgtaaccagcggctccatcttgtggggtggtgactgagggtgacaaatgagatttggctccgtcgtggatgtggatgtgggaggaatgttgcgagtgacacgtgtgggtttctaatccacagtggtcctgcgtgtgccctgaggggccatggtaacctctccgatggctcggatttagcaggccaagcagaaactgatttctacgaagagcgtctttgccaaactcatgaaaattgtgcctgccactttcatgcctatgggccagttttgtgacctgcgccgctgaccatcctaagaaccaggtcttggccttccctctgagcactgatagaggtccccaaggctctctggcctgaggagggtgtggggtctgcccagccccaagcagagagcacagtctgggcccctgaccaacagctttggcattctgggttccatggggaccctagagctcaggcacaagaacaacaccatacctgctgccaggacgcagctgtctcccaggccctccccacagcccagctcccactggcaggaactggacacatccctgccctccatggtctgcactggtcttctctgagtattcttaggagcagaggcagccccaagttccaacttgcaagccctgtaactaagctgtctataaaccccagcagggaaggccaagggatggtctcacccatgcccttccctttggccaacatgagtcctgcagtggggagcttagcccctgctcccacctaacactctacagttagcacccaggggttgattcaggaagttcttcctttttctagcctgcatccttcctggccaccccctttatttctcagtctgacctggtgcactcttggcaagtgagtccattgcagtcccaggtggatatttaatgagcactcggactgtttcctccaagtcagctagtggcctgccctcctccttttcaagaagtctggggcacagagcctcctctggctgcctcttctcttctctgagcctctgggagccttcaggcaaaacctggcagttctcaggaacccagacctgaggctccagctccgcggccaccagagattcagtgtgcagtgccgaaggcagtcacccccaggcagttcctgctgtcaggccgcaagcctagagcgcaggatcccagcagcccagggaacagggccggcgtgtgagctgctgccgtggggtctgtggtagggctccccatctcccacccctcagcaagaagagtcctgacccctgaccccaccctgcccagagaggagctggggcctccagacagaccccactgcagccagatgaaggcccctgtcaaagaaggggcaggctgggggaaaagcagaaagaatggcccccagtccaaactcctggatcccctccatgagagaggggctccccctggaacagaagctctcatccccaggcccagtgcacaagaccaccagcagagacccaccgcccttcctggcagagcaccacttcctggcagtgcagctccgaggcaccactactgtcctccccttccctccccacccctcccctccctttccctcctctcccctcccctccacacctgccctgttactcccacagctctgggcagccaggccctcccctcctgcctcctggtcttctctactccgctggttctgacccatcccctggctctgcccgccgtcccccaccctgcccctgctgagtatcttcttcctccccacgcacccccctcccccatctaggcgaggtgggctcgggcgtcccaggccctccttagaaaagccgtctctctcgagtgcagtggtcccacctcccaaccccatcactgctgcccaccccatattaactgtaattttgtaagaagagtgacttgttggtttaataaatctctagttattgtaa

SEQ ID NO: 8653 - DNA, 2869 bp, Homo sapiens
  source 1..2869: mol_type = unassigned DNA
gcgcctggagcctgtgatttgtcagggaaatctcagccacctgctcccctcatgcaaatgacccaagcccctggcagctgctccttaggcctccaagtgtaagccctgtcttccctctctgagctttgctgagacttagggccgcctgctttctctctgacccctgctttcacagcctcgagagggcaaggagggggccagaccccagcctgggagcagcgtgcgggccttccctccacttgaaatccgttgcccgcccacaataggggcagacctgtccatccttctctgtgggtcccctgtacctttctcccccaacaggatcagacccagaggcagctggttggggtttgtcgagaagaaggattatccagatcagtcctttctaatctcagctcctgcctgtaccctcccatactcaccaaaccctcttccccaccaccctgagctgaggagcacagtttgaggtactgacaatggggccatctatcacccttatatcccacctcctggcctggttgctaagtggccctgactgccaagatcatcaccatggatgggggccgggaccaggggggccactggagctgtagttgtctgctcctttgcacccctcccaaaccccaacccttaatcctcacagctttgctctaatcctgtggggcctgatgctcttatctctgcctgcagagactgaccagggaagcaccccttcaccccctcctctctcagggcttgtggtgggggctgcccctctctatggccccacactcctgcccccaaccctcctcccggctgggcccaagtctctctggaatccgtacacctccctccctccccccaccccttccccccacccctgccagctgatttcatttgcctgacgttgtggttggctctacccttccctgtcaggcccccccaaccccccgccggtcggggccaggccaggccaggccagctcctctggcagcagagcctgggcaggtgacgggcgggcgcgggcgtcgcagctgagggagtaaggaggctcccaggaaccggagctggaaacccggccgaggtccagccagagcccaagagccagagtgacccctcgacctgtcagccatgggggagatggagcaactgcgtcaggaagcggagcagctcaagaagcagattgcagtaactccagagccctacccctggggccccagaaaacagctggggacatgaggagcgtggcccagggggagggggctgggtttgctcttgagtgactagaagtgaccagggactttctaaacttggttcgcatatttgagacccccaagccccagagccccaagaccaacctgccctgaaggcccatgcacctgccacccccacctcgcccttgctcccctgatgtctgctttccctgcaggatgccaggaaagcctgtgctgacgttactctggcagagctggtgtctggcctagaggtggtgggacgagtccagatgcggacgcggcggacgttaaggggacacctggccaagatttacgccatgcactgggccactgattctaagctgctggtaagtgcctcgcaagatgggaagctgatcgtgtgggacagctacaccaccaacaaggtgcacgccatcccactgcgctcctcctgggtcatgacctgtgcctatgccccatcagggaactttgtggcatgtggggggctggacaacatgtgttccatctacaacctcaaatcccgtgagggcaatgtcaaggtcagccgggagctttctgctcacacaggttatctctcctgctgccgcttcctggatgacaacaatattgtgaccagctcgggggacaccacgtgtgccttgtgggacattgagactgggcagcagaagactgtatttgtgggacacacgggtgactgcatgagcctggctgtgtctcctgacttcaatctcttcatttcgggggcctgtgatgccagtgccaagctctgggatgtgcgagaggggacctgccgtcagactttcactggccacgagtcggacatcaacgccatctgtttcttccccaatggagaggccatctgcacgggctcggatgacgcttcctgccgcttgtttgacctgcgggcagaccaggagctgatctgcttctcccacgagagcatcatctgcggcatcacgtccgtggccttctccctcagtggccgcctactattcgctggctacgacgacttcaactgcaatgtctgggactccatgaagtctgagcgtgtgggcatcctctctggccacgataacagggtgagctgcctgggagtcacagctgacgggatggctgtggccacaggttcctgggacagcttcctcaaaatctggaactgaggaggctggagaaagggaagtggaaggcagtgaacacactcagcagccccctgcccgaccccatctcattcaggtgttctcttctatattccgggtgccattcccactaagctttctcctttgagggcagtggggagcatgggactgtgcctttgggaggcagcatcagggacacaggggcaaagaactgccccatctcctcccatggccttccctccccacagtcctcacagcctctcccttaatgagcaaggacaacctgcccctccccagccctttgcaggcccagcagacttgagtctgaggccccaggccctaggattcctcccccagagccactacctttgtccaggcctgggtggtatagggcgtttggccctgtgactatggctctggcaccactagggtcctggccctcttcttattcatgctttctcctttttctacctttttttctctcctaagacacctgcaataaagtgtagcaccctggta

SEQ ID NO: 8654 - DNA, 1923 bp, Homo sapiens
  source 1..1923: mol_type = unassigned DNA
ccacaataggggcagacctgtccatccttctctgtgggtcccctgtacctttctcccccaacaggatcagacccagaggcagctggttggggtttgtcgagaagaaggattatccagatcagtcctttctaatctcagctcctgcctgtaccctcccatactcaccaaaccctcttccccaccaccctgagctgaggagcacagtttgaggcccccccaaccccccgccggtcggggccaggccaggccaggccagctcctctggcagcagagcctgggcaggtgacgggcgggcgcgggcgtcgcagctgagggagtaaggaggctcccaggaaccggagctggaaacccggccgaggtccagccagagcccaagagccagagtgacccctcgacctgtcagccatgggggagatggagcaactgcgtcaggaagcggagcagctcaagaagcagattgcagatgccaggaaagcctgtgctgacgttactctggcagagctggtgtctggcctagaggtggtgggacgagtccagatgcggacgcggcggacgttaaggggacacctggccaagatttacgccatgcactgggccactgattctaagctgctggtaagtgcctcgcaagatgggaagctgatcgtgtgggacagctacaccaccaacaaggtgcacgccatcccactgcgctcctcctgggtcatgacctgtgcctatgccccatcagggaactttgtggcatgtggggggctggacaacatgtgttccatctacaacctcaaatcccgtgagggcaatgtcaaggtcagccgggagctttctgctcacacaggttatctctcctgctgccgcttcctggatgacaacaatattgtgaccagctcgggggacaccacgtgtgccttgtgggacattgagactgggcagcagaagactgtatttgtgggacacacgggtgactgcatgagcctggctgtgtctcctgacttcaatctcttcatttcgggggcctgtgatgccagtgccaagctctgggatgtgcgagaggggacctgccgtcagactttcactggccacgagtcggacatcaacgccatctgtttcttccccaatggagaggccatctgcacgggctcggatgacgcttcctgccgcttgtttgacctgcgggcagaccaggagctgatctgcttctcccacgagagcatcatctgcggcatcacgtccgtggccttctccctcagtggccgcctactattcgctggctacgacgacttcaactgcaatgtctgggactccatgaagtctgagcgtgtgggcatcctctctggccacgataacagggtgagctgcctgggagtcacagctgacgggatggctgtggccacaggttcctgggacagcttcctcaaaatctggaactgaggaggctggagaaagggaagtggaaggcagtgaacacactcagcagccccctgcccgaccccatctcattcaggtgttctcttctatattccgggtgccattcccactaagctttctcctttgagggcagtggggagcatgggactgtgcctttgggaggcagcatcagggacacaggggcaaagaactgccccatctcctcccatggccttccctccccacagtcctcacagcctctcccttaatgagcaaggacaacctgcccctccccagccctttgcaggcccagcagacttgagtctgaggccccaggccctaggattcctcccccagagccactacctttgtccaggcctgggtggtatagggcgtttggccctgtgactatggctctggcaccactagggtcctggccctcttcttattcatgctttctcctttttctacctttttttctctcctaagacacctgcaataaagtgtagcaccctggta

SEQ ID NO: 8655 - DNA, 761 bp, Homo sapiens
  source 1..761: mol_type = unassigned DNA
tccccaccaccctgagctgaggagcacagtttgaggagccagagtgacccctcgacctgtcagccatgggggagatggagcaactgcgtcaggaagcggagcagctcaagaagcagattgcagatgccaggaaagcctgtgctgacgttactctggcagagctggtgtctggcctagaggtggtgggacgagtccagatgcggacgcggcggacgttaaggggacacctggccaagatttacgccatgcactgggccactgattctaagctgctggtaagtgcctcgcaagatgggaagctgatcgtgtgggacagctacaccaccaacaaggtgcacgccatcccactgcgctcctcctgggtcatgacctgtgcctatgccccatcagggaactttgtggcatgtggggggctggacaacatgtgttccatctacaacctcaaatcccgtgagggcaatgtcaaggtcagccgggagctttctgctcacacaggttatctctcctgctgccgcttcctggatgacaacaatattgtgaccagctcgggggacaccactgccttgtgggacattgagactgggcagcagaagactgtatttgtgggacacacgggtgactgcatgagcctggctgtgtctcctgacttcaatctcttcatttcgggggcctgtgatgccagtgccaagctctgggatgtgcgagaggggacctgccgtcagactttcactggccacgagtcggacatcaacgccatctgt

SEQ ID NO: 8656 - DNA, 962 bp, Homo sapiens
  source 1..962: mol_type = unassigned DNA
cttccccccacccctgccagctgatttcatttgcctgacgttgtggttggctctacccttccctgtcaggcccccccaaccccccgccggtcggggccaggccaggccaggccagctcctctggcagcagagcctgggcaggtgacgggcgggcgcgggcgtcgcagctgagggagtaaggaggctcccaggaaccggagctggaaacccggccgaggtccagccagagcccaagagccagagtgacccctcgacctgtcagccatgggggagatggagcaactgcgtcaggaagcggagcagctcaagaagcagattgcagatgccaggaaagcctgtgctgacgttactctggcagagctggtgtctggcctagaggtggtgggacgagtccagatgcggacgcggcggacgttaaggggacacctggccaagatttacgccatgcactgggccactgattctaagctgctggtaagtgcctcgcaagatgggaagctgatcgtgtgggacagctacaccaccaacaaggtgcacgccatcccactgcgctcctcctgggtcatgacctgtgcctatgccccatcagggaactttgtggcatgtggggggctggacaacatgtgttccatctacaacctcaaatcccgtgagggcaatgtcaaggtcagccgggagctttctgctcacacaggttatctctcctgctgccgcttcctggatgacaacaatattgtgaccagctcgggggacaccacgtgtgccttgtgggacattgagactgggcagcagaagactgtatttgtgggacacacgggtgactgcatgagcctggctgtgtctcctgacttcaatctcttcatttcgggggcctgtgatgccagtgccaagctctgggatgtgcgagaggggacctgccgtcagactttcactggccacgagtcggacatcaacgccatctg

SEQ ID NO: 8657 - DNA, 1110 bp, Homo sapiens
  source 1..1110: mol_type = unassigned DNA
agtaaggaggctcccaggaaccggagctggaaacccggccgaggtccagccagagcccaagagccagagtgacccctcgacctgtcagccatgggggagatggagcaactgcgtcaggaagcggagcagctcaagaagcagattgcagatgccaggaaagcctgtgctgacgttactctggcagagctggtgtctggcctagaggtggtgggacgagtccagatgcggacgcggcggacgttaaggggacacctggccaagatttacgccatgcactgggccactgattctaagctgctggtaagtgcctcgcaagatgggaagctgatcgtgtgggacagctacaccaccaacaaggtgcacgccatcccactgcgctcctcctgggtcatgacctgtgcctatgccccatcagggaactttgtggcatgtggggggctggacaacatgtgttccatctacaacctcaaatcccgtgagggcaatgtcaaggtcagccgggagctttctgctcacacaggttatctctcctgctgccgcttcctggatgacaacaatattgtgaccagctcgggggacaccactgccttgtgggacattgagactgggcagcagaagactgtatttgtgggacacacgggtgactgcatgagcctggctgtgtctcctgacttcaatctcttcatttcgggggcctgtgatgccagtgccaagctctgggatgtgcgagaggggacctgccgtcagactttcactggccacgagtcggacatcaacgccatctgtttcttccccaatggagaggccatctgcacgggctcggatgacgcttcctgccgcttgtttgacctgcgggcagaccaggagctgatctgcttctcccacgagagcatcatctgcggcatcacgtccgtggccttctccctcagtggccgcctactattcgctggctacgacgacttcaactgcaatgtctgggactccatgaagtctgagcgtgtgggcatcctctctggccacgataacagggtgagctgcctgggagtcacagctgacgggatggctgtggccacaggttcctgggacagcttcctcaaaatctggaactga

SEQ ID NO: 8658 - DNA, 590 bp, Homo sapiens
  source 1..590: mol_type = unassigned DNA
cggagctggaaacccggccgaggtccagccagagcccaagagccagagtgacccctcgacctgtcagccatgggggagatggagcaactgcgtcaggaagcggagcagctcaagaagcagattgcagatgccaggaaagcctgtgctgacgttactctggcagagcgggacctgctctgagccaggcaccatattggatgcgaaagatgcggacacggttcctattctcatccgtagaacaagagtgaccacagccccctcccagggccttgaagatgaagaagcgatagtactttctggtgtctggcctagaggtggtgggacgagtccagatgcggacgcggcggacgttaaggggacacctggccaagatttacgccatgcactgggccactgattctaagctgctggtaagtgcctcgcaagatgggaagctgatcgtgtgggacagctacaccaccaacaaggtgcacgccatcccactgcgctcctcctgggtcatgacctgtgcctatgccccatcagggaactttgtggcatgtggggggctggacaacatgtgttccatctacaacctcaaatcccgtgag

SEQ ID NO: 8659 - DNA, 616 bp, Homo sapiens
  source 1..616: mol_type = unassigned DNA
ggagctggcctgggctctgctctcctgggctggggcgcaggcagggctcaggcaggctggggctggacgcaaaggacctcaaacttggagggcctagctggggagagggtgcagccacccagtcgtttccctgtgtcttggagtctggtgtgggcacgaagggcagaagcacagcctggtggggggttcctcaacaccgaccccatgttcctggcaggagccagagtgacccctcgacctgtcagccatgggggagatggagcaactgcgtcaggaagcggagcagctcaagaagcagattgcagtaactccagagccctacccctggggccccagaaaacagctggggacatgaggagcgtggcccagggggagggggctgggtttgctcttgagtgactagaagtgaccagggactttctaaacttggttcgcatatttgagacccccaagccccagagccccaagaccaacctgccctgaaggcccatgcacctgccacccccacctcgcccttgctcccctgatgtctgctttccctgcaggatgccaggaaagcctgtgctgacgttactctggcagagctggtgtctggcctagaggtggtgggacgagt

SEQ ID NO: 8660 - DNA, 796 bp, Homo sapiens
  source 1..796: mol_type = unassigned DNA
ccatgggggagatggagcaactgcgtcaggaagcggagcagctcaagaagcagattgcagatgccaggaaagcctgtgctgacgttactctggcagagctggtgtctggcctagaggtggtgggacgagtccagatgcggacgcggcggacgttaaggggacacctggccaagatttacgccatgcactgggccactgattctaagctgctggtaagtgcctcgcaagatgggaagctgatcgtgtgggacagctacaccaccaacaaggtgcacgccatcccactgcgctcctcctgggtcatgacctgtgcctatgccccatcagggaactttgtggcatgtggggggctggacaacatgtgttccatctacaacctcaaatcccgtgagggcaatgtcaaggtcagccgggagctttctgctcacacaggttatctctcctgctgccgcttcctggatgacaacaatattgtgaccagctcgggggacaccacgtgtgccaagctctgggatgtgcgagaggggacctgccgtcagactttcactggccacgagtcggacatcaacgccatctgtttcttccccaatggagaggccatctgcacgggctcggatgacgcttcctgccgcttgtttgacctgcgggcagaccaggagctgatctgcttctcccacgagagcatcatctgcggcatcacgtccgtggccttctccctcagtggccgcctactattcgctggctacgacgacttcaactgcaatgtctgggactccatgaagtctgagcgtgtggg

SEQ ID NO: 8661 - DNA, 997 bp, Homo sapiens
  source 1..997: mol_type = unassigned DNA
cagcgctgtatagtgcagagcgggcgaggggcatagggaagtcactggcacgtggtatgtgttggcagggctgcttctcaccccaaaccaagggagggacaggcagggaggctgagagcagcggcttgccctggagctgtcaggtgggaggcagagggcgggagaggctgtgggctgcccaggtctgatccctgacccacttgccacccgtgccctcagttcttccccaatggagaggccatctgcacgggctcggatgacgcttcctgccgcttgtttgacctgcgggcagaccaggagctgatctgcttctcccacgagagcatcatctgcggcatcacgtccgtggccttctccctcagtggccgcctactattcgctggctacgacgacttcaactgcaatgtctgggactccatgaagtctgagcgtgtgggcatcctctctggccacgataacagggtgagctgcctgggagtcacagctgacgggatggctgtggccacaggttcctgggacagcttcctcaaaatctggaactgaggaggctggagaaagggaagtggaaggcagtgaacacactcagcagccccctgcccgaccccatctcattcaggtgttctcttctatattccgggtgccattcccactaagctttctcctttgagggcagtggggagcatgggactgtgcctttgggaggcagcatcagggacacaggggcaaagaactgccccatctcctcccatggccttccctccccacagtcctcacagcctctcccttaatgagcaaggacaacctgcccctccccagccctttgcaggcccagcagacttgagtctgaggccccaggccctaggattcctcccccagagccactacctttgtccaggcctgggtggtatagggcgtttggccctgtgactatggctctggcaccactagggtcctggccctcttcttattcatgctttctcctttttctacctttttt

SEQ ID NO: 8662 - DNA, 3055 bp, Homo sapiens
  source 1..3055: mol_type = unassigned DNA
gcgcggagaacacaaagtaaaacttctgctgttcccagtcctgcagccccagcccagccgtcccccgcgggcgtggcaggtcctgagtcagggcctgtccgtggccagcatccctgctgggcgattgagcagcgggaagctgcttggacccagtctcaaacttaaccctcatctagcacccgggcaggcctcctgggttgcagggacttgagaaaaggcagagttctcaggtcctaggaagctggggcacgctggcgtgacaagcgtcccggagaaagccaagccctcggggagctggggaccgcagcagggctgcagtcacatcctgcgcgggtgggcggcgggccaggccttcagttgtttcgggacgcgccgagcttcgccgctcttccagcggctccgctgccagagctagcccgagcccggttctggggcgaaaatgcctgcccttcacatcgaagatttgccagagaaggaaaaactgaaaatggaagttgagcagcttcgcaaagaagtgaagttgcagagacaacaagtgtctaaatgttctgaagaaataaagaactatattgaagaacgttctggagaggatcctctagtaaagggaattccagaagacaagaacccctttaaagaaaaaggcagctgtgttatttcataaataacttgggagaaactgcatcctaagtggaagaactagtttgttttagttttcccagataaaaccaacatgctttttaaggaaggaagaatgaaattaaaaggagactttcttaagcaccatatagatagggttatgtataaaagcatatgtgctactcatctttgctcactatgcagtcttttttaagagagcagagagtatcagatgtacaattatggaaataagaacattacttgagcatgacacttctttcagtatattgcttgatgcttcaaataaagttttgtcttgggaagatgagtgttggtgatttaagaagacacttttcatgcattaacttttatatttctccccgtaatcttttgggtgtggagtatgattgggtttggaatatgattcagaaggttaggtggttcgacagatcacatctccaaaccctgcgtcaatggtttagagtgctgagttctgacctctggaacgtgtttgatctaaccttaactattaagaaactgagcaggtagaattcctataacattgacagaagtcagattatctgagtcaggaacaaggccaagccacatctatgttagtacttccctagtttatcatcatttagatcttcttaatagtgttcctgtagtagtagccttgaagaaaatactgagttggggttcaggaagagtgccctgcctctctgccgtgtagtggccaggccagccctggctttgagagccagtacttattcctgcacagagctacatctcccatgtgctctccaggtcttgggcatggcactactccagttctgtggcattggtgcagacacttggacctctgcactcatgcttgccagcattttccagcaggcctgggccaaacatgcctttttttcttctcctccaaaggaaccagtgaatctttgcccactttaaagattagttggtctttttcttactgatttgtaggaattcttcatatattctggccatttattcgtgtttggtgatatgtgttgcgaataccttctcccagtctgtggcttaccttttcacagtgaccttcccttcagtggttttatcctgcagggcaacacgtcagagtataactcctgctcaagttcataacaaaggtacctgaagcccaaacctcacaaaaagggacctttctttctcaccttgagcattctcccgcttcttctccgtcttttgggtcaaaattgctccaagtttgagccaaaagaaaaacgtggaaaaacccttgctggttagctctagctcaaatggacttagtcattaacttgacctgcaattttcaatgtggcaccagaagccaatgtttctccttgactagctcttttctcccacttacacatgtaggtataccttactatcaagcgagagaggcgcctgtaacctgtagcagctttctaaagtatatcagcatcctcgttctgaaattcctttcctttccctctctgggaaagaacagaataccccaggcttttgaaaaatagtttacacagaccaaaagcagaaactatttccttcagtttcctgacactgtccaagtgatgacatcaattggcattactgagagcccagggataattttagcccaaaactactactcctaggaaggagtagtatgatctactactcttaggaaggatttaggaatagtaaaggtgtatttcttccaaacagcatagaactattagtactattagtcatttaacatttaacatggcatgggattttagagctttggtgcctgtaaagttttacttctattagctgtttcatttctttgcacttataaagttttcttctgttgcctatgaaagcaaacatttattccggttactggcaaggcagtttaaatcacctgcttctttcatgaaaggccaagacaatacatttattccctaacttgttgggagttgcgattacaagtctatatcctgatttctattagcacattcagctatccatttgtgtacactcccaagtcctagcttttgctcttcatgtctctttcaaccatatgatcaatcagttggacgacttctggtttttcctgaataaatatctaatcttataggtgcttctattaaatataattctgtttctttttcttaccatttatcattataacccagccaacatgtagaagtgcaataaaaatattttaattttcaactgttcaactgctaaaattattagcttgtaattaaaaaagaaaaaatacatccactatatatttagatatattgtaaatgtaacctttggtgactgataatttgttaagtagaatttaaattatgtatccaatttattcaaagtgtatagttgtgtaattatttactatttgattaaaaatagttatcatgca

SEQ ID NO: 8663 - DNA, 4404 bp, Homo sapiens
  source 1..4404: mol_type = unassigned DNA
agcgaggcggagccggcgcccggaggagcaagaggaggaggaggaggagaggtcggagccgtctccaggagcccttagagaccgagtcccggcggcgacggcggggcagcgcaccggcaggcggattcattccacttaaaacctgaaaacattggaccacacaaagtcttactgatttcaggtaaaaacaataattgaagatgtccagcaaaacagcaagcaccaacaatatagcccaggcaaggagaactgtgcagcagttaagattagaagcctccattgaaagaataaaggtttcgaaggcatcagcggacctcatgtcctactgtgaggaacatgccaggagtgaccctttgctgataggaataccaacttcagaaaaccctttcaaggataaaaaaacttgcatcatcttatagtggaatagagaaacagctcctcgcctcttcccaacaacgcaaattatgagcagctccttgaagagatttaccttcagcttatttggtaaccactgctaataactaaaatgttctcagcttggaataatggactctgaagtctctattttccaagttgtcctttctcttaaaataccctttactgatttaatacagaataacaatcttattttccacttggtaactatggctttatgttgggttactgtttaaggaaagttgatctgggcctttttaaaaacataattatatactttagaaatacaagggattccgatatgtcaggacctaaatggcctaagcacctgtcaaattaaaattccaaaattcattgaaatcctaaagccttgatattatattctttataaggcgtgtgccagcctgtatagtatataagagagaggggtgtttgtgtgtatatatatatgcctttgtgtatacacttatcaaagctattttcttatgaaaacgtccctctctccataccatcagtttctcagttccagaagttatacctttattttgagctgtgtataggtagaataaaaaattcctttcatatcgttattgtacaaaaagtaaagagtatcctaaagattgtattcattgtaatcaagtaatgcaatcatctctcctctcttgaaatcttgctggacctcttaggctacaataaactgtaccaaactaaactgacagtccttcgataatatgaaacattaatttacaaggacccgttagggcttcaatgatgctgagtctggaaaaggggaggagacccttgggaggactccaggcagctgtgctcccagggctcatgttctctactggattagggataggcacctctgaaatctccaccctgatgattggaatgaaacggagtgaacatgagcccagctgagagaggagcaggaatgtgtgaaaaacagctgctctccttgtcccagctttgtgattgagccctctgtcttgctctctctgccttccctgtgtctttcttctcttaccagagcatctgtttgcagaggtaacattaccttccccagccacaggtatgtggaatacggtgaggaaaaaaaaaattaaaaaaaaaatgcaagctgtcaggatgcttaagctcttttcagacatctgcagtttcatccctaccttgttcacataccatccaagaggcacataggctacccaagagagccttggattcagtggtacactccttgggcccaagggctttagcagctggatatggggttccttgattttcctctgggcccaaatatagccctcacactcttggaatttccaggtatgggggtagccccaaaaggaggaatctcctatggccaataaggtatcttgactttatcaaagtagaagagagggtcacttcggagtcaaatcatacactaggcctttgatgctttaattcttcttcagttcattaaaagtaactactaaggaaaggttaaaaacttcccctcaaaaaggaatcaaccccaggaagtaattatttacaacgattttcccaaattttgtacaatctgtcctggaaagcaaaccccttttaaaatctaatgtctgggctttgagtattagctcatttagggtggacaaatgcattactgttttcaaactgctcacatttattcagtatttctccaagttgctatctactcagccttatgaatgcccctcgcttttctaaggccatgtgaaaatcacggcactgcccttagccttgtgtcatctgctttttcgttctgcgatatgcccagttcccaaatcaattataggtacctgtttaggagagaggaagattttacctctcaaagggtgagatttgaaatttacactaaaaagacaactttacatttaatgcttcacttaatgagacattcttttttttataagtctatttttctactcagtttcagaacactaatctgattttcactctgatttttaacgtttctttaaatatttataatgtagcttctttcaaaatattttcatgaaaaattacttttattataccattatgtgcatgttattggtagcaggcatagtttattatttagtactgaaacatgctcttttacctaacagtaaacaagtatgttttgatatatatctgttaatatgcttatagtggtaagaaatggacttgaggtcccaggagatttcattttattcaccctggtcagatacaataaaggctatgagtataaatacataacttcctaaccaggtgtagggcatgttcatgaatatcaaatcttttgatgctggacccaagagaggaaaagttgtagctaaatgttgatttacttataactagacgtctatgtgagaaaatatatgtatacatatatatgatatgcagaagtcactttttttatcaggctttattctccttacaaagccacagtttaactgtctgcaacagttggtttatgttaatgatagacaaatacccagtgtttgttactttttccaactaccactgtaatgataatctttctcacgtatatacatgcaacttcttggcttcatttccatgaagctgtttcaatatattcagtatactttgtccttaatgctgcttctgttaacagtgatctctttctttttttcattcttatatcttcattagttcatcataaatctgtccagttgaggcctcaggaccacggcatgatttcatgactccgaagtattttacagaaacattttttaaataagggaaatattttatataccagatggttcacaagtgatggctcatagctagtttttttttttcttctaaaaaatgtcaggtttttaaaatcatttaccttattaaaatgaaaagtgccatacttaacttttaaaggaaagacctgacttgctttttctctatttagactgtttttgtactttactaatctttaaactatcaggaaaaaaaccaaaactttataccaatgatttagtaattttgaggcatagggtagcttacgtagtggaggatgtgccaaatattctcttcaaatgccaccttctcaatttataactaaaatagtgttatctgactaattcctctgaattttgatgtaagatctatataggcccccaaaatgatcgtagtacatgccagtcatttctcagtgaaataaatacaataccagagtacattatgggttttattgctttcttttatggtagacctgttaatggggaaaaaatacatcaaatcaaatagaatcttatatctgtatgttaaaatagagcacttacctgaagtcagtggcctggatcatagccctggatcatttcccagtctgtcctgtgctgtgtgaccttggacaaggcgcttcatctctctgggcctctatttctccatttgtaaaacaagtggctgcagtagatgatggctgagagcccttcctgttcccagatgccttggtccaaagaccccacccctctgctggtcctgccaacgtgttggtgctataagctgcttcagatataaaattggtttatctataatgtttgttcatttaatagcttctaaaaggcctttttgttatacagtgctttttttctagttttatggacttggttactgtaataatgtcttgtttttagccatgtaactacaaacagatattctcttgatgtcttagtaaatttgcatttgatatatcattgatgagattttgttgttatgtaatattctttggctacgcatctgtccagcatcttattaaccataatactgtgatcattatttggaaatatgtcctatggaaagaataaaagcatgtacttcacagctagcatgttcacagatttgaaagaagtttcattaaaagcaccattgctttctgtactgcgtcagtgcctcattgtatcatcctacttgtgttttgctcaataaatgaataaaagaccatttctcttc

SEQ ID NO: 8664 - DNA, 463 bp, Homo sapiens
  source 1..463: mol_type = unassigned DNA
gaggaggaggaggaggagaggtcggagccgtctccaggagcccttagagaccgagtcccggcggcgacggcggggcagcgcaccggcaggcggattcattccacttaaaacctgaaaacattggaccacacaaagtcttactggtaagttcttcatttcttaaacaaagtgactgtttgactttatttttgagatgatattcacacttctaagttagatgcttccctaccagtgctatgatgagatgtctatttatttgtacttttctttaatctctataatttatgatgtttccatgccttaaaaaaacagagcaacccatgttcctttgtaagaccatgggcaggataaagatccatgattacatgccaaatactactaaaataaaaacttttttgggtaatgaaactatttccaggcccctgttgatgggagtatccaaaacaacagagtgttatttcag

SEQ ID NO: 8665 - DNA, 984 bp, Homo sapiens
  source 1..984: mol_type = unassigned DNA
cttggccctcgctctcactcgcggtcgcctggccgttgtcattgtccctccgctgtcaccttttcaagccccaggctggctgcttcagaagcccctgaccccatggaggagtgggacgtgccacagatgaagaaagaggtggagagcctcaagtaccagctggccttccagcgggagatggcgtccaagaccatccccgagctgctgaagtggatcgaggacgggatccccaaggaccccttcctgaaccccgacctgatgaagaacaacccatgggtggaaaagggcaaatgcaccatcctgtgagccccgcacccggcccctctcacaccatcctgtgagaccacgcccggccccactcccaccatcttgtaagactgtgcccagccccactcactccatcctgtgagtcccactcccagccccactcccaccatcctgtgagcccatgcccggccccactcacaccaacctgtgagccccactcccggccccactcactccatcttgtaagactatgcccagccccattcactccatcctgtgagtcccactcccagccccactcccaccatcctgtgagccccacttccagccccactcccaccatcctgtgagccccactcccagccccactcccaccatcctgtgagccccactcccggccccactcactccatcctgtgagccccactcccagccccactcacaccaacctgtgagccccactcccggccccactcacaacatcttgtaagactgtgcccggccccattcactccatcctgtgagaccacgcccggccccactcactctatcctgtgagaccacgcctggccccactcccaccatcctgtgagccccactcctggccccactcacaccatcctatgagcccacgcccggccccactcccaccatcctgtgaaccccactccactcgcacgtgattacagtctgtaaaggtgtgactttataaagaca

SEQ ID NO: 8666 - DNA, 577 bp, Homo sapiens
  source 1..577: mol_type = unassigned DNA
agagcatgcagagccagcaagagcggatggctgaagaattacacgcagtggaaaagcagcaccgtggagctgggtgattcctgagcccaacctgtgcctctggtctaggggcatgcaggggaaattgcaacctccaatggaaagagaagcaagagatggtgtaccttcaggcaaagtgtttctgaaagatctatccagcactccgatggccagcaacaacaccgccagcatagcacaagccaggaagctggtagagcagcttaagatggaagccaatatcgacaggataaaggtgtccaaggcagctgcagatttgatggcctactgtgaagcacatgccaaggaagaccccctcctgacccctgttccggcttcagaaaacccgtttagggagaagaagtttttctgtgccatcctttaagtctttgagaggggcctgaagagcctccgggctcctgggacattgatgtagagtttttagtgaagtgggcacctttctagtccacggcatttgaagagagcgaggagaaccattctggaaactctaggctatgcatgtttaaagatctggtcccct

SEQ ID NO: 8667 - DNA, 522 bp, Homo sapiens
  source 1..522: mol_type = unassigned DNA
atgcagagccagcaagagcggatggctgaagaattacacgcagtggaaaagcagcaccgtggagctgggtgattcctgagcccaacctgtgcctctggtctaggggcatgcaggggaaattgcaacctccaatggaaagagaagcaagagatggtgtaccttcaggcaaagccagatctgccagtgagcctcaggctttaggaactgaagagtgtttctgaaagatctatccagcactccgatggccagcaacaacaccgccagcatagcacaagccaggaagctggtagagcagcttaagatggaagccaatatcgacaggataaaggtgtccaaggcagctgcagatttgatggcctactgtgaagcacatgccaaggaagaccccctcctgacccctgttccggcttcagaaaacccgtttagggagaagaagtttttctgtgccatcctttaagtctttgagaggggcctgaagagcctccgggctcctgggacattgatgtagagtttttagtgaag

SEQ ID NO: 8668 - DNA, 573 bp, Homo sapiens
  source 1..573: mol_type = unassigned DNA
atgcagagccagcaagagcggatggctgaagaattacacgcagtggaaaagcagcaccgtggagctgggtgattcctgagcccaacctgtgcctctggtctaggggcatgcaggggaaattgcaacctccaatggaaagagaagcaagagatggtgtaccttcaggcaaagacaagaatcccagagcatagaaaagtcacacagctaattaagtgttggagcccggatttgaacccagtgtttctgaaagatctatccagcactccgatggccagcaacaacaccgccagcatagcacaagccaggaagctggtagagcagcttaagatggaagccaatatcgacaggataaaggtgtccaaggcagctgcagatttgatggcctactgtgaagcacatgccaaggaagaccccctcctgacccctgttccggcttcagaaaacccgtttagggagaagaagtttttctgtgccatcctttaagtctttgagaggggcctgaagagcctccgggctcctgggacattgatgtagagtttttagtgaagtgggcacctttctagtccacggcat

SEQ ID NO: 8669 - DNA, 479 bp, Homo sapiens
  source 1..479: mol_type = unassigned DNA
acaaacgcccgttggcatcaagacaggcctgtgaactggcatccccaggcaggctgcagactgggagggtgggagtgagcatgcagctgaccccaccatgaggcacagggcgtcgccttctcccctcagcacagaggagaggtgacgaatgccacttggtctctgcagcgtctgtagagggaagtctgtaagcgggagtgtcaaccccaattggcagattctctgacacttcaagtctgcaaaggaaaagcagccagatctgccagtgagcctcaggctttaggaactgaagagtgtttctgaaagatctatccagcactccgatggccagcaacaacaccgccagcatagcacaagccaggaagctggtagagcagcttaagatggaagccaatatcgacaggataaagagcgccctctgctggtcagttctcagaaggcgccacatcatcgcgtctttcgtctgcagatgctctttg

SEQ ID NO: 8670 - DNA, 576 bp, Homo sapiens
  source 1..576: mol_type = unassigned DNA
aggcaggctgcagactgggagggtgggagtgagcatgcagctgaccccaccatgaggcacagggcgtcgccttctcccctcagcacagaggagaggtgacgaatgccacttggtctctgcagcgtctgtagagggaagtctgtaagcgggagtgtcaaccccaattggcagattctctgacacttcaagtctgcaaaggaaaagcagccagatctgccagtgagcctcaggctttaggaactgaagagggatgatactgtgaagtgttcaggaatgaagtctcgtgatgtctgctacctagtttcaaatggcaggagagacagagggatggggaagcaaaagtgaccattgttaactctaggtggttggtaagtgggtgttccttgttttattctttcacctgtaatgtatgtttatgttttttaaaagttaataagttggaggatgatagaagcattaaaaagtaggccgggtatggtggctcatgcctgtaataccaacactttgggaaactgaggcagtaagctcccttggggccaggagtttgagaccagcacaggaaacatggcaagacct

SEQ ID NO: 8671 - DNA, 1542 bp, Homo sapiens
  source 1..1542: mol_type = unassigned DNA
ggcgtcgccttctcccctcagcacagaggagaggtgacgaatgccacttggtctctgcagcgtctgtagagggaagtctgtaagcgggagtgtcaaccccaattggcagattctctgacacttcaagtctgcaaaggaaaagcaggtacgactcctttatcttggacagtcatcttgtaatgcaggcctgtgggatacaaaggagaccagggaggttatgtgagctctgccaaatctattactactccaggggaaaataaaaccaaattcttgggctagtggaattactgtaggagaaatccagtatgattccatgtgaagaaccaatagcacccttaaattaaagccagatctgccagtgagcctcaggctttaggaactgaagaggtcataaaattgctgttatgtatgtgaaaacggccaaatataccatagaccccagattaggatcagtctggtgcctctgaaaatgtgaattgagaagaactgaaagaaaatctttccctggggagactgcagccgaaacacccttctgacgaatgtgctgacctaatctaagcctcaatttccttcaacaagggatgcatcgctcacttcccttgagttgtgagaatgaaacaagataatgcgttaaagcccttggcccagttcctggcatgtggcgagctcttggtccataagcaaatcttcgtattagttgtttctgaaagatctatccagcactccgatggccagcaacaacaccgccagcatagcacaagccaggaagctggtagagcagcttaagatggaagccaatatcgacaggataaaggaagttcactgacccctggtctacagcgatggttctcagctcatctgtgcgttcccaacacccagagagctctataaaaggaccaattaccgaaccacacccaaaccaattaaattagaatctcctggggtatgattcaggcatcagtattttttaaaaagaatttttcagttcattccgatgtatagccaaggttgagaaccactgtcctatgggaaggagtttacttctgctaagtctcatcaggtgtccaaggcagctgcagatttgatggcctactgtgaagcacatgccaaggaagaccccctcctgacccctgttccggcttcagaaaacccgtttagggagaagaagtttttctgtgccatcctttaagtctttgagaggggcctgaagagcctccgggctcctgggacattgatgtagagtttttagtgaagtgggcacctttctagtccacggcatttgaagagagcgaggagaaccattctggaaactctaggctatgcatgtttaaagatctggtcccctttatgagaatgcaagccgatccacatcctgacttaagagatctgattctgacgaactgcctggaggaggggaatatataaaaataaaattggtgtcacttcttttctgctatcccccagccccccccccaaaatcctcatgtttctgcttcatattttgaaaaataacaattaaaacagacagctgtactgaggtaa

SEQ ID NO: 8672 - DNA, 3729 bp, Homo sapiens
  source 1..3729: mol_type = unassigned DNA
aacaaagggagaagggggattaaagtcaaatcactgtcagcagcccaggagcagacaaaaccaccagagtaagccctgaaatggaaatgagagggaaaagaagcaagccgctaacagctaccaagaagaggaggaagtgggagatgcgctgcttcctgtagaaagaacgttgattgaagacaaagctgggtggggactagtccctgggctgcagccgctgctacacatactcacaacgctgccgccgcgctccgtgggcaactcctactactgctgggctgggctgggctgggctgggctgcgccggagctcgcctgcacagatcagctccggagaggggaaaaccacgctcctcggaccaagcctcgggagctaagtgtttctgaaagatctatccagcactccgatggccagcaacaacaccgccagcatagcacaagccaggaagctggtagagcagcttaagatggaagccaatatcgacaggataaaggtgtccaaggcagctgcagatttgatggcctactgtgaagcacatgccaaggaagaccccctcctgacccctgttccggcttcagaaaacccgtttagggagaagaagtttttctgtgccatcctttaagtctttgagaggggcctgaagagcctccgggctcctgggacattgatgtagagtttttagtgaagtgggcacctttctagtccacggcatttgaagagagcgaggagaaccattctggaaactctaggctatgcatgtttaaagatctggtcccctttatgagaatgcaagccgatccacatcctgacttaagagatctgattctgacgaactgcctggaggaggggaatatataaaaataaaattggtgtcacttcttttctgctatcccccagccccccccccaaaatcctcatgtttctgcttcatattttgaaaaataacaattaaaacagacagctgtactgaggtaagatatgtgtgaccttcttggaatgaatattgtctttagaataccctttgataagctgagctgtcccgtgtagatgcaattcggtttaatggcattgatgtatagtcactgtgcctttctttttctttcttccttctcctctacccctccttccacccctccccattagagtagtgtggagataaggctggactggtctatcagattgaactccaagaatgatcacacaaaatgtttagggagatgttccccgtggtgtatcctcatggtaacaacgacaaaaaatgccggttgtctgtgttctcttttcactattcctaacatgtgtacatgatagctttgattctgcaagtaaaagtaaatcctgtgttgtgactggtgctttcatatatttgtgacaatttttgagtaatattgcatgaaaatgtccctatgttacatccattcagaagttttgttgttttactctaaagctgggaaaggaaatgagagggaaaagaccccggagagggaagaaaatctcagtattttgaaaattgagattacttcagagccttagccacacctaaaatacctcctagttaatagtggtataaatgcctcttcaatacgttttccagaatccaaagcattttggtttatccaggacccagggcagcacagctgtcaccaagcaggagagttaaggattcaccatgagctgggaaatgcttttgccatgagtatgagcaaattccctctttccctgaatcatggacattctagattaaaagaacatttttttgtgctcttaacaagaaaaccatggccctcctttgttcaagtatcagaagaaataaacccacagctccagagaaggtgaccattctcagaactccagctattcactctccagggagaaggacctcaaatcgccactctttgggcggcaggtgcggtccccacggccggctctacgaggaagagttctggctcttttgtccactgagatggtcttggtttttcacttaacaaattttttaatggaatctttgtttttgttctccatcttgtttgttagagtctctcggcctttatttacaaattccttgcaactagagcgctccttccccaagatatggtagtgagagtaatttttcattgtagctgtagtctccatcagtaacagcaggccctggaagacttgatcacctttttctgtgtcattttcagtcaaagagggcctctcttacatcttgtttgctttcaaatccccaaatatcatctccatctcccaattaattttattgtctctttcctctctattcgctttctcctgttttttttttaaaaaaaaagcatgaaaaaggaagagaaaaagtttgatatgccaaggacagattttgaaacagacttggtaaatgttttccttagctccttcatgggcatgctggtgaaagaataaatacatccaattaaagctcatgctggggtcggggagaagaggatactgaaacatttgtgaaatgtatgaatgcacttctgtaaccagatacttctgttcttctgttcaaattgtggggtttttgttacagttaggacgcccatgaagatttaggggtgaaaaaaacagcagagtatttattaaactacagcattgtacaattagcttagtaacactatggaataagctaaaacatatcacagtttttacatgggccaaaacatgaattgagtatgtggtcacatgaaaacacggatgaatgaataaaacactctttggtggtgactgaggcatcattagaaggcccagacgatttccactattcacagcatttccttttctcagaaggactctttatatttccatgtaaatctagatctttggagcaattaagatggaattacaatttctagggagcattttaaggaaaatgttttggctttttcataattttatgtcttacagtatggaattataatacgaaaatctttatatgagttttggcttcttggtatttgtacttattcaggggaaaaagtctttcgattacttatgcctctatagagcttaatttcttgagaaattcaacagtcattttcaccagcataattttatcttaaggaataactaataggaaaagtcagcttaattatttaaggccctagtttctacatataatatattcgatagaaatgaaaatctgccgtggaattaactaataagtagtaacaataaacttcatatttagaatgcaaagtctataaagaataattttacatgatcctcaatatcaactccagtttaaaaagtgttatttttaaaacatttgaaaccaagtactgtttaatttcaatcagaagatgcaaatacatactttgatctatgtttgattttgctaataatatttgaaggagattgcctaccaaggacaaaacaataaatttaaaaatcaaacgatttctccatacgctcatagtcacatatggaattttgagaaaataaagcatgctgtctttaggaatttttatacttctttgtctttcttccttaatatttgcttctagctgctcttggcaatgatgaattgttatgtatgcattaatgttttgcagcccaaaagttgttcacatttttcctatataagatctgtggagtgtgtgtttcaaagagagaactacagaaatgttaaagcaggaaaacctgaatgtgatgtgcacattttcatcccacatggacaatgtatgtgttttaataaatggaattttcagattc

SEQ ID NO: 8673 - DNA, 578 bp, Homo sapiens
  source 1..578: mol_type = unassigned DNA
tactcacaacgctgccgccgcgctccgtgggcaactcctactactgctgggctgggctgggctgggctgggctgcgccggagctcgcctgcacagatcagctccggagaggggaaaaccacgctcctcggaccaagcctcgggagctaagccagatctgccagtgagcctcaggctttaggaactgaagaggtaagaattccaaaatattttcttctagaatcttgaatttaaccagaacttaaagaggaaaaaaaatgttaagtggtctatagatgaaagcatgtgatgttttattgaaagaaacagtcatagagtccttatcaatattgacatgacttcagaatttaaagaaaaaatggctgtctttaatgatagttaaaattgattttcatccagaattttttcattttcttctaaaaacctgagttggagagcctttgaggctgctgtcttaacagaatgtatcctcacggcacaaacatgattaataggtggcagacattgagggcataccctgtgcaagataaagcctcagatgaggctgattaggtcagggaaaggtaaaccctgttctta

SEQ ID NO: 8674 - DNA, 908 bp, Homo sapiens
  source 1..908: mol_type = unassigned DNA
actcacaacgctgccgccgcgctccgtgggcaactcctactactgctgggctgggctgggctgggctgggctgcgccggagctcgcctgcacagatcagctccggagaggggaaaaccacgctcctcggaccaagcctcgggagctaagccagatctgccagtgagcctcaggctttaggaactgaagagggatgatactgtgaagtgttcaggaatgaagtctcgtgatgtctgctacctagtttcaaatggcaggagagacagagggatggggaagcaaaagtgaccattgttaactctaggtggttgtgtttctgaaagatctatccagcactccgatggccagcaacaacaccgccagcatagcacaagccaggaagctggtagagcagcttaagatggaagccaatatcgacaggataaaggtgtccaaggcagctgcagatttgatggcctactgtgaagcacatgccaaggaagaccccctcctgacccctgttccggcttcagaaaacccgtttagggagaagaagtttttctgtgccatcctttaagtctttgagaggggcctgaagagcctccgggctcctgggacattgatgtagagtttttagtgaagtgggcacctttctagtccacggcatttgaagagagcgaggagaaccattctggaaactctaggctatgcatgtttaaagatctggtcccctttatgagaatgcaagccgatccacatcctgacttaagagatctgattctgacgaactgcctggaggaggggaatatataaaaataaaattggtgtcacttcttttctgctatcccccagccccccccccaaaatcctcatgtttctgcttcatattttgaaaaataacaattaaaacagacagctgtactgaggtaa

SEQ ID NO: 8675 - DNA, 2125 bp, Homo sapiens
  source 1..2125: mol_type = unassigned DNA
acaacgctgccgccgcgctccgtgggcaactcctactactgctgggctgggctgggctgggctgggctgcgccggagctcgcctgcacagatcagctccggagaggggaaaaccacgctcctcggaccaagcctcgggagctaagccagatctgccagtgagcctcaggctttaggaactgaagagtgtttctgaaagatctatccagcactccgatggccagcaacaacaccgccagcatagcacaagccaggaagctggtagagcagcttaagatggaagccaatatcgacaggataaaggtgtccaaggcagctgcagatttgatggcctactgtgaagcacatgccaaggaagaccccctcctgacccctgttccggcttcagaaaacccgtttagggagaagaagtttttctgtgccatcctttaagtctttgagaggggcctgaagagcctccgggctcctgggacattgatgtagagtttttagtgaagtgggcacctttctagtccacggcatttgaagagagcgaggagaaccattctggaaactctaggctatgcatgtttaaagatctggtcccctttatgagaatgcaagccgatccacatcctgacttaagagatctgattctgacgaactgcctggaggaggggaatatataaaaataaaattggtgtcacttcttttctgctatcccccagccccccccccaaaatcctcatgtttctgcttcatattttgaaaaataacaattaaaacagacagctgtactgaggtaagatatgtgtgaccttcttggaatgaatattgtctttagaataccctttgataagctgagctgtcccgtgtagatgcaattcggtttaatggcattgatgtatagtcactgtgcctttctttttctttcttccttctcctctacccctccttccacccctccccattagagtagtgtggagataaggctggactggtctatcagattgaactccaagaatgatcacacaaaatgtttagggagatgttccccgtggtgtatcctcatggtaacaacgacaaaaaatgccggttgtctgtgttctcttttcactattcctaacatgtgtacatgatagctttgattctgcaagtaaaagtaaatcctgtgttgtgactggtgctttcatatatttgtgacaatttttgagtaatattgcatgaaaatgtccctatgttacatccattcagaagttttgttgttttactctaaagctgggaaaggaaatgagagggaaaagaccccggagagggaagaaaatctcagtattttgaaaattgagattacttcagagccttagccacacctaaaatacctcctagttaatagtggtataaatgcctcttcaatacgttttccagaatccaaagcattttggtttatccaggacccagggcagcacagctgtcaccaagcaggagagttaaggattcaccatgagctgggaaatgcttttgccatgagtatgagcaaattccctctttccctgaatcatggacattctagattaaaagaacatttttttgtgctcttaacaagaaaaccatggccctcctttgttcaagtatcagaagaaataaacccacagctccagagaaggtgaccattctcagaactccagctattcactctccagggagaaggacctcaaatcgccactctttgggcggcaggtgcggtccccacggccggctctacgaggaagagttctggctcttttgtccactgagatggtcttggtttttcacttaacaaattttttaatggaatctttgtttttgttctccatcttgtttgttagagtctctcggcctttatttacaaattccttgcaactagagcgctccttccccaagatatggtagtgagagtaatttttcattgtagctgtagtctccatcagtaacagcaggccctggaagacttgatcacctttttctgtgtcattttcagtcaaagagggcctctcttacatcttgtttgctttcaaatccccaaatatcatctccatctcccaattaattttattgtctctttcctctctattcgctttctcctgttttttttttaaaaaaaaagcatg

SEQ ID NO: 8676 - DNA, 549 bp, Homo sapiens
  source 1..549: mol_type = unassigned DNA
agatcagctccggagaggggaaaaccacgctcctcggaccaagcctcgggagctaagccagatctgccagtgagcctcaggctttaggaactgaagagcctccgggctcctgggacattgatgtagagtttttagtgaagtgggcacctttctagtccacggcatttgaagagagcgaggagaaccattctggaaactctaggctatgcatgtttaaagatctggtcccctttatgagaatgcaagccgatccacatcctgacttaagagatctgattctgacgaactgcctggaggaggggaatatataaaaataaaattggtgtcacttcttttctgctatcccccagccccccccccaaaatcctcatgtttctgcttcatattttgaaaaataacaattaaaacagacagctgtactgaggtaagatatgtgtgaccttcttggaatgaatattgtctttagaataccctttgataagctgagctgtcccgtgtagatgcaattcggtttaatggcattgatgtatagtcactgtgcctttcttt

SEQ ID NO: 8677 - DNA, 569 bp, Homo sapiens
  source 1..569: mol_type = unassigned DNA
agtgtcttcctccctcagcttgtgcagctgctttcaggataacctcagacacagctatcatttgccaccagatctgccagtgagcctcaggctttaggaactgaagagtgtttctgaaagatctatccagcactccgatggccagcaacaacaccgccagcatagcacaagccaggaagctggtagagcagcttaagatggaagccaatatcgacaggataaaggtgtccaaggcagctgcagatttgatggcctactgtgaagcacatgccaaggaagaccccctcctgacccctgttccggcttcagaaaacccgtttagggagaagaagtttttctgtgccatcctttaagtctttgagaggggcctgaagagcctccgggctcctgggacattgatgtagagtttttagtgaagtgggcacctttctagtccacggcatttgaagagagcgaggagaaccattctggaaactctaggctatgcatgtttaaagatctggtcccctttatgagaatgcaagccgatccacatcctgacttaagagatctgattctgacgaactgcc

SEQ ID NO: 8678 - DNA, 3424 bp, Homo sapiens
  source 1..3424: mol_type = unassigned DNA
gtttttctctctgctttctcaacagccagatctgccagtgagcctcaggctttaggaactgaagagtgtttctgaaagatctatccagcactccgatggccagcaacaacaccgccagcatagcacaagccaggaagctggtagagcagcttaagatggaagccaatatcgacaggataaaggtgtccaaggcagctgcagatttgatggcctactgtgaagcacatgccaaggaagaccccctcctgacccctgttccggcttcagaaaacccgtttagggagaagaagtttttctgtgccatcctttaagtctttgagaggggcctgaagagcctccgggctcctgggacattgatgtagagtttttagtgaagtgggcacctttctagtccacggcatttgaagagagcgaggagaaccattctggaaactctaggctatgcatgtttaaagatctggtcccctttatgagaatgcaagccgatccacatcctgacttaagagatctgattctgacgaactgcctggaggaggggaatatataaaaataaaattggtgtcacttcttttctgctatcccccagccccccccccaaaatcctcatgtttctgcttcatattttgaaaaataacaattaaaacagacagctgtactgaggtaagatatgtgtgaccttcttggaatgaatattgtctttagaataccctttgataagctgagctgtcccgtgtagatgcaattcggtttaatggcattgatgtatagtcactgtgcctttctttttctttcttccttctcctctacccctccttccacccctccccattagagtagtgtggagataaggctggactggtctatcagattgaactccaagaatgatcacacaaaatgtttagggagatgttccccgtggtgtatcctcatggtaacaacgacaaaaaatgccggttgtctgtgttctcttttcactattcctaacatgtgtacatgatagctttgattctgcaagtaaaagtaaatcctgtgttgtgactggtgctttcatatatttgtgacaatttttgagtaatattgcatgaaaatgtccctatgttacatccattcagaagttttgttgttttactctaaagctgggaaaggaaatgagagggaaaagaccccggagagggaagaaaatctcagtattttgaaaattgagattacttcagagccttagccacacctaaaatacctcctagttaatagtggtataaatgcctcttcaatacgttttccagaatccaaagcattttggtttatccaggacccagggcagcacagctgtcaccaagcaggagagttaaggattcaccatgagctgggaaatgcttttgccatgagtatgagcaaattccctctttccctgaatcatggacattctagattaaaagaacatttttttgtgctcttaacaagaaaaccatggccctcctttgttcaagtatcagaagaaataaacccacagctccagagaaggtgaccattctcagaactccagctattcactctccagggagaaggacctcaaatcgccactctttgggcggcaggtgcggtccccacggccggctctacgaggaagagttctggctcttttgtccactgagatggtcttggtttttcacttaacaaattttttaatggaatctttgtttttgttctccatcttgtttgttagagtctctcggcctttatttacaaattccttgcaactagagcgctccttccccaagatatggtagtgagagtaatttttcattgtagctgtagtctccatcagtaacagcaggccctggaagacttgatcacctttttctgtgtcattttcagtcaaagagggcctctcttacatcttgtttgctttcaaatccccaaatatcatctccatctcccaattaattttattgtctctttcctctctattcgctttctcctgttttttttttaaaaaaaaagcatgaaaaaggaagagaaaaagtttgatatgccaaggacagattttgaaacagacttggtaaatgttttccttagctccttcatgggcatgctggtgaaagaataaatacatccaattaaagctcatgctggggtcggggagaagaggatactgaaacatttgtgaaatgtatgaatgcacttctgtaaccagatacttctgttcttctgttcaaattgtggggtttttgttacagttaggacgcccatgaagatttaggggtgaaaaaaacagcagagtatttattaaactacagcattgtacaattagcttagtaacactatggaataagctaaaacatatcacagtttttacatgggccaaaacatgaattgagtatgtggtcacatgaaaacacggatgaatgaataaaacactctttggtggtgactgaggcatcattagaaggcccagacgatttccactattcacagcatttccttttctcagaaggactctttatatttccatgtaaatctagatctttggagcaattaagatggaattacaatttctagggagcattttaaggaaaatgttttggctttttcataattttatgtcttacagtatggaattataatacgaaaatctttatatgagttttggcttcttggtatttgtacttattcaggggaaaaagtctttcgattacttatgcctctatagagcttaatttcttgagaaattcaacagtcattttcaccagcataattttatcttaaggaataactaataggaaaagtcagcttaattatttaaggccctagtttctacatataatatattcgatagaaatgaaaatctgccgtggaattaactaataagtagtaacaataaacttcatatttagaatgcaaagtctataaagaataattttacatgatcctcaatatcaactccagtttaaaaagtgttatttttaaaacatttgaaaccaagtactgtttaatttcaatcagaagatgcaaatacatactttgatctatgtttgattttgctaataatatttgaaggagattgcctaccaaggacaaaacaataaatttaaaaatcaaacgatttctccatacgctcatagtcacatatggaattttgagaaaataaagcatgctgtctttaggaatttttatacttctttgtctttcttccttaatatttgcttctagctgctcttggcaatgatgaattgttatgtatgcattaatgttttgcagcccaaaagttgttcacatttttcctatataagatctgtggagtgtgtgtttcaaagagagaactacagaaatgttaaagcaggaaaacctgaatgtgatgtgcacattttcatcccacatggacaatgtatgtgttttaataaatggaattttcagattcatttca

SEQ ID NO: 8679 - DNA, 763 bp, Homo sapiens
  source 1..763: mol_type = unassigned DNA
cctcaggctttaggaactgaagagggatgatactgtgaagtgttcaggaatgaagtctcgtgatgtctgctacctagtttcaaatggcaggagagacagagggatggggaagcaaaagtgaccattgttaactctaggtggttggtcataaaattgctgttatgtatgtgaaaacggccaaatataccatagaccccagattaggatcagtctggtgcctctgaaaatgtgaattgagaagaactgaaagaaaatctttccctggggagactgcagccgaaacacccttctgacgaatgtgctgacctaatctaagcctcaatttccttcaacaagggatgcatcgctcacttcccttgagttgtgagaatgaaacaagataatgcgttaaagcccttggcccagttcctggcatgtggcgagctcttggtccataagcaaatcttcgtattagtgtgagttcctggtcctccatgaaagaacaaagcttttggcctgtaaaatctaatttctggaaatgagaagcactaaaaagaagaggagtggggacggagtggggaggcacttggaaggctcctgttttgttttgttttgttgacaaattcattcttcatcttagccagcgccatggagtgagtccagctctctgtgtctggccccgctgtgaaccccctgaggctatccacagttggatatcttcctgttccttccctgccctaccctcttcaaatgcaaacttgggggggctcaagattattccata

SEQ ID NO: 8680 - DNA, 430 bp, Homo sapiens
  source 1..430: mol_type = unassigned DNA
ttaactctaggtggttgaagatattgaaattgcaatcatcttgtttttgggggaatggagtcattccatattggctcttgagtatgtctgccaccactctgattctagctggaggctgccagaaatgactgtgccattgaatggagttattaggcaacataaaacggacaagccagaccaagtgtttctgaaagatctatccagcactccgatggccagcaacaacaccgccagcatagcacaagccaggaagctggtagagcagcttaagatggaagccaatatcgacaggataaaggaagttcactgacccctggtctacagcgatggttctcagctcatctgtgcgttcccaacacccagagagctctataaaaggaccaattaccgaaccacacccaaaccaattaaattagaatctcctggggta

SEQ ID NO: 8681 - DNA, 1294 bp, Homo sapiens
  source 1..1294: mol_type = unassigned DNA
ggcgtcgccttctcccctcagcacagaggagaggtgacgaatgccacttggtctctgcagcgtctgtagagggaagtctgtaagcgggagtgtcaaccccaattggcagattctctgacacttcaagtctgcaaaggaaaagcaggtacgactcctttatcttggacagtcatcttgtaatgcaggcctgtgggatacaaaggagaccagggaggttatgtgagctctgccaaatctattactactccaggggaaaataaaaccaaattcttgggctagtggaattactgtaggagaaatccagtatgattccatgtgaagaaccaatagcacccttaaattaaagccagatctgccagtgagcctcaggctttaggaactgaagaggtcataaaattgctgttatgtatgtgaaaacggccaaatataccatagaccccagattaggatcagtctggtgcctctgaaaatgtgaattgagaagaactgaaagaaaatctttccctggggagactgcagccgaaacacccttctgacgaatgtgctgacctaatctaagcctcaatttccttcaacaagggatgcatcgctcacttcccttgagttgtgagaatgaaacaagataatgcgttaaagcccttggcccagttcctggcatgtggcgagctcttggtccataagcaaatcttcgtattagttgtttctgaaagatctatccagcactccgatggccagcaacaacaccgccagcatagcacaagccaggaagctggtagagcagcttaagatggaagccaatatcgacaggataaaggtgtccaaggcagctgcagatttgatggcctactgtgaagcacatgccaaggaagaccccctcctgacccctgttccggcttcagaaaacccgtttagggagaagaagtttttctgtgccatcctttaagtctttgagaggggcctgaagagcctccgggctcctgggacattgatgtagagtttttagtgaagtgggcacctttctagtccacggcatttgaagagagcgaggagaaccattctggaaactctaggctatgcatgtttaaagatctggtcccctttatgagaatgcaagccgatccacatcctgacttaagagatctgattctgacgaactgcctggaggaggggaatatataaaaataaaattggtgtcacttcttttctgctatcccccagccccccccccaaaatcctcatgtttctgcttcatattttgaaaaataacaattaaaacagacagctgtactgaggt

SEQ ID NO: 8682 - DNA, 547 bp, Homo sapiens
  source 1..547: mol_type = unassigned DNA
gacaccagcagctgaatgattagaacaggagaacactggttgccagcagtatggaaagaaaggttggggatctccaggaaacagaaagaaggagcaaaagaatcacatttgaaaatcctgagttaaagaaagcaagtaaacgcatgacctgccataagcggtataaaatccaaaaaaaggttcgagaacatcatcgaaaattaagaaaggaggctaaaaagcggggtcacaagaagcctaggaaagacccaggagttccaaacagtgctccctttaaggaggctcttcttagggaagctgagctaaggaaacagaggcttgaagaactaaaacagcagcagaaacttgacaggcagaaggaactagaaaagaaaagaaaacttgaaactaatcctgatattaagccatcaaatgtggaacctatggaaaaggagtttgggctttgcaaaactgagaacaaagccaagtcgggcaaacagaattcaaagaagctgtactgccaagaacttaaaaaggtgattgaagcctccgatgttgtcctagaggt

SEQ ID NO: 8683 - DNA, 2040 bp, Homo sapiens
  source 1..2040: mol_type = unassigned DNA
gcggccgccaagcgatccctgctccgcgcgacactgcgtgcccgcgcacgcagagaggcggtgacgcactttacggcggcagcgtaagtgcgtgacgctcgtcagtggcttcagttcacacgtggcgccagcggaggcaggttgatgtgtttgtgcttccttctacagccaatatgaaaaggcctaagttaaagaaagcaagtaaacgcatgacctgccataagcggtataaaatccaaaaaaaggttcgagaacatcatcgaaaattaagaaaggaggctaaaaagcggggtcacaagaagcctaggaaagacccaggagttccaaacagtgctccctttaaggaggctcttcttagggaagctgagctaaggaaacagaggcttgaagaactaaaacagcagcagaaacttgacaggcagaaggaactagaaaagaaaagaaaacttgaaactaatcctgatattaagccatcaaatgtggaacctatggaaaaggagtttgggctttgcaaaactgagaacaaagccaagtcgggcaaacagaattcaaagaagctgtactgccaagaacttaaaaaggtgattgaagcctccgatgttgtcctagaggtgttggatgccagagatcctcttggttgcagatgtcctcaggtagaagaggccattgtccagagtggacagaaaaagctggtacttatattaaataaatcagatctggtaccaaaggagaatttggagagctggctaaattatttgaagaaagaattgccaacagtggtgttcagagcctcaacaaaaccaaaggataaagggaagataaccaagcgtgtgaaggcaaagaagaatgctgctccattcagaagtgaagtctgctttgggaaagagggcctttggaaacttcttggaggttttcaggaaacttgcagcaaagccattcgggttggagtaattggtttcccaaatgtggggaaaagcagcattatcaatagcttaaaacaagaacagatgtgtaatgttggtgtatccatggggcttacaaggagcatgcaagttgtccccttggacaaacagatcacaatcatagatagtccgagcttcatcgtatctccacttaattcctcctctgcgcttgctctgcgaagtccagcaagtattgaagtagtaaaaccgatggaggctgccagtgccatcctttcccaggctgatgctcgacaggtagtactgaaatatactgtcccaggctacaggaattctctggaattttttactgtgcttgctcagagaagaggtatgcaccaaaaaggtggaatcccaaatgttgaaggtgctgccaaactgctgtggtctgagtggacaggtgcctcattagcttactattgccatccccctacatcttggactcctcctccatattttaatgagagtattgtggtagacatgaaaagcggcttcaatctggaagaactggaaaagaacaatgcacagagcataagagccatcaagggccctcatttggccaatagcatccttttccagtcttccggtctgacaaatggaataatagaagaaaaggacatacatgaagaattgccaaaacggaaagaaaggaagcaggaggagagggaggatgacaaagacagtgaccaggaaactgttgatgaagaagttgatgaaaacagctcaggcatgtttgctgcagaagagacaggggaggcactgtctgaggagactacagcaggtgaacagtctacaaggtcttttatcttggataaaatcattgaagaggatgatgcttatgacttcagtacagattatgtgtaacagaacaatggctttttatgattttttttttaacattttaagcagactgctaaactgttctctgtataagttatggtatgcatgagctgtgtaaattttgtgaatatgtattatattaaaaccaggcaacttggaatccctaaattctgtaaaaagacaattcatctcattgtgagtggaagtagttatctggaataaaaaaagaagatacctattg

SEQ ID NO: 8684 - DNA, 533 bp, Homo sapiens
  source 1..533: mol_type = unassigned DNA
aagtgcgtgacgctcgtcagtggcttcagttcacacgtggcgccagcggaggcaggttgatgtgtttgtgcttccttctacagccaatatgaaaaggcctaagttaaagaaagcaagtaaacgcatgacctgccataagcggtataaaatccaaaaaaaggttcgagaacatcatcgaaaattaagaaaggaggctaaaaagcggggtcacaagaagcctaggaaagacccaggagttccaaacagtgctccctttaaggaggctcttcttagggaagctgagctaaggaaacagaggcttgaagaactaaaacagcagcagaaacttgacaggcagaaggaactagaaaagaaaagaaaacttgaaactaatcctgatattaagccatcaaatgtggaacctatggaaaaggagtttgggctttgcaaaactgagaacaaagccaagtcgggcaaacagaattcaaagaagctgtactgccaagaacttaaaaagttctggtcattttttccttgataggtgattgaagcct

SEQ ID NO: 8685 - DNA, 2041 bp, Homo sapiens
  source 1..2041: mol_type = unassigned DNA
gctcgtcagtggcttcagttcacacgtggcgccagcggaggcaggttgatgtgtttgtgcttccttctacagccaatatgaaaaggcctagtaagtggggtcgggaggcgggcgtggagggacccacgtctggaagttgctgcagccaccacgacgctcttctacggctacggctttgtctctgctgagttaaagaaagcaagtaaacgcatgacctgccataagcggtataaaatccaaaaaaaggttcgagaacatcatcgaaaattaagaaaggaggctaaaaagcggggtcacaagaagcctaggaaagacccaggagttccaaacagtgctccctttaaggaggctcttcttagggaagctgagctaaggaaacagaggcttgaagaactaaaacagcagcagaaacttgacaggcagaaggaactagaaaagaaaagaaaacttgaaactaatcctgatattaagccatcaaatgtggaacctatggaaaaggagtttgggctttgcaaaactgagaacaaagccaagtcgggcaaacagaattcaaagaagctgtactgccaagaacttaaaaaggtgattgaagcctccgatgttgtcctagaggtgttggatgccagagatcctcttggttgcagatgtcctcaggtagaagaggccattgtccagagtggacagaaaaagctggtacttatattaaataaatcagatctggtaccaaaggagaatttggagagctggctaaattatttgaagaaagaattgccaacagtggtgttcagagcctcaacaaaaccaaaggataaagggaagataaccaagcgtgtgaaggcaaagaagaatgctgctccattcagaagtgaagtctgctttgggaaagagggcctttggaaacttcttggaggttttcaggaaacttgcagcaaagccattcgggttggagtaattggtttcccaaatgtggggaaaagcagcattatcaatagcttaaaacaagaacagatgtgtaatgttggtgtatccatggggcttacaaggagcatgcaagttgtccccttggacaaacagatcacaatcatagatagtccgagcttcatcgtatctccacttaattcctcctctgcgcttgctctgcgaagtccagcaagtattgaagtagtaaaaccgatggaggctgccagtgccatcctttcccaggctgatgctcgacaggtagtactgaaatatactgtcccaggctacaggaattctctggaattttttactgtgcttgctcagagaagaggtatgcaccaaaaaggtggaatcccaaatgttgaaggtgctgccaaactgctgtggtctgagtggacaggtgcctcattagcttactattgccatccccctacatcttggactcctcctccatattttaatgagagtattgtggtagacatgaaaagcggcttcaatctggaagaactggaaaagaacaatgcacagagcataagagccatcaagggccctcatttggccaatagcatccttttccagtcttccggtctgacaaatggaataatagaagaaaaggacatacatgaagaattgccaaaacggaaagaaaggaagcaggaggagagggaggatgacaaagacagtgaccaggaaactgttgatgaagaagttgatgaaaacagctcaggcatgtttgctgcagaagagacaggggaggcactgtctgaggagactacagcaggtgaacagtctacaaggtcttttatcttggataaaatcattgaagaggatgatgcttatgacttcagtacagattatgtgtaacagaacaatggctttttatgattttttttttaacattttaagcagactgctaaactgttctctgtataagttatggtatgcatgagctgtgtaaattttgtgaatatgtattatattaaaaccaggcaacttggaatccctaaattctgtaaaaagacaattcatctcattgtgagtggaagtagttatctggaataaaaaaagaagatacctattg

SEQ ID NO: 8686 - DNA, 263 bp, Homo sapiens
  source 1..263: mol_type = unassigned DNA
tcagttcacacgtggcgccagcggaggcaggttgatgtgtttgtgcttccttctacagccaatatgaaaaggcctaagttaaagaaagcaagtaaacgcatgacctgccataagcggtataaaatccaaaaaaaggtaagtgtagtgcttgagagagctgtaccaaacacattgctaaactgattttgccctgttcctttgcgggaaagtctgggttaatgtgatttggttttgggaaatggcattggatagactgaccatgg

SEQ ID NO: 8687 - DNA, 597 bp, Homo sapiens
  source 1..597: mol_type = unassigned DNA
agttcacacgtggcgccagcggaggcaggttgatgtgtttgtgcttccttctacagccaatatgaaaaggcctaagttaaagaaagcaagtaaacgcatgacctgccataagcggtataaaatccaaaaaaaggttcgagaacatcatcgaaaattaagaaaggaggctaaaaagcggggtcacaagaagcctaggaaagacccaggagttccaaacagtgctccctttaaggaggctcttcttagggaagctgagctaaggaaacagaggcttgaagaactaaaacagcagcagaaacttgacaggcagaaggaactagaaaagaaaagaaaacttgaaactaatcctgatattaagccatcaaatgtggaacctatggaaaaggtatgattaggtctctttatgaatgagagatcaggggttttgattttggtttttttgcttgggcctgagtgcagtggcacaatcacaactcactgcaacctggaccacccaggctcaagcagtcttaccacctcagtctccaagtagctgggactacagaagcacaccatcacgcctggctaattttttttagcagacacgggctttcacta

SEQ ID NO: 8688 - DNA, 729 bp, Homo sapiens
  source 1..729: mol_type = unassigned DNA
agttcacacgtggcgccagcggaggcaggttgatgtgtttgtgcttccttctacagccaatatgaaaaggcctaagttaaagaaagcaagtaaacgcatgacctgccataagcggtataaaatccaaaaaaaggttcgagaacatcatcgaaaattaagaaaggaggctaaaaagcggggtcacaagaagcctaggaaagacccaggagttccaaacagtgctccctttaaggaggctcttcttagggaagctgagctaaggaaacagaggcttgaagaactaaaacagcagcagaaacttgacaggcagaaggaactagaaaagaaaagaaaacttgaaactaatcctgatattaagccatcaaatgtggaacctatggaaaaggagtttgggctttgcaaaactgagaacaaagccaagtcgggcaaacagaattcaaagaagctgtactgccaagaacttaaaaaggtatcttagcctaggtgattgaagcctccgatgttgtcctagaggtgttggatgccagagatcctcttggttgcagatgtcctcaggtagaagaggccattgtccagagtggacagaaaaagctggtacttatattaaataaatcagatctggtaccaaaggagaatttggagagctggctaaattatttgaagaaagaattgccaacagtggtgttcagagcctcaacaaaaccaaaggataaagggaagataaccaag

SEQ ID NO: 8689 - DNA, 2118 bp, Homo sapiens
  source 1..2118: mol_type = unassigned DNA
agcggaggcaggttgatgtgtttgtgcttccttctacagccaatatgaaaaggcctaagttaaagaaagcaagtaaacgcatgacctgccataagcggtataaaatccaaaaaaaggttcgagaacatcatcgaaaattaagaaaggaggctaaaaagcggggtcacaagaagcctaggaaagacccaggagttccaaacagtgctccctttaaggaggctcttcttagggaagctgagctaaggaaacagaggcttgaagaactaaaacagcagcagaaacttgacaggcagaaggaactagaaaagaaaagaaaacttgaaactaatcctgatattaagccatcaaatgtggaacctatggaaaaggagtttgggctttgcaaaactgagaacaaagccaagtcgggcaaacagaattcaaagaagctgtactgccaagaacttaaaaaggtgattgaagcctccgatgttgtcctagaggtgttggatgccagagatcctcttggttgcagatgtcctcaggtagaagaggccattgtccagagtggacagaaaaagctggtacttatattaaataaatcagatctggtaccaaaggagaatttggagagctggctaaattatttgaagaaagaattgccaacagtggtgttcagagcctcaacaaaaccaaaggataaagggaagataaccaaggtatcctttattagtggtaagaaatgtgattctttcagattttggttgaaatatgatgagtgtacaaaatcttgatttaagtgaatgaaaaattacaagatccaactctgatttcagccagagatcatctgaaaggcaatgtagttatcttaagagctgggctctggagcctgattgcttggggtttgttgaaatttatcaggtaagttgccagaataattcaactatttggaattttagcgtgtgaaggcaaagaagaatgctgctccattcagaagtgaagtctgctttgggaaagagggcctttggaaacttcttggaggttttcaggaaacttgcagcaaagccattcgggttggagtaattggtttcccaaatgtggggaaaagcagcattatcaatagcttaaaacaagaacagatgtgtaatgttggtgtatccatggggcttacaaggagcatgcaagttgtccccttggacaaacagatcacaatcatagatagtccgagcttcatcgtatctccacttaattcctcctctgcgcttgctctgcgaagtccagcaagtattgaagtagtaaaaccgatggaggctgccagtgccatcctttcccaggctgatgctcgacaggtagtactgaaatatactgtcccaggctacaggaattctctggaattttttactgtgcttgctcagagaagaggtatgcaccaaaaaggtggaatcccaaatgttgaaggtgctgccaaactgctgtggtctgagtggacaggtgcctcattagcttactattgccatccccctacatcttggactcctcctccatattttaatgagagtattgtggtagacatgaaaagcggcttcaatctggaagaactggaaaagaacaatgcacagagcataagagccatcaagggccctcatttggccaatagcatccttttccagtcttccggtctgacaaatggaataatagaagaaaaggacatacatgaagaattgccaaaacggaaagaaaggaagcaggaggagagggaggatgacaaagacagtgaccaggaaactgttgatgaagaagttgatgaaaacagctcaggcatgtttgctgcagaagagacaggggaggcactgtctgaggagactacagcaggtgaacagtctacaaggtcttttatcttggataaaatcattgaagaggatgatgcttatgacttcagtacagattatgtgtaacagaacaatggctttttatgattttttttttaacattttaagcagactgctaaactgttctctgtataagttatggtatgcatgagctgtgtaaattttgtgaatatgtattatattaaaaccaggcaacttggaatccctaaattctgtaaaaagacaattcatctcattgtgagtggaagta

SEQ ID NO: 8690 - DNA, 567 bp, Homo sapiens
  source 1..567: mol_type = unassigned DNA
gctcttctacggctacggctttgtctctgctggtatgggggtgggagcctacgcgtaggccttggccctatttcctggtagaaccgagagttggaagtccctacggcgatcatgttaaccgcgcgggctcattctgcggaacgaagccgggcagagggtggggaagactaggctagattttcgtaaggaagcagcgtctgagccaggtttgaggcccaatattttctttccgtggccacgtgcagactggcccagagttaaagaaagcaagtaaacgcatgacctgccataagcggtataaaatccaaaaaaaggttcgagaacatcatcgaaaattaagaaaggaggctaaaaagcggggtcacaagaagcctaggaaagacccaggagttccaaacagtgctccctttaaggaggctcttcttagggaagctgagctaaggaaacagaggcttgaagaactaaaacagcagcagaaacttgacaggcagaaggaactagaaaagaaaagaaaacttgaaactaatcctgatattaagccatcaaatgtggaacctatggaaaagg

SEQ ID NO: 8691 - DNA, 583 bp, Homo sapiens
  source 1..583: mol_type = unassigned DNA
ctacggctacggctttgtctctgctggtatgggggtgggagcctacgcgtaggccttggccctatttcctggtagaaccgagagttggaagtccctacggcgatcatgttaaccgcgcgggctcattctgcggaacgaagccgggcagagggtggggaagactaggctagattttcgtaaggaagcagcgtctgagccaggtttgaggcccaatattttctttccgtggccacgtgcagactggcccaggttcgagaacatcatcgaaaattaagaaaggaggctaaaaagcggggtcacaagaagcctaggaaagacccaggagttccaaacagtgctccctttaaggaggctcttcttagggaagctgagctaaggaaacagaggcttgaagaactaaaacagcagcagaaacttgacaggcagaaggaactagaaaagaaaagaaaacttgaaactaatcctgatattaagccatcaaatgtggaacctatggaaaaggagtttgggctttgcaaaactgagaacaaagccaagtcgggcaaacagaattcaaagaagctgtactgccaagaacttaaaa

SEQ ID NO: 8692 - DNA, 668 bp, Homo sapiens
  source 1..668: mol_type = unassigned DNA
gtgaagacatgagatccaactctgagctcaccctgttgctaaatggataatgccagtactctcttgtggaaggtattaccagaacaagggatgtagttctgatcattttctccttgataatgtagttctggtcattttttccttgataggtgattgaagcctccgatgttgtcctagaggtgttggatgccagagatcctcttggttgcagatgtcctcaggtagaagaggccattgtccagagtggacagaaaaagctggtacttatattaaataaatcagatctggtaccaaaggagaatttggagagctggctaaattatttgaagaaagaattgccaacagtggtgttcagagcctcaacaaaaccaaaggataaagggaagataaccaagcgtgtgaaggcaaagaagaatgctgctccattcagaagtgaagtctgctttgggaaagagggcctttggaaacttcttggaggttttcaggaaacttgcagcaaagccattcgggttggagtaattggtttcccaaatgtggggaaaagcagcattatcaatagcttaaaacaagaacagatgtgtaatgttggtgtatccatggggcttacaaggagcatgcaagttgtccccttggacaaacagatcacaatcatagatagtccgagcttc

SEQ ID NO: 8693 - DNA, 523 bp, Homo sapiens
  source 1..523: mol_type = unassigned DNA
ttggttttttttttaaggtagtactgaaatatactgtcccaggctacaggaattctctggaattttttactgtgcttgctcagagaagaggtatgcaccaaaaaggtggaatcccaaatgttgaaggtgctgccaaactgctgtggtctgagtggacagggtaagctttcttttctgttggcattttggtgaccactagaataaaccttcttttgacacatcttatttttaatatcagtgcctcattagcttactattgccatccccctacatcttggactcctcctccatattttaatgagagtattgtggtagacatgaaaagcggcttcaatctggaagaactggaaaagaacaatgcacagagcataagagccatcaagggccctcatttggccaatagcatccttttccagtcttccggtctgacaaatggaataatagaagaaaaggacatacatgaagaattgccaaaacggaaagaaaggaagcaggaggagagggaggatgacaaagacagtga

SEQ ID NO: 8694 - DNA, 6447 bp, Homo sapiens
  source 1..6447: mol_type = unassigned DNA
cggggtcagcaccgcggagacccccctcgcccggccccgcgacagcctccgagcgcccccggatcatggccaccgaggtccacaatctgcaggagctccggcgaagtgcctcactggccaccaaggtctttatccagagagactacagcgatgggaccatctgtcagttccagaccaaattccccccagagctggacagccggatcgagcggcagctctttgaagagactgtgaagaccctcaacggattttacgcagaggctgagaagattgggggcagctcctacctcgagggctgcctggcctgcgccacggcctacttcatcttcctctgcatggagacccactatgagaaggttctcaagaagatttcccgctacatccaggagcagaatgagaagatctttgcacctcgaggcctcctacttacagaccctgtggagcgtgggatgagggttattgagatctccatctacgaggaccggtgcagcagtggcagctccagcagcggcagcagcagcggcagtggcagcagcagcggtgggggtggtggggcgggggcccggtgactggccgagagtccctgtagggaggtgtatggccggagtgagggccttgcagacctgcggcggctgcgctaccagagcacccgcttctgagtcattctttgggctcaccctgctgcccggggtgggagggagggtgacgggcctcatatttcctgtgggccatcaacctatgccccctgtccctcacccccgtctggatcagtccatttcctgacctgggggcttttccttcccgatggggctggtctgggccacacagagacagatcttcctaggaaggctggggtggggagaacacaacctaggcggcccctctcttccacagcccctctcccaaccctgcgaggggggccgaggcctgccacatagaggactcccacactgcatgacccctcatcccaaacccatatccaccaggactctttcccttgggccctgcgtcccgtggctgtctcccagtatctgttccttctcatgcccctgcagggccccggcctgtctatgatcctgcctccaccaaattcaaggtgtggggagacgggtgccgtggttgggagctgttcagcgcactcctgacctcttctagacctatggctttcctgtcctgcattcagagctagaggccagctcggccttgcgagaagcatccaactttgagactttgcaggctgccaggtgctggttggggggcacagagcctggggctctgggaggtaatatgggggtctgggaaactccgtgaagagacatagccatgcggggcctgaatctcctgaactacagccagtttcctgagattagaacctgtgtgtatgcacatgtgaatgtatgtgtgagtgcacatgtgtgtaagtgcagtgtgcgtaaatgtgtgagtctgcgtgtgttagcatgcctgtatgtgagcgcgtgtgtgagcgcatgtgtgtgcaccagtgcacaagtgtatgaatgtggacacatttataagcacacctgtgtgtgtctgagtacatgtgcacacacgtgtgcacaaatgtgcatttatatgagtgtgagtgcatgcatgtgcatgaacatgtgtgcacaagcatgtgtgtatgagtgttcatgtgtatgagtgtgtgtgtatgcaggtgagtgcatgtgtgtgtgagtgtgtttgtgtgttccccttggctgccaggccaacgactgcttctctgcatcctgctgtcttcgctacctgagggtctgtgacttcttccctgtgtgggtccagcctgaccccctgtaagtaaatgtccaaaagccccttgcccctcccctagggctaccagggaacatactctactgcatatgttctagtggaagagaagccggggttctaggaaagaagagccaaactttggtggcctttggtgccccctctcagctccccatgacaagacaacggggctgcagacactgtgtgttcagcctgcccaggggctggggctctttaaggctttgtaggtgaggtttccatggaccttcaaaggtgccagcagcctgcaggggaaaggcaaactccctccttgcaaggaaaggagatgtccagccaatgatgcccggcttctgaggcccagaggagcaggtgggatgggagcagcccctggggctggtgtcccgaagatgaaatgaagggggctgcctatctcagttggcgggaggtgttagaagtggatgtgcaagaccagccactggaggtagctctctggagtcaaagagaggcctgcttttctaccagacatgggagcagcatgtaggatacaagggcctacccagagaccagagagagtcagcctagtccttgcagcctcaggaagtcctcggcccaagtgagtcctggtccaaggatccccctggagagccgcagttcagtgggctccaccgcagcccctggccacggcctatgccctccctgggcccctgtggggctgggcattgtgtctgacctgtgcatctcccatgggagggctgggcacaggcagtgctatggccttttttttttttttctttttccaataaaagaacttgcccagcgtgaagctctgtgatgctttctctgccccgtgacgatggagggtcagttctatgctccaggaccacatgaggggatactcagctgcctgaactggacctgacatggggagcaggatgaactctgtcttcttggagcttgcagtctactgaagaggcagacacctcagcatctctaatctggaatctttggggcacttgtagccttgggtgggggaacaggttggactgaaagcgaggccaaaagtaatcaattaatgatatcaataaatcctcatttcttgagctcttcccctgggttgggtcctgttgggagctggatcacacaggtcactcagtactgaagatgagaaagtagctggatgatcacttctcggccttttggccaagatcaaatatggagaaagtagctggatgttggaacctagcagagttgtgtcttgaattttataatttattgagcacctactatgtgccagatactttgctgaaaccatatgttagagctggcaggggatttaaagatcacttgaatcctgtcacagaggtccagagagggtgggtgacttgccctaggccacacagctggttgatgataacagggcccaagcttggaacccaggtctcctgactcagtgcccactctgttaccacagggatggcacccagatgggaagctgcctgaggctgcagggaggctgggatcacaaactcaggcctgttcccagagaggggctcatcagactgtggggacaacggctccagcctcttaggtgggggctgggcagtcccctctgggtggttctcatgtttgttgtcactgccgctaagggctgcagtgagctgtgtgcagcctggactcactccctctgctggaacctgggccgtgtgtgggttgccacaagtgagcgtgttctctaatatgagggcaggttcattctgttttgggataggaagtttgttctaccccgaggccagatttgaatccaaactcagctcttctagagatgaggtcctggggagggggtgaggatttactaaacgggtaaaaccaaatctgggtgcttatctgactgagaggcattcaacccttccattttcaaatggtaatcataataataatagtagctgacgtttatttagcacttcctatgtgccaggcactaggctaagactctacataattagtcattcaattctcacagcaaccctctatggcatggattcttatttcccattttacatatggggaaactgaggctcatggacgttaagtaactgggaaattgcagatcttggctttgaatctaggcaatctgactccaaactgcaaggaagaagacagatccagcctcagaggccgcttaacagcttgagggcctcagccgtcctgggattaggatcaggcagattcccagggaaggacttggagccatgcctgggttttgaggccgggctggcacctccacttccagggcatcacgggagggtgcatgggctgtgctcgcaggcatgcgggacccagaggcagcccggtgaagggtagtgggggactcgactcactgtgggcctggggaggtgtggtttctctctgctggcttagttacaggtggtggcctgtctctccggggtctggctgtagccatgtccctgcacccaccttgccagccagggacaggccccatcaagacccaggagcagctccagcctcagccagactgtccccgaggtcccaagtgaggccccagccactcaggcatgcctcaggaagctcctgctgcacatgctcctctccctgcgccagcaccctgctgtctggcttccttcctttggccacagggcgggtgtgtgtgaaaccacagggtttacagaagctcgaggtgccactgagtggcaggattatgcactgcactcggggaatcaaaggtggagacagaaagaactatggctgttgtgacacgtcccccacggctccccggttggcagccactgccacccgcagggacttttctgtggcttccagaggtgtggggcaaaggtggagtctggtgactttctccctagggccagcccctgggctgtcgagcctgggaaactccacatccctctccacacctctagaaggactcacaatgaggggggcccagacaggaggcatcaccacctggtttgggctttaccattcacccagggataaggcaaggcaaacaccactccacatcagatctgaatttgagctctggcttcatgacactgacacatgaagactcttggagcctcagattccccagttgttaaatagggagactaatatctcacagagttgtttagacccgaggcgttcaaccttggtggcaatggatgtcaactggaagcatgaaaaatcaccaatgcctgatcctatcctcagagattctgatttaattgttttgggggacagcttgggcatcaggattttaaagagtttccctggtgattttaatgtgaaggtaaggctgagaatccctggttttgacagtacctatagcctataagcctttaatacacctctgaaaatgcctgagacctgaataagaagtttatggttccacagaagcagccagacacaaaaatgcatatgcaccatgtgattccccttatatgaaactgaaagacaggccaaactcgcctttgattgggagtcaggatcaagattaccctgggtcgggggtagcgaatggatggggacctggggggcttctgggagctcaggatgttctgtttcttgatcagagtgccagttacacggggtgctcacttcatgagaattcactgagctgtatacttaagagctgtgtatttgtctgtactggtgatatatttcaataaaattcaccagaaaagcctgttggctacaaaataggaaaagaaaggacacacttgaaattaacgttttgttaaatatctggaaatgtaacacatatgccaaacagacaactgcaactctatgttacgtgtgtgtgtgtgtgtgtgtgtgaaaatgtaatgtctgctctgctgtgggtgggccctctaaaagggaaggtccctgatgcctaagaaaatctgaaaacagcccaggttcacaccaggagttcttaacctcgacccgactgcattcaggtgcatattatgtgccgttatctgaggagagcatctacagctttcagcagattctcaaaggggtatgcaaccccctaaaaaggttaagaacaattggttttgaggagtcagtaagaaactggccatgaatgtgcttggcatgaaagagatgcttggtaatgtcggtttctttccttcctttcagagcccagccttcggaggtttccgcatgagccttctcgggcgacttctaggaggatttattcccctggcagtgccaagggcagcctgcaccaagctcacaactcttcctccaagaggatgttcaaagggcctgtcatttcagcatctgctggacagcagaacttcgcatgcaggatcctggagctgcgtcgggttttgaatcagggacaatggaggaagtgggaaactgtgaagagagtcagagggctgtgccagctgccccctttcccacccccagcaattcacttaactttcctgagtctcacctttgtcattatgagaatgtgtatatttataaataatcatctgtttctccaatgtaagatattgttattgcagaagtgatactaggacctcgttatacgatggcctcatgatgtagatttatagcaggcttcagattctggcatagaataaacagatatttatccaagggttcactgattcccgaataaatgccaggaacattcatgta

SEQ ID NO: 8695 - DNA, 660 bp, Homo sapiens
  source 1..660: mol_type = unassigned DNA
tggggagacgggtgccgtggttgggagctgttcagcgcactcctgacctcttctagacctatggctttcctgtcctgcattcagagctagaggccagctcggccttgcgagaagcatccaactttgagactttgcaggctgccagagcccagccttcggaggtttccgcatgagccttctcgggcgacttctaggaggatttattcccctggcagtgccaagggcagcctgcaccaagctcacaactcttcctccaagaggatgttcaaagggcctgtcatttcagcatctgctggacagcagaacttcgcatgcaggatcctggagctgcgtcgggttttgaatcagggacaatggaggaagtgggaaactgtgaagagagtcagagggctgtgccagctgccccctttcccacccccagcaattcacttaactttcctgagtctcacctttgtcattatgagaatgtgtatatttataaataatcatctgtttctccaatgtaagatattgttattgcagaagtgatactaggacctcgttatacgatggcctcatgatgtagatttatagcaggcttcagattctggcatagaataaacagatatttatccaagggttcactgattcccgaataaatgccaggaacattcatgtaca

SEQ ID NO: 8696 - DNA, 6378 bp, Homo sapiens
  source 1..6378: mol_type = unassigned DNA
tctcctcaggtccacaatctgcaggagctccggcgaagtgcctcactggccaccaaggtctttatccagagagactacagcgatgggaccatctgtcagttccagaccaaattccccccagagctggacagccggatcgagcggcagctctttgaagagactgtgaagaccctcaacggattttacgcagaggctgagaagattgggggcagctcctacctcgagggctgcctggcctgcgccacggcctacttcatcttcctctgcatggagacccactatgagaaggttctcaagaagatttcccgctacatccaggagcagaatgagaagatctttgcacctcgaggcctcctacttacagaccctgtggagcgtgggatgagggttattgagatctccatctacgaggaccggtgcagcagtggcagctccagcagcggcagcagcagcggcagtggcagcagcagcggtgggggtggtggggcgggggcccggtgactggccgagagtccctgtagggaggtgtatggccggagtgagggccttgcagacctgcggcggctgcgctaccagagcacccgcttctgagtcattctttgggctcaccctgctgcccggggtgggagggagggtgacgggcctcatatttcctgtgggccatcaacctatgccccctgtccctcacccccgtctggatcagtccatttcctgacctgggggcttttccttcccgatggggctggtctgggccacacagagacagatcttcctaggaaggctggggtggggagaacacaacctaggcggcccctctcttccacagcccctctcccaaccctgcgaggggggccgaggcctgccacatagaggactcccacactgcatgacccctcatcccaaacccatatccaccaggactctttcccttgggccctgcgtcccgtggctgtctcccagtatctgttccttctcatgcccctgcagggccccggcctgtctatgatcctgcctccaccaaattcaaggtgtggggagacgggtgccgtggttgggagctgttcagcgcactcctgacctcttctagacctatggctttcctgtcctgcattcagagctagaggccagctcggccttgcgagaagcatccaactttgagactttgcaggctgccaggtgctggttggggggcacagagcctggggctctgggaggtaatatgggggtctgggaaactccgtgaagagacatagccatgcggggcctgaatctcctgaactacagccagtttcctgagattagaacctgtgtgtatgcacatgtgaatgtatgtgtgagtgcacatgtgtgtaagtgcagtgtgcgtaaatgtgtgagtctgcgtgtgttagcatgcctgtatgtgagcgcgtgtgtgagcgcatgtgtgtgcaccagtgcacaagtgtatgaatgtggacacatttataagcacacctgtgtgtgtctgagtacatgtgcacacacgtgtgcacaaatgtgcatttatatgagtgtgagtgcatgcatgtgcatgaacatgtgtgcacaagcatgtgtgtatgagtgttcatgtgtatgagtgtgtgtgtatgcaggtgagtgcatgtgtgtgtgagtgtgtttgtgtgttccccttggctgccaggccaacgactgcttctctgcatcctgctgtcttcgctacctgagggtctgtgacttcttccctgtgtgggtccagcctgaccccctgtaagtaaatgtccaaaagccccttgcccctcccctagggctaccagggaacatactctactgcatatgttctagtggaagagaagccggggttctaggaaagaagagccaaactttggtggcctttggtgccccctctcagctccccatgacaagacaacggggctgcagacactgtgtgttcagcctgcccaggggctggggctctttaaggctttgtaggtgaggtttccatggaccttcaaaggtgccagcagcctgcaggggaaaggcaaactccctccttgcaaggaaaggagatgtccagccaatgatgcccggcttctgaggcccagaggagcaggtgggatgggagcagcccctggggctggtgtcccgaagatgaaatgaagggggctgcctatctcagttggcgggaggtgttagaagtggatgtgcaagaccagccactggaggtagctctctggagtcaaagagaggcctgcttttctaccagacatgggagcagcatgtaggatacaagggcctacccagagaccagagagagtcagcctagtccttgcagcctcaggaagtcctcggcccaagtgagtcctggtccaaggatccccctggagagccgcagttcagtgggctccaccgcagcccctggccacggcctatgccctccctgggcccctgtggggctgggcattgtgtctgacctgtgcatctcccatgggagggctgggcacaggcagtgctatggccttttttttttttttctttttccaataaaagaacttgcccagcgtgaagctctgtgatgctttctctgccccgtgacgatggagggtcagttctatgctccaggaccacatgaggggatactcagctgcctgaactggacctgacatggggagcaggatgaactctgtcttcttggagcttgcagtctactgaagaggcagacacctcagcatctctaatctggaatctttggggcacttgtagccttgggtgggggaacaggttggactgaaagcgaggccaaaagtaatcaattaatgatatcaataaatcctcatttcttgagctcttcccctgggttgggtcctgttgggagctggatcacacaggtcactcagtactgaagatgagaaagtagctggatgatcacttctcggccttttggccaagatcaaatatggagaaagtagctggatgttggaacctagcagagttgtgtcttgaattttataatttattgagcacctactatgtgccagatactttgctgaaaccatatgttagagctggcaggggatttaaagatcacttgaatcctgtcacagaggtccagagagggtgggtgacttgccctaggccacacagctggttgatgataacagggcccaagcttggaacccaggtctcctgactcagtgcccactctgttaccacagggatggcacccagatgggaagctgcctgaggctgcagggaggctgggatcacaaactcaggcctgttcccagagaggggctcatcagactgtggggacaacggctccagcctcttaggtgggggctgggcagtcccctctgggtggttctcatgtttgttgtcactgccgctaagggctgcagtgagctgtgtgcagcctggactcactccctctgctggaacctgggccgtgtgtgggttgccacaagtgagcgtgttctctaatatgagggcaggttcattctgttttgggataggaagtttgttctaccccgaggccagatttgaatccaaactcagctcttctagagatgaggtcctggggagggggtgaggatttactaaacgggtaaaaccaaatctgggtgcttatctgactgagaggcattcaacccttccattttcaaatggtaatcataataataatagtagctgacgtttatttagcacttcctatgtgccaggcactaggctaagactctacataattagtcattcaattctcacagcaaccctctatggcatggattcttatttcccattttacatatggggaaactgaggctcatggacgttaagtaactgggaaattgcagatcttggctttgaatctaggcaatctgactccaaactgcaaggaagaagacagatccagcctcagaggccgcttaacagcttgagggcctcagccgtcctgggattaggatcaggcagattcccagggaaggacttggagccatgcctgggttttgaggccgggctggcacctccacttccagggcatcacgggagggtgcatgggctgtgctcgcaggcatgcgggacccagaggcagcccggtgaagggtagtgggggactcgactcactgtgggcctggggaggtgtggtttctctctgctggcttagttacaggtggtggcctgtctctccggggtctggctgtagccatgtccctgcacccaccttgccagccagggacaggccccatcaagacccaggagcagctccagcctcagccagactgtccccgaggtcccaagtgaggccccagccactcaggcatgcctcaggaagctcctgctgcacatgctcctctccctgcgccagcaccctgctgtctggcttccttcctttggccacagggcgggtgtgtgtgaaaccacagggtttacagaagctcgaggtgccactgagtggcaggattatgcactgcactcggggaatcaaaggtggagacagaaagaactatggctgttgtgacacgtcccccacggctccccggttggcagccactgccacccgcagggacttttctgtggcttccagaggtgtggggcaaaggtggagtctggtgactttctccctagggccagcccctgggctgtcgagcctgggaaactccacatccctctccacacctctagaaggactcacaatgaggggggcccagacaggaggcatcaccacctggtttgggctttaccattcacccagggataaggcaaggcaaacaccactccacatcagatctgaatttgagctctggcttcatgacactgacacatgaagactcttggagcctcagattccccagttgttaaatagggagactaatatctcacagagttgtttagacccgaggcgttcaaccttggtggcaatggatgtcaactggaagcatgaaaaatcaccaatgcctgatcctatcctcagagattctgatttaattgttttgggggacagcttgggcatcaggattttaaagagtttccctggtgattttaatgtgaaggtaaggctgagaatccctggttttgacagtacctatagcctataagcctttaatacacctctgaaaatgcctgagacctgaataagaagtttatggttccacagaagcagccagacacaaaaatgcatatgcaccatgtgattccccttatatgaaactgaaagacaggccaaactcgcctttgattgggagtcaggatcaagattaccctgggtcgggggtagcgaatggatggggacctggggggcttctgggagctcaggatgttctgtttcttgatcagagtgccagttacacggggtgctcacttcatgagaattcactgagctgtatacttaagagctgtgtatttgtctgtactggtgatatatttcaataaaattcaccagaaaagcctgttggctacaaaataggaaaagaaaggacacacttgaaattaacgttttgttaaatatctggaaatgtaacacatatgccaaacagacaactgcaactctatgttacgtgtgtgtgtgtgtgtgtgtgtgaaaatgtaatgtctgctctgctgtgggtgggccctctaaaagggaaggtccctgatgcctaagaaaatctgaaaacagcccaggttcacaccaggagttcttaacctcgacccgactgcattcaggtgcatattatgtgccgttatctgaggagagcatctacagctttcagcagattctcaaaggggtatgcaaccccctaaaaaggttaagaacaattggttttgaggagtcagtaagaaactggccatgaatgtgcttggcatgaaagagatgcttggtaatgtcggtttctttccttcctttcagagcccagccttcggaggtttccgcatgagccttctcgggcgacttctaggaggatttattcccctggcagtgccaagggcagcctgcaccaagctcacaactcttcctccaagaggatgttcaaagggcctgtcatttcagcatctgctggacagcagaacttcgcatgcaggatcctggagctgcgtcgggttttgaatcagggacaatggaggaagtgggaaactgtgaagagagtcagagggctgtgccagctgccccctttcccacccccagcaattcacttaactttcctgagtctcacctttgtcattatgagaatgtgtatatttataaataatcatctgtttctccaatgtaagatattgttattgcagaagtgatactaggacctcgttatacgatggcctcatgatgtagatttatagcaggcttcagattctggcatagaataaacagatatttatccaagggttcactgattcccgaataaatgccaggaacattcatgt

SEQ ID NO: 8697 - DNA, 1947 bp, Homo sapiens
  source 1..1947: mol_type = unassigned DNA
gaaatctcttgattcctagtctctcgatatggcacctccgtcagtctttgccgaggttccgcaggcccagcctgtcctggtcttcaagctcactgccgacttcagggaggatccggacccccgcaaggtcaacctgggagtgggagcatatcgcacggatgactgccatccctgggttttgccagtagtgaagaaagtggagcagaagattgctaatgacaatagcctaaatcacgagtatctgccaatcctgggcctggctgagttccggagctgtgcttctcgtcttgcccttggggatgacagcccagcactcaaggagaagcgggtaggaggtgtgcaatctttggggggaacaggtgcacttcgaattggagctgatttcttagcgcgttggtacaatggaacaaacaacaagaacacacctgtctatgtgtcctcaccaacctgggagaatcacaatgctgtgttttccgctgctggttttaaagacattcggtcctatcgctactgggatgcagagaagagaggattggacctccagggcttcctgaatgatctggagaatgctcctgagttctccattgttgtcctccacgcctgtgcacacaacccaactgggattgacccaactccggagcagtggaagcagattgcttctgtcatgaagcaccggtttctgttccccttctttgactcagcctatcagggcttcgcatctggaaacctggagagagatgcctgggccattcgctattttgtgtctgaaggcttcgagttcttctgtgcccagtccttctccaagaacttcgggctctacaatgagagagtcgggaatctgactgtggttggaaaagaacctgagagcatcctgcaagtcctttcccagatggagaagatcgtgcggattacttggtccaatccccccgcccagggagcacgaattgtggccagcaccctctctaaccctgagctctttgaggaatggacaggtaatgtgaagacaatggctgaccggattctgaccatgagatctgaactcagggcacgactagaagccctcaaaacccctgggacctggaaccacatcactgatcaaattggcatgttcagcttcactgggttgaaccccaagcaggttgagtatctggtcaatgaaaagcacatctacctgctgccaagtggtcgaatcaacgtgagtggcttaaccaccaaaaatctagattacgtggccacctccatccatgaagcagtcaccaaaatccagtgaagaaacaccacccgtccagtaccaccaaagtagttctctgtcatgtgtgttccctgcctgcacaaacctacatgtacataccatggattagagacacttgcaggactgaaaggctgctctggtgaggcagcctctgtttaaaccggccccacatgaagagaacatcccttgagacgaatttggagactgggattagagcctttggaggtcaaagcaaattaagatttttatttaagaataaaagagtactttgatcatgagacataggtatcttgtccctctcactaaaaaggagtgttgtgtgtggcggccacgtgcttctatgtggtgtttgactctgtacaaattctagtcccaaagatcaagttgtctgaaggagccaaagtgtgaatgtgggtgtcggctgcggcattaaattcatcatctcaacccagagtgtctggtctccctgctctttctgcatggttgtgtccctagtcctaagctttggttctttagggtgactgtggtaagaaggatatttaatcatgacatgcacggacacgtacatatttaactgaaacaagttttaccaaacagtatttactcgtgatgtgcgtagtgcattctgatatttttgagccattctattgtgttctacttcacctaaaaaaataaaataaaaatgttgatcaaga

SEQ ID NO: 8698 - DNA, 646 bp, Homo sapiens
  source 1..646: mol_type = unassigned DNA
cttctccaagaacttcgggctctacagtgagtgctctcctgaggagttacagccccacctcctcgcatcactccctgcttcagcagccacagctgattctggtccctctctttagatgagagagtcgggaatctgactgtggttggaaaagaacctgagagcatcctgcaagtcctttcccagatggagaagatcgtgcggattacttggtccaatccccccgcccagggagcacgaattgtggccagcaccctctctaaccctgagctctttgaggaatggacaggtaatgtgaagacaatggctgaccggattctgaccatgagatctgaactcagggcacgactagaagccctcaaaacccctgggacctggaaccacatcactgatcaaattggcatgttcagcttcactgggttgaaccccaagcaggttgagtatctggtcaatgaaaagcacatctacctgctgccaagtggtcgaatcaacgtgagtggcttaaccaccaaaaatctagattacgtggccacctccatccatgaagcagtcaccaaaatccagtgaagaaacaccacccgtccagtaccaccaaagtagttctctgtcatgtgtgttccctgcctgcacaaacctacatgtacatacc

SEQ ID NO: 8699 - DNA, 716 bp, Homo sapiens
  source 1..716: mol_type = unassigned DNA
agacctgacctgccagctccgggcgtggggtgaaatctcttgattcctagtctctcgatatggcacctccgtcagtctttgccgaggttccgcaggcccagcctgtcctggtcttcaagctcactgccgacttcagggaggatccggacccccgcaaggtcaacctgggagtgggagcatatcgcacggatgactgccatccctgggttttgccagtagtgaagaaagtggagcagaagattgctaatgacaatagcctaaatcacgagtatctgccaatcctgggcctggctgagttccggagctgtgcttctcgtcttgcccttggggatgacagcccagcactcaaggagaagcgggtaagttttgggtaaggatgtattttctctttagaaactgaaagtaaaaagatgttgagaatacagtttgtttaaaatattaggcgttatgtctattgaactgccaatgaataagtgtttctgtagcgcgagttcaggaacctgatagcgcaaataatgtggccatgtacaaagcacggctttttcacttgttcagttttgcccagtagatcatcagattttagctactgcatttgaagcagtcagtggagatgccaagtagaaagaatttaatggagtgataaagacaccagggttctagatccaactctgccactacttttgatcataggcaagtcatttagccctctgggctca

SEQ ID NO: 8700 - DNA, 1972 bp, Homo sapiens
  source 1..1972: mol_type = unassigned DNA
cggcatttccgggaagatggcggcgcacaagtcaggtccggcacatgtttccgcggagcggacccagcaatgacggatgatatcacctcttcttctctggtgagagtctgaggatagagacttttttctcaccatgaatgtcaccccagaggtcaagagtcgtgggatgaagtttgctgaggagcagctgctaaagcatggatggactcaaggcaaaggcctcggccggaaggagaatggtatcactcaggctctcagggtgacactgaagcaagacactcatggggtaggacatgaccctgccaaggagttcacaaaccactggtggaatgagctcttcaacaagactgcggccaacttggtagtggaaactgggcaggatggagtacagataaggagcctttctaaggagaccacccgttataatcatcccaagcccaacttgctgtatcagaagtttgtgaagatggctacattgacttcaggtggagagaagccaaacaaagacttggagagctgcagtgatgacgacaaccaggggtccaagtccccaaagattctgactgatgagatgctgctccaagcctgtgaggggcgaacagcacacaaggctgcccgtcttgggatcacaatgaaggccaagcttgctcgcctagaggcccaggagcaggccttcctggctcgtctcaaaggccaggaccctggggcccctcaactgcagtcagagagcaagccccccaaaaaaaagaaaaagaaaaggaggcagaaagaggaggaagaagctacagcatctgaaaggaatgatgcagatgagaagcacccagaacatgctgagcagaacatcagaaaaagcaagaagaagaaaaggcgacatcaagaaggaaaggtctcagatgaaagagagggtacaactaaagggaatgagaaggaggacgctgcaggaacaagtgggcttggggaattgaatagcagagagcaaaccaatcagtccctcaggaaagggaagaaaaagaagaggtggcaccatgaagaggagaagatgggggtcttggaggaaggaggaaaaggcaaggaggctgcaggcagtgtcaggacagaggaggtagagagcagggcatatgctgacccatgcagccgaagaaagaagaggcagcaacaggaggaggaggacttgaacctagaagatagaggtgaggaaacttttaggtggtggaaccagggaagcagagagcagagcatgcagtgatggaagaagcaggaaaagcaagaagaaaagacagcagcatcaagaggaggaggacatcttggatgtaagggatgagaaggatggcggggctagggaagcagagagcagagcacacactggctcaagcagcagaggtaagaggaagaggcagcagcatcccaagaaggaaagagctggagtcagcactgtccagaaagccaaaaagaaacagaagaagagagactaaaggtctggtaaaggtagggctcaattgattgattttcaggagttgaagcctcaaagaccagggttgatgcaggtctgcaggtcttctgcacccccctcaatgaggagtccctcccagaaaggaaactgatctctgggacgtcagctgctgagaggagcaagcggtagtaccaccccttagttgagggagtcagcacagtcctttctgcagcttctaacccaggaccatgaactcaggtgcctagagaagccaggcagctaaaggacaaggaatgctgggggctgtgggaacaggaatgcagataccctttgaaggagcattcctgctaaaagaagctgaaaatgtagacctatgtgaagtgctctgatttctaaatattgtgaaggttaagaaaaacataaatttaggtctatgggctagatttagcccacagttgccagtttctagcgctaccaaatgaatgaataaacatgagcttgcgctcctagcctagagataaa

SEQ ID NO: 8701 - DNA, 1159 bp, Homo sapiens
  source 1..1159: mol_type = unassigned DNA
aagatggcggcgcacaagtcaggtccggcacatgtttccgcggagcggacccagcaatgacgaggtcaagagtcgtgggatgaagtttgctgaggagcagctgctaaagcatggatggactcaaggcaaaggcctcggccggaaggagaatggtatcactcaggctctcagggtgacactgaagcaagacactcatggggtaggacatgaccctgccaaggagttcacaaaccactggtggaatgagctcttcaacaagactgcggccaacttggtagtggaaactgggcaggatggagtacagataaggagcctttctaaggagaccacccgttataatcatcccaagcccaacttgctgtatcagaagtttgtgaagatggctacattgacttcaggtggagagaagccaaacaaagacttggagagctgcagtgatgacgacaaccaggggtccaagtccccaaagattctgactgatgagatgctgctccaagcctgtgaggggcgaacagcacacaaggctgcccgtcttgggatcacaatgaaggccaagcttgctcgcctagaggcccaggagcaggccttcctggctcgtctcaaaggccaggaccctggggcccctcaactgcagtcagagagcaagccccccaaaaaaaagaaaaagaaaaggaggcagaaagaggaggaagaagctacagcatctgaaaggaatgatgcagatgagaagcacccagaacatgctgagcagaacatcagaaaaagcaagaagaagaaaaggcgacatcaagaaggaaaggtctcagatgaaagagagggtacaactaaagggaatgagaaggaggacgctgcaggaacaagtgggcttggggaattgaatagcagagagcaaaccaatcagtccctcaggaaagggaagaaaaagaagaggtggcaccatgaagaggagaagatgggggtcttggaggaaggaggaaaaggcaaggaggctgcaggcagtgtcaggacagaggaggtagagagcagggcatatgctgacccatgcagccgaagaaagaagaggcagcaacaggaggaggaggacttgaacctagaagatagaggtgaggaaacttttaggtggtggaaccagggaagcagagagcagagcatgcagtga

SEQ ID NO: 8702 - DNA, 934 bp, Homo sapiens
  source 1..934: mol_type = unassigned DNA
aacaaaacggcatttccgggaagatggcggcgcacaagtcaggtccggcacatgtttccgcggagcggacccagcaatgacggatgatatcacctcttcttctctggtgagagtctgaggatagagacttttttctcaccatgaatgtcaccccagaggtcaagagtcgtgggatgaagtttgctgaggagcagctgctaaagcatggatggactcaaggcaaaggcctcggccggaaggagaatggtatcactcaggctctcagggtgacactgaagcaagacactcatggggtaggacatgaccctgccaaggagttcacaaaccactggtggaatgagctcttcaacaagactgcggccaacttggtagtggaaactgggcagatggctacattgacttcaggtggagagaagccaaacaaagacttggagagctgcagtgatgacgacaaccaggggtccaagtccccaaagattctgactgatgagatgctgctccaagcctgtgaggggcgaacagcacacaaggctgcccgtcttgggatcacaatgaaggccaagcttgctcgcctagaggcccaggagcaggccttcctggctcgtctcaaaggccaggaccctggggcccctcaactgcagtcagagagcaagccccccaaaaaaaagaaaaagaaaaggaggcagaaagaggaggaagaagctacagcatctgaaaggaatgatgcagatgagaagcacccagaacatgctgagcagaacatcagaaaaagcaagaagaagaaaaggcgacatcaagaaggaaaggtctcagatgaaagagagggtacaactaaagggaatgagaaggaggacgctgcaggaacaagtgggcttggggaattgaatagcagagagcaaaccaatcagtccctcaggaaagggaagaaaaagaa

SEQ ID NO: 8703 - DNA, 740 bp, Homo sapiens
  source 1..740: mol_type = unassigned DNA
caggatggagtacagataaggagcctttctaaggagaccacccgttataatcatcccaagcccaacttgctgtatcagaagtttgtgaagatggctacattgacttcaggtggagagaagccaaacaaagacttggagagctgcagtgatgacgacaaccaggggtccaagtccccaaagatgtgagacttcattttagctcttggggaatgtgggaagagatgtcttcagatggcaagagaaagggctaaatctaatgcttgactgggggcttcttgggggtgggtggaactgtgttgtactaatctttgtatccctagtacctcaaaaagtgccaggtcctgaacaagaattcagtgttgaaggaatgttttagaaggaggagaggtcaagcctttccaccaggtctgtttgtaactgctgatctcccctaacagtctgactgatgagatgctgctccaagcctgtgaggggcgaacagcacacaaggctgcccgtcttgggatcacaatgaaggccaagcttgctcgcctagaggcccaggagcaggccttcctggctcgtctcaaaggccaggaccctggggcccctcaactgcagtcagagagcaagccccccaaaaaaaagaaaaagaaaaggaggcagaaagaggaggaagaagctacagcatctgaaaggaatgatgcagatgagaagcacccagaacatgctgagcagaacatcagaaaaagcaagaagaa

SEQ ID NO: 8704 - DNA, 837 bp, Homo sapiens
  source 1..837: mol_type = unassigned DNA
atgaatgtcaccccagaggtcaagagtcgtgggatgaagtttgctgaggagcagctgctaaagcatggatggactcaaggcaaaggcctcggccggaaggagaatggtatcactcaggctctcagggtgacactgaagcaagacactcatggggtaggacatgaccctgccaaggagttcacaaaccactggtggaatgagctcttcaacaagactgcggccaacttggtagtggaaactgggcaggatggagtacagataaggagcctttctaaggagaccacccgttataatcatcccaagcccaacttgctgtatcagaagtttgtgaagatggctacattgacttcaggtggagagaagccaaacaaagacttggagagctgcagtgatgacgacaaccaggggtccaagtccccaaagattacctcaaaaagtgccaggtcctgaacaagaattcagtgttgaaggaatgttttagaaggaggagaggtcaagcctttccaccaggtctgtttgtaactgctgatctcccctaacagtctgactgatgagatgctgctccaagcctgtgaggggcgaacagcacacaaggctgcccgtcttgggatcacaatgaaggccaagcttgctcgcctagaggcccaggagcaggccttcctggctcgtctcaaaggccaggaccctggggcccctcaactgcagtcagagagcaagccccccaaaaaaaagaaaaagaaaaggaggcagaaagaggaggaagaagctacagcatctgaaaggaatgatgcagatgagaagcacccagaacatgctgagcagaacatcagaaaaagc

SEQ ID NO: 8705 - DNA, 857 bp, Homo sapiens
  source 1..857: mol_type = unassigned DNA
ggcgcacaagtcaggtccggcacatgtttccgcggagcggacccagcaatgacggatgatatcacctcttcttctctggtgagagtctgaggatagagacttttttctcaccatgaatgtcaccccagaggtcaagagtcgtgggatgaagtttgctgaggagcagctgctaaagcatggatggactcaaggcaaaggcctcggccggaaggagaatggtatcactcaggctctcagggtgacactgaagcaagacactcatggggtaggacatgaccctgccaaggagttcacaaaccactggtggaatgagctcttcaacaagactgcggccaacttggtagtggaaactgggcaggatggagtacagataaggagcctttctaaggagaccacccgttataatcatcccaagcccaacttgctgtatcagaagtttgtgaagactgcccagaccctcagcaggaattgagatcttcaggttccgtggatcctgccatctgttaagggagcagcaatagggcgtgggagatggctacattgacttcaggtggagagaagccaaacaaagacttggagagctgcagtgatgacgacaaccaggggtccaagtccccaaagattctgactgatgagatgctgctccaagcctgtgaggggcgaacagcacacaaggctgcccgtcttgggatcacaatgaaggccaagcttgctcgcctagaggcccaggagcaggccttcctggctcgtctcaaaggccaggaccctggggcccctcaactgcagtcagagagcaagccccccaaaaaaaagaaaaagaaaaggaggcagaaagaggaggaagaagctacagcatc

SEQ ID NO: 8706 - DNA, 534 bp, Homo sapiens
  source 1..534: mol_type = unassigned DNA
cttatctacccccatgacccctcctagatggctacattgacttcaggtggagagaagccaaacaaagacttggagagctgcagtgatgacgacaaccaggggtccaagtccccaaagattctgactgatgagatgctgctccaagcctgtgaggggcgaacagcacacaagtaagtagtggtcagctccttgagctcccttttctccccacctttgaccatggcctgtgccacctcttggttctttttaccccagggaaatgattcctattacctacccatctattgcctgaagataggcagctccccactcctaccctccaccaactttccctgcaggcttaaggactaggcccatttcccccgataccctcgctttgacttggaccctgtctgtttcagggctgcccgtcttgggatcacaatgaaggccaagcttgctcgcctagaggcccaggagcaggccttcctggctcgtctcaaaggccaggaccctggggcccctcaactgcagtcagagagcaagccccccaaa

SEQ ID NO: 8707 - DNA, 552 bp, Homo sapiens
  source 1..552: mol_type = unassigned DNA
atctacccccatgacccctcctagatggctacattgacttcaggtggagagaagccaaacaaagacttggagagctgcagtgatgacgacaaccaggggtccaagtccccaaagatgtgagacttcattttagctcttggggaatgtgggaagagatgtcttcagatggcaagagaaagggctaaatctaatgcttgactgggggcttcttgggggtgggtggaactgtgttgtactaatctttgtatccctagtacctcaaaaagtgccaggtcctgaacaagaattcagtgttgaaggaatgttttagaaggaggagaggtcaagcctttccaccaggtctgtttgtaactgctgatctcccctaacagtctgactgatgagatgctgctccaagcctgtgaggggcgaacagcacacaaggctgcccgtcttgggatcacaatgaaggccaagcttgctcgcctagaggcccaggagcaggccttcctggctcgtctcaaaggccaggaccctggggcccctcaactgcagtcagagagcaagcccccc

SEQ ID NO: 8708 - DNA, 2464 bp, Homo sapiens
  source 1..2464: mol_type = unassigned DNA
gaagatggcggcgcacaagtcaggtccggcacatgtttccgcggagcggacccagcaatgacggatgatatcacctcttcttctctggtgagagtctgaggatagagacttttttctcaccatgaatgtcaccccagaggtcaagagtcgtgggatgaagtttgctgaggagcagctgctaaagcatggatggactcaaggtaggacatgaccctgccaaggagttcacaaaccactggtggaatgagctcttcaacaagactgcggccaacttggtagtggaaactgggcaggatggagtacagataaggagcctttctaaggagaccacccgttataatcatcccaagcccaacttgctgtatcagaagtttgtgaaggtattagaggctgtgggtaacagagtccatcctttttctcttccctggtttccctggggcctgaacagttgccttgtatgccttatcaattctcagaactttcctaacatagtgggatcctgtgaccagccttgctgttgcttacttagactgcccagaccctcagcaggaattgagatcttcaggttccgtggatcctgccatctgttaagggagcagcaatagggcgtgggaggtagggtacagtctcttaagtcaggagctgccaaattttgggggggccaggggacatctaattcaaaggacttagaagccagaggagacctgagagattatctggaccatccctgctttgcagatgtggctaaaagggtgaaaagtggtttgctgaagagcccacagctggctagtaatggcaaacaggactggaacccaggacttcaggcctccactttctactgtaccaataggaggaagctaacatgtaatggtcattatgtgctaagggctatacatgttacctagcaaatctttcccatttctctacatctctgttaccatctactaccccacttcgggccatcatcatctcttgcctaatttctttctccagcagcctcctaagaacacctgtagtctcactccccaccccaacctttgtggaggatggacttctccacaaagcatccagtgttctctctaaaacataaatgtcatcatgtcactgggtcttgtttgacctaggatgacacaatccagatttatcggactggcttatatggctctgcatgcctgttcctgccatctccagcctcatctcttcacttttctccaggaccactactttagcctaaccattagcataacagattccaatctgtttcttttctttgaaggtacgacagtcttccatcttcaggttattgcacatgttgctccctctgcttgggacattcttctccctttccccctttaccttctgagtttctcttatcctccagagctcagcttatacatcagttacttttagaagccattctctgaagtctgagttgagtacccttcctctatcacaggcaacacttccatcataattgcctatgtagattccatctgggctgggcccatctcattcttattccactctgaatccccaactccttggcccatagtagactctcaattaatctgattaaatgaaggtactgtgaacaggtactatggtcggggtggagcggggcatctttactgtcagtcactggcacttgtccactgtgaagacctgatgaaccagagcatttcctcttcttgttctgctcaccagccagctgtgggtgagagaggccaaagctgctgcacatcccagcagcagcagcccatctcctatccaagttcgagtatgcaggatggcacacctccctgtggctcctcaaggagcaatggtgggggctggcaaaccactgcctggagctataaattcttagggggcttccacaagggaatagggatggtgatggtgttgagaaggccttatctacccccatgacccctcctagatggctacattgacttcaggtggagagaagccaaacaaagacttggagagctgcagtgatgacgacaaccaggggtccaagtccccaaagatgtgagacttcattttagctcttggggaatgtgggaagagatgtcttcagatggcaagagaaagggctaaatctaatgcttgactgggggcttcttgggggtgggtggaactgtgttgtactaatctttgtatccctagtacctcaaaaagtgccaggtcctgaacaagaattcagtgttgaaggaatgttttagaaggaggagaggtcaagcctttccaccaggtctgtttgtaactgctgatctcccctaacagtctgactgatgagatgctgctccaagcctgtgaggggcgaacagcacacaaggctgcccgtcttgggatcacaatgaaggccaagcttgctcgcctagaggcccaggagcaggccttcctggctcgtctcaaaggccaggaccctggggcccctcaactgcagtcagagagcaagcccccc

SEQ ID NO: 8709 - DNA, 532 bp, Homo sapiens
  source 1..532: mol_type = unassigned DNA
atttccgggaagatggcggcgcacaagtcaggtccggcacatgtttccgcggagcggacccagcaatgacggatgatatcacctcttcttctctggtgagagtctgaggatagagacttttttctcaccatgaatgtcaccccagaggtcaagagtcgtgggatgaagtttgctgaggagcagctgctaaagcatggatggactcaaggtaggacatgaccctgccaaggagttcacaaaccactggtggaatgagctcttcaacaagactgcggccaacttggtagtggaaactgggcaggatggagtacagataaggagcctttctaaggagaccacccgttataatcatcccaagcccaacttgctgtatcagaagtttgtgaagatggctacattgacttcaggtggagagaagccaaacaaagacttggagagctgcagtgatgacgacaaccaggggtccaagtccccaaagattctgactgatgagatgctgctccaagcctgtgaggggcgaacagcacacaag

SEQ ID NO: 8710 - DNA, 719 bp, Homo sapiens
  source 1..719: mol_type = unassigned DNA
aagatggcggcgcacaagtcaggtccggcacatgtttccgcggagcggacccagcaatgacggatgatatcacctcttcttctctggtgagagtctgaggatagagacttttttctcaccatgaatgtcaccccagaggtcaagagtcgtgggatgaagtttgctgaggagcagctgctaaagcatggatggactcaaggcaaaggcctcggccggaaggagaatggtatcactcaggctctcagggtgacactgaagcaagacactcatggggtaggacatgaccctgccaaggagttcacaaaccactggtggaatgagctcttcaacaagactgcggccaacttggtagtggaaactgggcaggatggagtacagataaggagcctttctaaggagaccacccgttataatcatcccaagcccaacttgctgtatcagaagtttgtgaagtgggatcctgtgaccagccttgctgttgcttacttagactgcccagaccctcagcaggaattgagatcttcaggttccgtggatcctgccatctgttaagggagcagcaatagggcgtgggagatggctacattgacttcaggtggagagaagccaaacaaagacttggagagctgcagtgatgacgacaaccaggggtccaagtccccaaagattctgactgatgagatgctgctccaagcctgtgaggggcgaacagcacacaa

SEQ ID NO: 8711 - DNA, 634 bp, Homo sapiens
  source 1..634: mol_type = unassigned DNA
tggcggcgcacaagtcaggtccggcacatgtttccgcggagcggacccagcaatgacggatgatatcacctcttcttctctggtgagagtctgaggatagagacttttttctcaccatgaatgtcaccccagaggtcaagagtcgtgggatgaagtttgctgaggagcagctgctaaagcatggatggactcaaggcaaaggcctcggccggaaggagaatggtatcactcaggctctcagggtgacactgaagcaagacactcatggggtaggacatgaccctgccaaggagttcacaaaccactggtggaatgagctcttcaacaagactgcggccaacttggtagtggaaactgggcaggatggagtacagataaggagcctttctaaggagaccacccgttataatcatcccaagcccaacttgctgtatcagaagtttgtgaagatggctacattgacttcaggtggagagaagccaaacaaagacttggagagctgcagtgatgacgacaaccaggggtccaagtccccaaagatgtgagacttcattttagctcttggggaatgtgggaagagatgtcttcagatggcaagagaaagggctaaatctaatgcttgactgggggcttc

SEQ ID NO: 8712 - DNA, 1029 bp, Homo sapiens
  source 1..1029: mol_type = unassigned DNA
atttccgggaagatggcggcgcacaagtcaggtccggcacatgtttccgcggagcggacccagcaatgacggatgatatcacctcttcttctctggtgagagtctgaggatagagacttttttctcaccatgaatgtcaccccagaggtcaagagtcgtgggatgaagtttgctgaggagcagctgctaaagcatggatggactcaaggcaaaggcctcggccggaaggagaatggtatcactcaggctctcagggtgacactgaagcaagacactcatggggtaggacatgaccctgccaaggagttcacaaaccactggtggaatgagctcttcaacaagactgcggccaacttggtagtggaaactgggcaggatggagtacagataaggagcctttctaaggagaccacccgttataatcatcccaagcccaacttgctgtatcagaagtttgtgaaggtattagaggctgtgggtaacagagtccatcctttttctcttccctggtttccctggggcctgaacagttgccttgtatgccttatcaattctcagaactttcctaacatagtgggatcctgtgaccagccttgctgttgcttacttagactgcccagaccctcagcaggaattgagatcttcaggttccgtggatcctgccatctgttaagggagcagcaatagggcgtgggaggtagggtacagtctcttaagtcaggagctgccaaattttgggggggccaggggacatctaattcaaaggacttagaagccagaggagacctgagagattatctggaccatccctgctttgcagatgtggctaaaagggtgaaaagtggtttgctgaagagcccacagctggctagtaatggcaaacaggactggaacccaggacttcaggcctccactttctactgtaccaataggaggaagctaacatgtaatggtcattatgtgctaagggctatacatgttacctagcaaatctttcccatttctctacatctctgttaccatctacta

SEQ ID NO: 8713 - DNA, 781 bp, Homo sapiens
  source 1..781: mol_type = unassigned DNA
agaaggaacaaaacggcatttccgggaagatggcggcgcacaagtcaggtccggcacatgtttccgcggagcggacccagcaatgacggatgatatcacctcttcttctctggtgagagtctgaggatagagacttttttctcaccatgaatgtcaccccagaggtcaagagtcgtgggatgaagtttgctgaggagcagctgctaaagcatggatggactcaaggtaggacatgaccctgccaaggagttcacaaaccactggtggaatgagctcttcaacaagactgcggccaacttggtagtggaaactgggcaggtatgagctcttgatagatgggcacatgaaacagagggcctgggacctgtggcgtaggcagtcatgatatgtcacccattcactggtactgataattctctacaggatggagtacagataaggagcctttctaaggagaccacccgttataatcatcccaagcccaacttgctgtatcagaagtttgtgaaggtattagaggctgtgggtaacagagtccatcctttttctcttccctggtttccctggggcctgaacagttgccttgtatgccttatcaattctcagaactttcctaacatagtgggatcctgtgaccagccttgctgttgcttacttagactgcccagaccctcagcaggaattgagatcttcaggttccgtggatcctgccatctgttaagggagcagcaatagggcgtgggaggtagggtacagtctcttaagtcaggagctgccaaat

SEQ ID NO: 8714 - DNA, 653 bp, Homo sapiens
  source 1..653: mol_type = unassigned DNA
aagatggcggcgcacaagtcaggtccggcacatgtttccgcggagcggacccagcaatgacggatgatatcacctcttcttctctggtgagagtctgaggatagagacttttttctcaccatgaatgtcaccccagaggtcaagagtcgtgggatgaagtttgctgaggagcagctgctaaagcatggatggactcaaggcaaaggcctcggccggaaggagaatggtatcactcaggctctcagggtgacactgaagcaagacactcatggggtaggacatgaccctgccaaggagttcacaaaccactggtggaatgagctcttcaacaagactgcggccaacttggtagtggaaactgggcaggtatgagctcttgatagatgggcacatgaaacagagggcctgggacctgtggcgtaggcagtcatgatatgtcacccattcactggtactgataattctctacaggatggagtacagataaggagcctttctaaggagaccacccgttataatcatcccaagcccaacttgctgtatcagaagtttgtgaaggtattagaggctgtgggtaacagagtccatcctttttctcttccctggtttccctggggcctgaacagttgccttgtatgccttatcaattctca

SEQ ID NO: 8715 - DNA, 513 bp, Homo sapiens
  source 1..513: mol_type = unassigned DNA
atttccgggaagatggcggcgcacaagtcaggtccggcacatgtttccgcggagcggacccagcaatgacgaggcagggtttcactacgttgcccacactggtctggaactcctgggctcaagtgattcttctaccttggccttccaaagtgctgggattacaaatgtgaaccactgtgcctggccgctttattctttttatgagagagggtcttgctatactgcccaggctggactcaagcaatcccgcctcagcctcccatgtagctgggactacaggtgtgtgccactgcacccaactagcagagaattcttaacaagcagtcaggatggaactgatggctgtttgggcactttctactttcttcttaaaaggatgatatcacctcttcttctctggtgagagtctgaggatagagacttttttctcaccatgaatgtcaccccagaggtcaagagtcgtgggatgaagtttgctgaggagcagctgctaaagcatggatggactcaagg

SEQ ID NO: 8716 - DNA, 2129 bp, Homo sapiens
  source 1..2129: mol_type = unassigned DNA
gtctcggcagatgccgcctggtccagctatcgtgctcggtattcagttttccggagcagcgctctttctctggcccgcggagcggtcccgcggccgagtaccggattcccgagtttgggaggctctgctttcctccttaggacccactttgccgtcctggggtggctgcagttatgtccgcgctgcgacctctcctgcttctgctgctgcctctgtgtcccggtcctggtcccggacccgggagcgaggcaaaggtcacccggagttgtgcagagacccggcaggtgctgggggcccggggatatagcttaaacctaatccctcccgccctgatctcaggtgagcacctccgggtctgtccccaggagtacacctgctgttccagtgagacagagcagaggctgatcagggagactgaggccaccttccgaggcctggtggaggacagcggctcctttctggttcacacactggctgccaggcacagaaaatttgatgagttttttctggagatgctctcagtagcccagcactctctgacccagctcttctcccactcctacggccgcctgtatgcccagcacgccctcatattcaatggcctgttctctcggctgcgagacttctatggggaatctggtgaggggttggatgacaccctggcggatttctgggcacagctcctggagagagtgttcccgctgctgcacccacagtacagcttcccccctgactacctgctctgcctctcacgcttggcctcatctaccgatggctctctgcagccctttggggactcaccccgccgcctccgcctgcagataacccggaccctggtggctgcccgagcctttgtgcagggcctggagactggaagaaatgtggtcagcgaagcgcttaaggttggagggtgcctgagtatgggcagggcccagggagggagaggtggaagtgagagagaccccacaaggaagaaacagccaccagccagcaggacaggccttgggctctgtctgcctccaggccctggtgtcctaggatgaattaggaaggagggggctggagtgaaacctccaatggtccacgatccatgatctctgaccccctcctcccctctgtggacccataccctcctcagtccccaagggcctgctcatctccatagcagtaggagattggatactgcccccgcccaaccccccaggatccctcaatgactccacttccctgctgctgaaggccagatgcctggcttggcctctctcactgcccatcctctacctgacctcccagcctcaccttctgcctcctgaccgcctcctccctccccagctgtgatgggctcactcttgtccttgaatgttccctccacccctaactgcctctctatttccacccctcccacgaatcagagtcagcaacctggaacctccctcctcagatctgtgacaatctcacctgctgccacgtggggtcaccaaccctaggtgtagggtggggtatgtgatttctgtctgtgcccagcaccaagccaggctgagagcagccacagcgtttgtggaggacacagccccactctctgcccccaggtgccggtgtctgaaggctgcagccaggctctgatgcgtctcatcggctgtcccctgtgccggggggtcccctcacttatgccctgccagggcttctgcctcaacgtggttcgtggctgtctcagcagcaggggactggagcctgactggggcaactatctgggtgaggggattcaagaaagcctggagccaggcatggtggctcacacctgtaatcacagcactttgagaggctgaggcaggaggatcacttgaggccaggagttggagcccagctggggcaacatagctagacgtcatctcaagaaagaaagagagagagagaaagaaagagagagagagagacagagaaagaaagaaggaaagaaggaaggaaagaaagaaaaagaaagaaagaaagaaagaaaagaaagaaatcagccaggcatggtagcgcccgcgcctgtagtcccagttactcctgaggctgaggcaggaggatcacttgaggccaggagttggaggccagcctgggcaacgtagctagaccgcatctctacc

SEQ ID NO: 8717 - DNA, 767 bp, Homo sapiens
  source 1..767: mol_type = unassigned DNA
tcggcagatgccgcctggtccagctatcgtgctcggtattcagttttccggagcagcgctctttctctggcccgcggagcggtcccgcggccgagtaccggattcccgagtttgggaggctctgctttcctccttaggacccactttgccgtcctggggtggctgcagttatgtccgcgctgcgacctctcctgcttctgctgctgcctctgtgtcccggtcctggtcccggacccgggagcgaggcaaaggtcacccggagttgtgcagagacccggcaggtgctgggggcccggggatatagcttaaacctaatccctcccgccctgatctcaggtgagcacctccgggtctgtccccaggagtacacctgctgttccagtgagacagagcagaggctgatcagggagactgaggccaccttccgaggcctggtggaggacagcggctcctttctggttcacacactggctgccaggcacagaaaatttgatgataacccggaccctggtggctgcccgagcctttgtgcagggcctggagactggaagaaatgtggtcagcgaagcgcttaaggtgccggtgtctgaaggctgcagccaggctctgatgcgtctcatcggctgtcccctgtgccggggggtcccctcacttatgccctgccagggcttctgcctcaacgtggttcgtggctgtctcagcagcaggggactggagcctgactggggcaactatctggatggtctcctgatcctggctgataagct

SEQ ID NO: 8718 - DNA, 798 bp, Homo sapiens
  source 1..798: mol_type = unassigned DNA
ctctcggctgcgagacttctatggggaatctggtgaggggttggatgacaccctggcggatttctgggcacagctcctggagagagtgttcccgctgctgcacccacagtacagcttcccccctgactacctgctctgcctctcacgcttggcctcatctaccgatggctctctgcagccctttggggactcaccccgccgcctccgcctgcagataacccggaccctggtggctgcccgagcctttgtgcagggcctggagactggaagaaatgtggtcagcgaagcgcttaaggtgccggtgtctgaaggctgcagccaggctctgatgcgtctcatcggctgtcccctgtgccggggggtcccctcacttatgccctgccagggcttctgcctcaacgtggttcgtggctgtctcagcagcaggggactggagcctgactggggcaactatctggatggtctcctgatcctggctgataagctccagggccccttttcctttgagctgacggccgagtccattggggtgaagatctcggagggtttgatgtacctgcaggaaaacagtgcgaaggtgtccgcccagggtgactgtgtgaggtctcttcccggtgccgcaggtgtttcaggagtgcggcccccccgacccggtgcctgcccgcaaccgtcgagccccgccgccccgggaagaggcgggccggctgtggtcgatggtgaccgaggaggagcggcccacgacggccgcaggcaccaacctgcaccggctggtgtgggagctccgcgagcgtctggccc

SEQ ID NO: 8719 - DNA, 787 bp, Homo sapiens
  source 1..787: mol_type = unassigned DNA
gatggtctcctgatcctggctgataagctccagggccccttttcctttgagctgacggccgagtccattggggtgaagatctcggagggtttgatgtacctgcaggaaaacagtgcgaaggtgtccgcccaggtgtttcaggagtgcggcccccccgacccggtgcctgcccgcaaccgtcgagccccgccgccccgggaagaggcgggccggctgtggtcgatggtgaccgaggaggagcggcccacgacggccgcaggcaccaacctgcaccggctggtgtgggagctccgcgagcgtctggcccggatgcggggcttctgggcccggctgtccctgacggtgtgcggagactctcgcatggcagcggacgcctcgctggaggcggcgccctgctggaccggagccgggcggggccggtacttgccgccagtggtcgggggctccccggccgagcaggtcaacaaccccgagctcaaggtggacgcctcgggccccgatgtcccgacacggcggcgtcggctacagctccgggcggccacggccagaatgaaaacggccgcactgggacacgacctggacgggcaggacgcgggtgagacccctgcatccctgagcctgagccccgcccactgccctgaagcctctcccctctcctggtagttcccgcccgtgcctctgctcttagcgttcattgattaattcactaattcattcaacgagcatttattgagcgttgccctgaaagactgggggtaacagatcaatgagggggtctgtatccttt

SEQ ID NO: 8720 - DNA, 2532 bp, Homo sapiens
  source 1..2532: mol_type = unassigned DNA
ggcagatgccgcctggtccagctatcgtgctcggtattcagttttccggagcagcgctctttctctggcccgcggagcggtcccgcggccgagtaccggattcccgagtttgggaggctctgctttcctccttaggacccactttgccgtcctggggtggctgcagttatgtccgcgctgcgacctctcctgcttctgctgctgcctctgtgtcccggtcctggtcccggacccgggagcgaggcaaaggtcacccggagttgtgcagagacccggcaggtgctgggggcccggggatatagcttaaacctaatccctcccgccctgatctcaggtgagcacctccgggtctgtccccaggagtacacctgctgttccagtgagacagagcagaggctgatcagggagactgaggccaccttccgaggcctggtggaggacagcggctcctttctggttcacacactggctgccaggcacagaaaatttgatgagttttttctggagatgctctcagtagcccagcactctctgacccagctcttctcccactcctacggccgcctgtatgcccagcacgccctcatattcaatggcctgttctctcggctgcgagacttctatggggaatctggtgaggggttggatgacaccctggcggatttctgggcacagctcctggagagagtgttcccgctgctgcacccacagtacagcttcccccctgactacctgctctgcctctcacgcttggcctcatctaccgatggctctctgcagccctttggggactcaccccgccgcctccgcctgcagataacccggaccctggtggctgcccgagcctttgtgcagggcctggagactggaagaaatgtggtcagcgaagcgcttaaggtgccggtgtctgaaggctgcagccaggctctgatgcgtctcatcggctgtcccctgtgccggggggtcccctcacttatgccctgccagggcttctgcctcaacgtggttcgtggctgtctcagcagcaggggactggagcctgactggggcaactatctggatggtctcctgatcctggctgataagctccagggccccttttcctttgagctgacggccgagtccattggggtgaagatctcggagggtttgatgtacctgcaggaaaacagtgcgaaggtgtccgcccaggtgtttcaggagtgcggcccccccgacccggtgcctgcccgcaaccgtcgagccccgccgccccgggaagaggcgggccggctgtggtcgatggtgaccgaggaggagcggcccacgacggccgcaggcaccaacctgcaccggctggtgtgggagctccgcgagcgtctggcccggatgcggggcttctgggcccggctgtccctgacggtgtgcggagactctcgcatggcagcggacgcctcgctggaggcggcgccctgctggaccggagccgggcggggccggtacttgccgccagtggtcgggggctccccggccgagcaggtcaacaaccccgagctcaaggtggacgcctcgggccccgatgtcccgacacggcggcgtcggctacagctccgggcggccacggccagaatgaaaacggccgcactgggacacgacctggacgggcaggacgcggatgaggatgccagcggctctggagggggacagcagtatgcagatgactggatggctggggctgtggctcccccagcccggcctcctcggcctccataccctcctagaagggatggttctgggggcaaaggaggaggtggcagtgcccgctacaaccagggccggagcaggagtgggggggcatctattggttttcacacccaaaccatcctcattctctccctctcagccctggccctgcttggacctcgataacgggggaggggtgccctagcatcagaagggttcatggccctttcccctcctcccccctcagctgggcctggggaggagtcgaagggggctgcagagagggtagagaagggactttgcaggtgaatggctggggccccaaatccaggagattttcatcagaggtgggtgggtgttcacaatatttattttttcatttggtaatgggaggggggcctgggggtatttatttaggagggagtgtggtttccttagaaggtatagtctctagccctctaaggctggggctggtgatcagccccaacagagaaaatgaggagtttagagttgcagctggggaaggggtttgaaggaagttggaagtggggaggggtgggggcatctggtctcagaaatggaccagctggatgcagggcaggggactgagggtgcttgagtaggatgtgagacttcatgggcctgggttctgttgagttttttcagtatcaatttcttaaaccaaattttaaaaaaaacaaggtgggggggtgctcatctcgtgacctctgccacccacatccttcacaaactccatgtttcagtgtttgagtccatgtttattctgcaaataaatggtaatgtattgga

SEQ ID NO: 8721 - DNA, 6467 bp, Homo sapiens
  source 1..6467: mol_type = unassigned DNA
ccaggatttctctcttcctatttcaggaggactctcacaggctcccacagcctgtgttaagctgaggtttcccctagatctcgtatatccccaacacatacctccacgcacacacatccccaagaacctcgagctcacaccaacagacacacgcgcgcatacacactcgctctcgcttgtccatctccctcccgggggagccggcgcgcgctcccacctttgccgcacactccggcgagccgagcccgcagcgctccaggattctgcggctcggaactcggattgcagctctgaacccccatggtggttttttaaacacttcttttccttctcttcctcgttttgattgcaccgtttccatctgggggctagaggagcaaggcagcagccttcccagccagcccttgttggcttgccatcgtccatctggcttataaaagtttgctgagcgcagtccagagggctgcgctgctcgtcccctcggctggcagaagggggtgacgctgggcagcggcgaggagcgcgccgctgcctctggcgggctttcggcttgaggggcaaggtgaagagcgcaccggccgtggggtttaccgagctggatttgtatgttgcaccatgccttcttggatcggggctgtgattcttcccctcttggggctgctgctctccctccccgccggggcggatgtgaaggctcggagctgcggagaggtccgccaggcgtacggtgccaagggattcagcctggcggacatcccctaccaggagatcgcaggggaacacttaagaatctgtcctcaggaatatacatgctgcaccacagaaatggaagacaagttaagccaacaaagcaaactcgaatttgaaaaccttgtggaagagacaagccattttgtgcgcaccacttttgtgtccaggcataagaaatttgacgaatttttccgagagctcctggagaatgcagaaaagtcactaaatgatatgtttgtacggacctatggcatgctgtacatgcagaattcagaagtcttccaggacctcttcacagagctgaaaaggtactacactgggggtaatgtgaatctggaggaaatgctcaatgacttttgggctcggctcctggaacggatgtttcagctgataaaccctcagtatcacttcagtgaagactacctggaatgtgtgagcaaatacactgaccagctcaagccatttggagacgtgccccggaaactgaagattcaggttacccgcgccttcattgctgccaggacctttgtccaggggctgactgtgggcagagaagttgcaaaccgagtttccaaggtcagcccaaccccagggtgtatccgtgccctcatgaagatgctgtactgcccatactgtcgggggcttcccactgtgaggccctgcaacaactactgtctcaacgtcatgaagggctgcttggcaaatcaggctgacctcgacacagagtggaatctgtttatagatgcaatgctcttggtggcagagcgactggaggggccattcaacattgagtcggtcatggacccgatagatgtcaagatttctgaagccattatgaacatgcaagaaaacagcatgcaggtgtctgcaaaggtctttcagggatgtggtcagcccaaacctgctccagccctcagatctgcccgctcagctcctgaaaattttaatacacgtttcaggccctacaatcctgaggaaagaccaacaactgctgcaggcacaagcttggaccggctggtcacagacataaaagagaaattgaagctctctaaaaaggtctggtcagcattaccctacactatctgcaaggacgagagcgtgacagcgggcacgtccaacgaggaggaatgctggaacgggcacagcaaagccagatacttgcctgagatcatgaatgatgggctcaccaaccagatcaacaatcccgaggtggatgtggacatcactcggcctgacactttcatcagacagcagattatggctctccgtgtgatgaccaacaaactaaaaaacgcctacaatggcaatgatgtcaatttccaggacacaagtgatgaatccagtggctcagggagtggcagtgggtgcatggatgacgtgtgtcccacggagtttgagtttgtcaccacagaggcccccgcagtggatcccgaccggagagaggtggactcttctgcagcccagcgtggccactccctgctctcctggtctctcacctgcattgtcctggcactgcagagactgtgcagataatcttgggtttttggtcagatgaaactgcattttagctatctgaatggccaactcacttcttttcttacactcttggacaatggaccatgccacaaaaacttaccgttttctatgagaagagagcagtaatgcaatctgcctccctttttgttttcccaaagagtaccgggtgccagactgaactgcttcctctttccttcagctatctgtggggaccttgtttattctagagagaattcttactcaaatttttcgtaccaggagattttcttaccttcatttgcttttatgctgcagaagtaaaggaatctcacgttgtgagggttttttttttctcatttaaaataaaaaaggaagaaagaaaataattttccttgtaaaatcgggccaaaccccaagacagctacattttcaacaaaaaagcaaacagagaaaaataaatgaactttaacactgtaagttcagcattgacagccaacttccagtgtaagcttttttgtgacaaatccgggtttaaaaatgcttatggggagaaagcttaaagtttgttctaaatgtagtgaaaatgcactgttgtcttggaggtatcatcttgcactctaaccaaacaacaccaaattaatctggaggtactgatactaaatttggaatcccgtctttaatatgagaacacaaattactacaactcagtacctctgtcttactctgcccaatttcaatttagtaatggcaccattattcttaattcccttaatgtctgtccgctgtatccaattggcacagattttccccttcatcttcaattactagtagctacccccatcaattcaccttcctcaagagtctcaattgaaaataatctttgatgatacaatctctgcttttgccacaggtttgacattaactagacgtttctgcccctgtgctcattaccctcccaaaacaatagtttttttaatgaattgaaacacaattagatccattcctgagttttcatttttaactatttactttgtgtcagttggtttctgcatcacaagggcattctcttacaaaacaactcacaacagaaaaaaaaagtcaagacaaaaaatatatatatatagtattgacatggagatttctttcacttttttagtcttagtatgatcatctatttttatatctatgtatatataaatcacagattttaacttcttaattccaagctcagggttgacacacctttgtaagaaaatgttttgtcaaccagctcttcttgttttgtgctgctcaaagaagggattcctcagtgatcggtgagcaccaagaatcaagaaagagaactttttatgtatctaactgtccatttattaaaaatttgccagggcacacccttctgcatgagtgtgcttcagcctgggtgctccagactacaccaaactcatgggatgagccattggtgtgcagggctttaccggtgatggaaactgtatgtgtaaagaatgttattcatgaaaaaccattgctttcatgtaaaacaccttcggcctaggattcctgcctggcacttggatacattacctaactcaataggccagtttagagccacagcctaacctgttcaccaagtaggccaaagccaggcctttcgctccccctgacagagagaagcaaaataaacccaactgggggctttatgaatacagttggctatccatatgtttcttagtttttatgatgcatctggagtagggaaaagtaatgtttcaagacaccatagtaggccagttacattttaattaactcatcgacagtattgacacgtaaatggtatttttcaatctgttctcatcaaaattaaaattagttattgatttagtcatcacatttaagtagaacacatgtggcacaatagtattaagtatatttgagcacttttgcaagacagaaagtatttacaagcatctattgctactttatgcctaatgaaatataaaatgtaggatgatgagagactttgtggcattctttcatttaaacctttatgaaattaaccatctagttcatcattacatactcctagaaaaccatccatttcactgcccacattttggcttcctaccacaaattccacataagacttctctatgaaggaccagtcatttacattgctcatttcattctgtgttcagaagtcagtattgtctttctccaataattaaggtgcaatacaaattaaatcaaccttgattttccagactatttgaataataacttgcttttatggctttaaactccaggtctttcctttttaaaatatttctgcattctcttttatgaactagatcaggatgccttgtttttcctgtgctttcacccccaaaaggttttgtgcatgtgtatgaatacacataatattagtgaatgtgaacccatgttctatacgcactaaacacacagttaatatataaacgcctgcttcatttgtttcaacaccttcattatcaatatgattcatattgatgagatatagtgatgcataatgagccaggcagagagctgaaatgatatcagttaatgatgtcacagtgttagcaccctgcatggatgtggtcaaaatatcattcaagttgtacttcctagtttttatcatcatactactatgtcatatgattttcagactaatttaacatgagaaatgttttggccctaaaggatttcacttaacctagttaccctatttcagtaagtattttggaattcaaccctcgaattattttttctcatttcagcatagtgataggggatgcaatgaggcttcattattttttatgacctgcccctcatttgctctgatgttccctaaattctgtaatcatatcataacttttgttatgaatagagaggaatgggctcactgaaacctgacactagaaattggtgggtgatgctcataactgcaaacacttagcttattgaagtgcctctatttacatgttctttagttataatatgtatttttctaacagaaatacacgtctgtaattggtatatattatactttgtatgtgtcacaacaaaagctaaacagaggctaaagtctttagcagagaagaatgaattacaaatttaccaataagagctctgtttatggttctgtattgaaggacaaccatgacaaccttctgtcattttcacgaaggccaagttggtactttgattatagccatcgtagaacattagcactagaaatctgtctcccttacaatgacttacctagctagcatcaagtaacttgtatcacctgctttaaatgtaagggatagaaaatactattttgtctacactgaaaaacattattattcattgataagtagtaataattataaaagtaacattctttaaagcaaacacattgaaaatattattacaggcagaaccctgatttttaatttatattccctgctgcagacattagccttctttaattcttttgccattacatacatgtttcggctacagactgaacacgaactaaagtccctaaggaggaaaaaaccttaacatattcctgagatgtgattcttttattacttctttttgcaaagctaattatcaaatgatttgattaaacctagacgcattaggaaatgcaagttttacctaaaacttgcagaaatttaaacacatttccatttacttactaacgaacagacctgatttttatttaaaaacacaatttagctttgccaacagaagagtaaaggaaaccataacttataaatttgtaatgtgttcctccttgttggagacattagccagtgtttagttttagaccaacttatacaaagagagtattgatttgtacacattctggagacttgctatatcatggtttgctatggcacagactcagcttagcatggggacattttgaacttcattcaaagttgagtagttactggaacctttgacattgccttgtaatgaggtacttccaaaaaaagacccctaacaatggcataatagtgaggtctctctgtgcatatacataatatatatgcaggataaatgtgtgcaccaatcaaatctaaaattttatgtgactgtcaaatgaatattatttgggttaagatttttcatttctgatttggatagaaaattgctattaatcttgtattaaaatagtttttaaaaatcta

SEQ ID NO: 8722 - DNA, 792 bp, Homo sapiens
  source 1..792: mol_type = unassigned DNA; mol_type = unassigned DNA
gatgcaatgctcttggtggcagagcgactggaggggccattcaacattgagtcggtcatggacccgatagatgtcaagatttctgaagccattatgaacatgcaagaaaacagcatgcaggtgtctgcaaaggtctttcagggatgtggtcagcccaaacctgctccagccctcagatctgcccgctcagctcctgaaaattttaatacacgtttcaggccctacaatcctgaggaaagaccaacaactgctgcaggcacaagcttggaccggctggtcacagacataaaagagaaattgaagctctctaaaaaggtctggtcagcattaccctacactatctgcaaggacgagagcgtgacagcgggcacgtccaacgaggaggaatgctggaacgggcacagcaaagccagatacttgcctgagatcatgaatgatgggctcaccaaccagatcaacaatcccgaggtggatgtggacatcactcggcctgacactttcatcagacagcagattatggctctccgtgtgatgaccaacaaactaaaaaacgcctacaatggcaatgatgtcaatttccaggacacaagtgatgaatccagtggctcagggagtggcagtgggtgcatggatgacgtgtgtcccacggagtttgagtttgtcaccacagaggcccccgcagtggatcccgaccggagagaggtggactcttctgcagcccagcgtggccactccctgctctcctggtctctcacctgcattgtcctggcactgcagagactgtgcagataa

SEQ ID NO: 8723 - DNA, 5489 bp, Homo sapiens
  source 1..5489: mol_type = unassigned DNA; mol_type = unassigned DNA
agtttggtctggagcagctgaaaccggtttgagcgtggctgcttcctgccgctcgacgccgcggcaggccgcctggggggagcgctggcgaggcacggacggcgggcgcccggtacctctgcccgcggtcctcgctctcgggcggggcggcggcgacgcggacctgcggactagcgaacccggagcacgacatcataaaataaatccatcagaatgacaccttctcaggttgcctttgaaataagaggaactcttttaccaggagaagtttttgcgatatgtggaagctgtgatgctttgggaaactggaatcctcaaaatgctgtggctcttcttccagagaatgacacaggtgaaagcatgctatggaaagcaaccattgtactcagtagaggagtatcagttcagtatcgctacttcaaagggtactttttagaaccaaagactatcggtggtccatgtcaagtgatagttcacaagtgggagactcatctacaaccacgatcaataacccctttagaaagcgaaattattattgacgatggacaatttggaatccacaatggtgttgaaactctggattctggatggctgacatgtcagactgaaataagattacgtttgcattattctgaaaaacctcctgtgtcaataaccaagaaaaaattaaaaaaatctagatttagggtgaagctgacactagaaggcctggaggaagatgacgatgatagggtatctcccactgtactccacaaaatgtccaatagcttggagatatccttaataagcgacaatgagttcaagtgcaggcattcacagccggagtgtggttatggcttgcagcctgatcgttggacagagtacagcatacagacgatggaaccagataacctggaactaatctttgattttttcgaagaagatctcagtgagcacgtagttcagggtgatgcccttcctggacatgtgggtacagcttgtctcttatcatccaccattgctgagagtggaaagagtgctggaattcttactcttcccatcatgagcagaaattcccggaaaacaataggcaaagtgagagttgactatataattattaagccattaccaggatacagttgtgacatgaaatcttcattttccaagtattggaagccaagaataccattggatgttggccatcgaggtgcaggaaactctacaacaactgcccagctggctaaagttcaagaaaatactattgcttctttaagaaatgctgctagtcatggtgcagcctttgtagaatttgacgtacacctttcaaaggactttgtgcccgtggtatatcatgatcttacctgttgtttgactatgaaaaagaaatttgatgctgatccagttgaattatttgaaattccagtaaaagaattaacatttgaccaactccagttgttaaagctcactcatgtgactgcactgaaatctaaggatcggaaagaatctgtggttcaggaggaaaattccttttcagaaaatcagccatttccttctcttaagatggttttagagtctttgccagaagatgtagggtttaacattgaaataaaatggatctgccagcaaagggatggaatgtgggatggtaacttatcaacatattttgacatgaatctgtttttggatataattttaaaaactgttttagaaaattctgggaagaggagaatagtgttttcttcatttgatgcagatatttgcacaatggttcggcaaaagcagaacaaatatccgatactatttttaactcaaggaaaatctgagatttatcctgaactcatggacctcagatctcggacaacccccattgcaatgagctttgcacagtttgaaaatctactggggataaatgtacatactgaagacttgctcagaaacccatcctatattcaagaggcaaaagctaagggactagtcatattctgctggggtgatgataccaatgatcctgaaaacagaaggaaattgaaggaacttggagttaatggtctaatttatgataggatatatgattggatgcctgaacaaccaaatatattccaagtggagcaattggaacgcctgaagcaggaattgccagagcttaagagctgtttgtgtcccactgttagccgctttgttccctcatctttgtgtggggagtctgatatccatgtggatgccaacggcattgataacgtggagaatgcttagtttttattgcacagaggtcattttgggggcgtgcaccgctgttctgggtattcatttttcatcactgagcattgttgatctatgccttttgggcttctcagttcaatgaagcaataatgaagtatttaactctttcactacagttcttgcaagtatgctatttaaattacttggccaggtataattgccagtcagtctctttatagtgagaaaatttattggttagtaatataaatattttaaactaaatatataaatctataatgttaaacatatgttcattaaaagcatagcactttgaaattaactatataaatagctcatatttacacttacagcttttcatttgatcaggtctgaaatctttagcacttaaggaaaatgactatgcataattatacctgaccatgaaaaaaataagtacctcaaatgcatgcatttgcactggtgattccaactgcacaaatctttgtgccatcttgtatataggtattttttacatgggttgacatgcacacaacaccattttcattcagtatgaaccttgaggctgctgccatttttccacttaaccaaaccagcctgaaggtgaacctcgaaacttgtttcataaatctttcaaaagttgttttacatcaatgttaaaatttcaaaatgctgcagggtaatttaatgtataaaatattagtaagaaaaagtatgtattgcatacttagtagaatagatcacaacatacaaattcaattcagtgcatgctttaggtgttaagcatgagattgtacatgtttactgttaggtccttgcatctgtggtgctaggtgagtatgagaagatgtcaaggactggacgtattttgttgcctaaaaaaaaaaggctgtttgtaggcgttttaaatatgcttattttgtgtgtctctcactacctattacacactgttgctttgtgggtttgttttgtatgtgcgtgtgttatacagtagttaaatttccatgcagaaaaataaatgtcctgaattttcatattagtattctttattgtatatcatgcatgtaatttatttagaaatgtaggtcttactaaatgtatatgcatgtatttcagattatactaggatttcttggattagaagcagattgtgttaactgtaacttaaagaatgaatgttaaataaaatgatacagatttattttcttcattacaaaatgaaatttcaagaaggtgttacttttgtagaatggttttataatatgacaagaaattttaatatagtgtctaccctaaagggatggcttatttgcatctaccttttactgcatgtttttcacaaggcagtttattcatatattgacatattttggtagtagctgagaacctaagacttgaaattatacattgtgtagtattttttaagctaagcaatgcaattttggtcagatcttatttgtgtgaagataggctctgaaatcctatggtattgcgtttgtaacgttgatattaatgcaaaatagtttaggaaatggagtcttctgcaagggttctgtatacttttcccacattgtatgagattttccaaaattttggtgtgaattgggcacttttggaaaactcctgaaaaagaattagtttccttcatctgcagacctttgtccaatacggttaccatttctttatagtaactcgattagccatatatgtttgtttctagtcctgctcctttgctcctctcctatgccttcccagtgctggctccattttgaagactcaaggacagaggggaagcagatcataaagagaaaaaggagacagaagaaaggatgaaggaaggaggtcatggggagtgtggcttctgagcagtttagttgctggggagagcagacagtcactgcctacaatacagacagaaccttcctgctcactttctgtcctatctcttcctgaccttatgaaccagtgttagtagatgattaaaacatgacaagcaatggctccttattttcacaggactaagtccgggccttcgtatcactagctgttgccttttacaccctgcttcagccaccctgtccctgtcattggccctggacttcctctctgtgcccgtgtgtcctctgcctgggagccctctcctcccatagtcactttctctctgccaaactcatttcttcttgtgcccaagacctctctcctgagcccttgtggaaacttcaggaaggatgaatccgtctttgtgctccacggctcgtaccttgatcaggctgtgcatcacagtaattctgttctaggtaggcagagttgatctttgtctcatctgccaggctgcaggctcttcaagggcagggaccttgtcatagtcatttttattttcacagtgcttggaacatggtggaaaatgaatgttggaattattggagtaatataatttgtatcaaatgtccttttgaattaagagatttagttatgtttactaagaatgtaaactttgaattggtttgcattttaacaattaggatggtttattgatgtgaattttgaaatgtagaggtataatgttaaattattttatactttatggaaatcaagtgaaatgtttgaaaaaatgccgccattatcctctggtattttctactctctggaattatgtgctgtaaatgatcggctgtaaatgtgaggcacaccacccacccctgtgtggaaagtgttgtggcgcttcctgccacccacccacctctctgccgttgctccttgtgacacttgtctgtcgtctcccatccaaactccaagcttacagctacctcagtactgctttgcttgtctgaaacacctcctttgccttccttcagtgtcccgctcaggtgcagcctcctccctaaagctcatctcagcttttgatctgaatgatgatggaaacatgcagacagcctctcagtcttactatttaatgttgtagctgggaaaaaacccagagaggttaactgatatactgggttgggactaggatgtgggttttgtgactctgaatcccatgttctcaaactacgctgccttccgaagtctggcatttgttagctcatgcttccttgtagtccagcttcttatgtgcctgttatattctccagtaagattgtaagccccttaagggcagggacgtctttgcatctctagcactgctatagtgttctatccttagttatgaactagataaataaatggtggtggcaacaatcctagtttcctaactcagattgtttcacgataaa

SEQ ID NO: 8724 - DNA, 4015 bp, Homo sapiens
  source 1..4015: mol_type = unassigned DNA; mol_type = unassigned DNA
ttgtgacatgaaatcttcattttccaagtattggaagccaagaataccattggatgttggccatcgaggtgcaggaaactctacaacaactgcccagctggctaaagttcaagaaaatactattgcttctttaagaaatgctgctagtcatggtgcagcctttgtagaatttgacgtacacctttcaaaggactttgtgcccgtggtatatcatgatcttacctgttgtttgactatgaaaaagaatctgtggttcaggaggaaaattccttttcagaaaatcagccatttccttctcttaagatgggttcggcaaaagcagaacaaatatccgatactatttttaactcaaggaaaatctgagatttatcctgaactcatggacctcagatctcggacaacccccattgcaatgagctttgcacagtttgaaaatctactggggataaatgtacatactgaagacttgctcagaaacccatcctatattcaagaggcaaaagctaagggactagtcatattctgctggggtgatgataccaatgatcctgaaaacagaaggaaattgaaggaacttggagttaatggtctaatttatgataggatatatgattggatgcctgaacaaccaaatatattccaagtggagcaattggaacgcctgaagcaggaattgccagagcttaagagctgtttgtgtcccactgttagccgctttgttccctcatctttgtgtggggagtctgatatccatgtggatgccaacggcattgataacgtggagaatgcttagtttttattgcacagaggtcattttgggggcgtgcaccgctgttctgggtattcatttttcatcactgagcattgttgatctatgccttttgggcttctcagttcaatgaagcaataatgaagtatttaactctttcactacagttcttgcaagtatgctatttaaattacttggccaggtataattgccagtcagtctctttatagtgagaaaatttattggttagtaatataaatattttaaactaaatatataaatctataatgttaaacatatgttcattaaaagcatagcactttgaaattaactatataaatagctcatatttacacttacagcttttcatttgatcaggtctgaaatctttagcacttaaggaaaatgactatgcataattatacctgaccatgaaaaaaataagtacctcaaatgcatgcatttgcactggtgattccaactgcacaaatctttgtgccatcttgtatataggtattttttacatgggttgacatgcacacaacaccattttcattcagtatgaaccttgaggctgctgccatttttccacttaaccaaaccagcctgaaggtgaacctcgaaacttgtttcataaatctttcaaaagttgttttacatcaatgttaaaatttcaaaatgctgcagggtaatttaatgtataaaatattagtaagaaaaagtatgtattgcatacttagtagaatagatcacaacatacaaattcaattcagtgcatgctttaggtgttaagcatgagattgtacatgtttactgttaggtccttgcatctgtggtgctaggtgagtatgagaagatgtcaaggactggacgtattttgttgcctaaaaaaaaaaggctgtttgtaggcgttttaaatatgcttattttgtgtgtctctcactacctattacacactgttgctttgtgggtttgttttgtatgtgcgtgtgttatacagtagttaaatttccatgcagaaaaataaatgtcctgaattttcatattagtattctttattgtatatcatgcatgtaatttatttagaaatgtaggtcttactaaatgtatatgcatgtatttcagattatactaggatttcttggattagaagcagattgtgttaactgtaacttaaagaatgaatgttaaataaaatgatacagatttattttcttcattacaaaatgaaatttcaagaaggtgttacttttgtagaatggttttataatatgacaagaaattttaatatagtgtctaccctaaagggatggcttatttgcatctaccttttactgcatgtttttcacaaggcagtttattcatatattgacatattttggtagtagctgagaacctaagacttgaaattatacattgtgtagtattttttaagctaagcaatgcaattttggtcagatcttatttgtgtgaagataggctctgaaatcctatggtattgcgtttgtaacgttgatattaatgcaaaatagtttaggaaatggagtcttctgcaagggttctgtatacttttcccacattgtatgagattttccaaaattttggtgtgaattgggcacttttggaaaactcctgaaaaagaattagtttccttcatctgcagacctttgtccaatacggttaccatttctttatagtaactcgattagccatatatgtttgtttctagtcctgctcctttgctcctctcctatgccttcccagtgctggctccattttgaagactcaaggacagaggggaagcagatcataaagagaaaaaggagacagaagaaaggatgaaggaaggaggtcatggggagtgtggcttctgagcagtttagttgctggggagagcagacagtcactgcctacaatacagacagaaccttcctgctcactttctgtcctatctcttcctgaccttatgaaccagtgttagtagatgattaaaacatgacaagcaatggctccttattttcacaggactaagtccgggccttcgtatcactagctgttgccttttacaccctgcttcagccaccctgtccctgtcattggccctggacttcctctctgtgcccgtgtgtcctctgcctgggagccctctcctcccatagtcactttctctctgccaaactcatttcttcttgtgcccaagacctctctcctgagcccttgtggaaacttcaggaaggatgaatccgtctttgtgctccacggctcgtaccttgatcaggctgtgcatcacagtaattctgttctaggtaggcagagttgatctttgtctcatctgccaggctgcaggctcttcaagggcagggaccttgtcatagtcatttttattttcacagtgcttggaacatggtggaaaatgaatgttggaattattggagtaatataatttgtatcaaatgtccttttgaattaagagatttagttatgtttactaagaatgtaaactttgaattggtttgcattttaacaattaggatggtttattgatgtgaattttgaaatgtagaggtataatgttaaattattttatactttatggaaatcaagtgaaatgtttgaaaaaatgccgccattatcctctggtattttctactctctggaattatgtgctgtaaatgatcggctgtaaatgtgaggcacaccacccacccctgtgtggaaagtgttgtggcgcttcctgccacccacccacctctctgccgttgctccttgtgacacttgtctgtcgtctcccatccaaactccaagcttacagctacctcagtactgctttgcttgtctgaaacacctcctttgccttccttcagtgtcccgctcaggtgcagcctcctccctaaagctcatctcagcttttgatctgaatgatgatggaaacatgcagacagcctctcagtcttactatttaatgttgtagctgggaaaaaacccagagaggttaactgatatactgggttgggactaggatgtgggttttgtgactctgaatcccatgttctcaaactacgctgccttccgaagtctggcatttgttagctcatgcttccttgtagtccagcttcttatgtgcctgttatattctccagtaagattgtaagccccttaagggcagggacgtctttgcatctctagcactgctatagtgttctatccttagttatgaactagataaataaatggtggtggcaacaa

SEQ ID NO: 8725 - DNA, 6649 bp, Homo sapiens
  source 1..6649: mol_type = unassigned DNA; mol_type = unassigned DNA
aacaacagtttttaattgcctcttaaaataaactttattagaaatatttacctagatatttttgttttcttgggttagattagtttattatgaaatattcactttcatttggaatggttaggaagtttataagataccattcttcttgactgagcatccatagctctatttgtttacttgctcaggcttaacgaacatttgaagaaaaaattaatccaaaacaaagattcttaaatttttaactttgaatattaatagagtaagttattctattttttcttttcttcttaatttttttaagagaaattggtaaatacttgaataaacttgtatgaatgaattcaaatttcttaaattccctattggctatgctagaattgctacttggaaagttttcttttttttttttgtctttttttttttgtaagttgttttcttttaaacacattaacttttcttatgcttaaatatggcatttctcttcatacaagtatttttgaatttcttagtccatattgaaaatcgaatttgaagttcacttcacatacattaaattacccacatgtattcatctgtaaattgactcagtgctgagaaatgtatcttttagtttctaggtaaagttaaaattgaaagataactggatgccagttttctggtttaaattagaaagcagtgggagtttctgctttatcctggagtaaggacacatctcatttaaacagtatctcattccatcctctttattggattttctttttgtatgttttaatacatttttgatagtgtatttaggatttttatgagagtatacttaaaattataatattcccatactgaggttggaacttactaggtattgaatgttttaaaaaattgtattttaaagcatcttgcagttaaatatattttattatgagaagtgggatgattttgtttctatcttttagaaaggaatgtatacttttgagaaatataacttttgaacttaaaagctgtgtgaaacttaccagagaatctttactaggaactgtcacatccattttgcaagtatttcagactaacgtttaaagtaaactgggaagggaagtaggccaggaagataaattgtattttactcaaagggtggggttttacagcttttctcattgagttgaaatttctgttaggagaaggggttgtgctagcgtttattcttttggtagttcctcacagctctgtacatacaggtaagttcacgctgttcgtaaagcttttaactggcagtagtgaatagttgggatatgaggagaattacatttgagacaagttcagaatatgcactacataagaataagcattttaattgtgccaagacctttggtttgaaaatcaagaaggagttatcgttgtccagcaacctgtgagtcttgtacattggttagtgtagaagttaatcccagtgcctctagagcacctttctgaagagttttctttttcttctttttaacataatggacaatcaacgaagtatgtaagaaccattactgtttgctagcctcctttaaagggaattctttattgagggctacaataaatatgcttattcaccttgggctgcttttaagctgtagatttaatattataaacgatctttaaggtgggtaatttctcagttgttcactgggtatgcatcaagagttttaactaaattttctattttccttaaattctagaaagcgaaattattattgacgatggacaatttggaatccacaatggtgttgaaactctggattctggatggctgacatgtcagactgaaataagattacgtttgcattattctgaaaaacctcctgtgtcaataaccaagaaaaaattaaaaaaatctagatttagggtgaagctgacactagaaggcctggaggaagatgacgatgatagggtatctcccactgtactccacaaaatgtccaatagcttggagatatccttaataagcgacaatgagttcaagtgcaggcattcacagccggagtgtggttatggcttgcagcctgatcgttggacagagtacagcatacagacgatggaaccagataacctggaactaatctttgattttttcgaagaagatctcagtgagcacgtagttcagggtgatgcccttcctggacatgtgggtacagcttgtctcttatcatccaccattgctgagagtggaaagagtgctggaattcttactcttcccatcatgagcagaaattcccggaaaacaataggcaaagtgagagttgactatataattattaagccattaccaggatacagttgtgacatgaaatcttcattttccaagtattggaagccaagaataccattggatgttggccatcgaggtgcaggaaactctacaacaactgcccagctggctaaagttcaagaaaatactattgcttctttaagaaatgctgctagtcatggtgcagcctttgtagaatttgacgtacacctttcaaaggactttgtgcccgtggtatatcatgatcttacctgttgtttgactatgaaaaagaaatttgatgctgatccagttgaattatttgaaattccagtaaaagaattaacatttgaccaactccagttgttaaagctcactcatgtgactgcactgaaatctaaggatcggaaagaatctgtggttcaggaggaaaattccttttcagaaaatcagccatttccttctcttaagatggttttagagtctttgccagaagatgtagggtttaacattgaaataaaatggatctgccagcaaagggatggaatgtgggatggtaacttatcaacatattttgacatgaatctgtttttggatataattttaaaaactgttttagaaaattctgggaagaggagaatagtgttttcttcatttgatgcagatatttgcacaatggttcggcaaaagcagaacaaatatccgatactatttttaactcaaggaaaatctgagatttatcctgaactcatggacctcagatctcggacaacccccattgcaatgagctttgcacagtttgaaaatctactggggataaatgtacatactgaagacttgctcagaaacccatcctatattcaagaggcaaaagctaagggactagtcatattctgctggggtgatgataccaatgatcctgaaaacagaaggaaattgaaggaacttggagttaatggtctaatttatgataggatatatgattggatgcctgaacaaccaaatatattccaagtggagcaattggaacgcctgaagcaggaattgccagagcttaagagctgtttgtgtcccactgttagccgctttgttccctcatctttgtgtggggagtctgatatccatgtggatgccaacggcattgataacgtggagaatgcttagtttttattgcacagaggtcattttgggggcgtgcaccgctgttctgggtattcatttttcatcactgagcattgttgatctatgccttttgggcttctcagttcaatgaagcaataatgaagtatttaactctttcactacagttcttgcaagtatgctatttaaattacttggccaggtataattgccagtcagtctctttatagtgagaaaatttattggttagtaatataaatattttaaactaaatatataaatctataatgttaaacatatgttcattaaaagcatagcactttgaaattaactatataaatagctcatatttacacttacagcttttcatttgatcaggtctgaaatctttagcacttaaggaaaatgactatgcataattatacctgaccatgaaaaaaataagtacctcaaatgcatgcatttgcactggtgattccaactgcacaaatctttgtgccatcttgtatataggtattttttacatgggttgacatgcacacaacaccattttcattcagtatgaaccttgaggctgctgccatttttccacttaaccaaaccagcctgaaggtgaacctcgaaacttgtttcataaatctttcaaaagttgttttacatcaatgttaaaatttcaaaatgctgcagggtaatttaatgtataaaatattagtaagaaaaagtatgtattgcatacttagtagaatagatcacaacatacaaattcaattcagtgcatgctttaggtgttaagcatgagattgtacatgtttactgttaggtccttgcatctgtggtgctaggtgagtatgagaagatgtcaaggactggacgtattttgttgcctaaaaaaaaaaggctgtttgtaggcgttttaaatatgcttattttgtgtgtctctcactacctattacacactgttgctttgtgggtttgttttgtatgtgcgtgtgttatacagtagttaaatttccatgcagaaaaataaatgtcctgaattttcatattagtattctttattgtatatcatgcatgtaatttatttagaaatgtaggtcttactaaatgtatatgcatgtatttcagattatactaggatttcttggattagaagcagattgtgttaactgtaacttaaagaatgaatgttaaataaaatgatacagatttattttcttcattacaaaatgaaatttcaagaaggtgttacttttgtagaatggttttataatatgacaagaaattttaatatagtgtctaccctaaagggatggcttatttgcatctaccttttactgcatgtttttcacaaggcagtttattcatatattgacatattttggtagtagctgagaacctaagacttgaaattatacattgtgtagtattttttaagctaagcaatgcaattttggtcagatcttatttgtgtgaagataggctctgaaatcctatggtattgcgtttgtaacgttgatattaatgcaaaatagtttaggaaatggagtcttctgcaagggttctgtatacttttcccacattgtatgagattttccaaaattttggtgtgaattgggcacttttggaaaactcctgaaaaagaattagtttccttcatctgcagacctttgtccaatacggttaccatttctttatagtaactcgattagccatatatgtttgtttctagtcctgctcctttgctcctctcctatgccttcccagtgctggctccattttgaagactcaaggacagaggggaagcagatcataaagagaaaaaggagacagaagaaaggatgaaggaaggaggtcatggggagtgtggcttctgagcagtttagttgctggggagagcagacagtcactgcctacaatacagacagaaccttcctgctcactttctgtcctatctcttcctgaccttatgaaccagtgttagtagatgattaaaacatgacaagcaatggctccttattttcacaggactaagtccgggccttcgtatcactagctgttgccttttacaccctgcttcagccaccctgtccctgtcattggccctggacttcctctctgtgcccgtgtgtcctctgcctgggagccctctcctcccatagtcactttctctctgccaaactcatttcttcttgtgcccaagacctctctcctgagcccttgtggaaacttcaggaaggatgaatccgtctttgtgctccacggctcgtaccttgatcaggctgtgcatcacagtaattctgttctaggtaggcagagttgatctttgtctcatctgccaggctgcaggctcttcaagggcagggaccttgtcatagtcatttttattttcacagtgcttggaacatggtggaaaatgaatgttggaattattggagtaatataatttgtatcaaatgtccttttgaattaagagatttagttatgtttactaagaatgtaaactttgaattggtttgcattttaacaattaggatggtttattgatgtgaattttgaaatgtagaggtataatgttaaattattttatactttatggaaatcaagtgaaatgtttgaaaaaatgccgccattatcctctggtattttctactctctggaattatgtgctgtaaatgatcggctgtaaatgtgaggcacaccacccacccctgtgtggaaagtgttgtggcgcttcctgccacccacccacctctctgccgttgctccttgtgacacttgtctgtcgtctcccatccaaactccaagcttacagctacctcagtactgctttgcttgtctgaaacacctcctttgccttccttcagtgtcccgctcaggtgcagcctcctccctaaagctcatctcagcttttgatctgaatgatgatggaaacatgcagacagcctctcagtcttactatttaatgttgtagctgggaaaaaacccagagaggttaactgatatactgggttgggactaggatgtgggttttgtgactctgaatcccatgttctcaaactacgctgccttccgaagtctggcatttgttagctcatgcttccttgtagtccagcttcttatgtgcctgttatattctccagtaagattgtaagccccttaagggcagggacgtctttgcatctctagcactgctatagtgttctatccttagttatgaactagataaataaatggtggtggcaacaa

SEQ ID NO: 8726 - DNA, 633 bp, Homo sapiens
  source 1..633: mol_type = unassigned DNA; mol_type = unassigned DNA
aggaggccatcttttctctgctgatgggtagtgccagtgtcaggtcaccagaggctctttcagagttctccactctggacgtgtctgacgttattgagcagctttagagtagttcccacgctggatatatgattggatgcctgaacaaccaaatatattccaagtggagcaattggaacgcctgaagcaggaattgccagagcttaagagctgtttgtgtcccactgttagccgctttgttccctcatctttgtgtggggagtctgatatccatgtggatgccaacggcattgataacgtggagaatgcttagtttttattgcacagaggtcattttgggggcgtgcaccgctgttctgggtattcatttttcatcactgagcattgttgatctatgccttttgggcttctcagttcaatgaagcaataatgaagtatttaactctttcactacagttcttgcaagtatgctatttaaattacttggccaggtataattgccagtcagtctctttatagtgagaaaatttattggttagtaatataaatattttaaactaaatatataaatctataatgttaaacatatgttcattaaaagcatagcactttgaaattaactatataaatagc

SEQ ID NO: 8727 - DNA, 571 bp, Homo sapiens
  source 1..571: mol_type = unassigned DNA; mol_type = unassigned DNA
agaaaatactattgcttctttaagaaatgctgctagtcatggtgcagcctttgtagaatttgacgtacacctttcaaaggactttgtgcccgtggtatatcatgatcttacctgttgtttgactatgaaaaagctgtcttcagcgctacagctttctgccagctgcattttccttccagaaatttgatgctgatccagttgaattatttgaaattccagtaaaagaattaacatttgaccaactccagttgttaaagctcactcatgtgactgcactgaaatctaaggatcggaaagaatctgtggttcaggaggaaaattccttttcagaaaatcagccatttccttctcttaagatggttttagagtctttgccagaagatgtagggtttaacattgaaataaaatggatctgccagcaaagggatggaatgtgggatggtaacttatcaacatattttgacatgaatctgtttttggatataattttaaaaactgttttagaaaattctgggaagaggagaatagtgttttcttcatttgatgcagatatttgcacaatggttcggca

SEQ ID NO: 8728 - DNA, 342 bp, Homo sapiens
  source 1..342: mol_type = unassigned DNA; mol_type = unassigned DNA
tcacagccatagtcatattttggggatgtcaaaactggcctcagaatacagaataagtaccatttcccattgttgaaagtacactttgcttctttattacatttgtttctttatcttctctatagtctatgttaactgtatttcttcttttcaggctggctaaagttcaagaaaatactattgcttctttaagaaatgctgctagtcatggtgcagcctttgtagaatttgacgtacacctttcaaaggactttgtgcccgtggtatatcatgatcttacctgttgtttgactatgaaaaagaaatttgatgctgatccagttgaattatttgaaattccag

SEQ ID NO: 8729 - DNA, 819 bp, Homo sapiens
  source 1..819: mol_type = unassigned DNA; mol_type = unassigned DNA
cgggcgcccggtacctctgcccgcggtcctcgctctcgggcggggcggcggcgacgcggacctgcggactagcgaacccggagcacgacatcataaaataaatccatcagaatgacaccttctcaggttgcctttgaaataagaggaactcttttaccaggagaagtttttgcgatatgtggaagctgtgatgctttgggaaactggaatcctcaaaatgctgtggctcttcttccagagaatgacacaggtgaaagcatgctatggaaagcaaccattgtactcagtagaggagtatcagttcagtatcgctacttcaaagggtactttttagaaccaaagaaagcgaaattattattgacgatggacaatttggaatccacaatggtgttgaaactctggattctggatggctgacatgtcagactgaaataagattacgtttgcattattctgaaaaacctcctgtgtcaataaccaagaaaaaattaaaaaaatctagatttagggtgaagctgacactagaaggcctggaggaagatgacgatgatagggtatctcccactgtactccacaaaatgtccaatagcttggagatatccttaataagcgacaatgagttcaagtgcaggcattcacagccggagtgtggttatggcttgcagcctgatcgttggacagagtacagcatacagacgatggaaccagataacctggaactaatctttgattttttcgaagaagatctcagtgagcacgtagttcagggtgatgcccttcctggacatgtgggtacagcttgtctcttatcatccacca

SEQ ID NO: 8730 - DNA, 4193 bp, Homo sapiens
  source 1..4193: mol_type = unassigned DNA; mol_type = unassigned DNA
agcagcgctcatggcgaagaggcttaaggccacaaaaccgtgggacagcaggaggaagagaagccaggtatctccactccagctgccctgcctcagactcctcagtttcgcacgtgaggatcgtcttgcaggcactgactggagatggaatcctaaagcataggtgaagcggaaatcctccttcagggagagcccactgaggaagccagcggctagcacgaggcaggacaggatacctccctcttcgcccacggcggcctctctgtcatagtagccaccgttctgccactcatgcagctttctaagacacctctcggttccccagcgctttcagtggggcggccggccattcccgagggttgcaagaggaggcccggggtgctgagccagcctcgctgcccccgcgtagaaagccggcccgccggcgagagccagcctaaggcgcggacaaccaacgaggtgtcaggctcggcaggggattgcttctgtctggggcccggccgaggttgcgttcgtgcctcgcgcgcacacgctccgcgttcactcagccaatccggtgctactcgcgcgcccaggagcgatccgcggtcctactcaggctgggccggctccttcccgctcccaatactcagcacccgagctctcactcctcccctcactctccacgagttccacgcctaggggtgtagctccgcccttgtccccgagtccgcccccgcaacctccagagcgtgtgctatcctttcctctcagtcctgccatctagctgccttgggtctcgcgctccgcagagcgttccgacactctccggcctcgttctgccgcctccgcgcgctctccccgtgcggccaccgcgccccccaagcttgcctccttcttgccggacttggggccgcgcgccctgactccttcccctcccgcggacccgcgcactcccggcgcggcctctcccccacgcaggccaccgtgcactctgtggcctccccctccttccccgctctcctcgcgcttctctggctccctagctgtcgcgctctcctcggcgagcgcgctcccggcccgcgcgctccgggctccggtttctcccggctcctgtcagtgcggtgactgcgctgggaaacatggcgaccgagggaatgatccttactaaccacgaccatcaaatccgtgtcggagtccttacagtgagtgatagttgcttcaggaatcttgcagaagaccgcagtgggataaatctcaaagatctcgtacaagatccttctttgttgggtgggactatatcagcatacaagatagtaccagatgaaatagaagaaatcaaggaaaccctgatagattggtgtgatgaaaaggaacttaatttgatattaacaactggaggaacaggatttgcaccacgagatgtcactccagaggccacaaaagaagtaatagaacgggaagcaccagggatggccctggcaatgctgatgggatcacttaatgttacacctctgggcatgctctctaggcctgtatgtggaatcagagggaaaacgctcataattaacctgccaggtagcaagaaaggatctcaggaatgctttcaattcatactgccagctctacctcatgccattgaccttttacgtgatgccattgtaaaagtaaaggaggtgcatgatgaacttgaagatttgccttccccacctccccctctttcccctcctcctactaccagcccccataaacagacagaagacaaaggagttcaatgtgaggaagaggaagaagagaagaaagacagtggtgttgcttcaacagaagatagttcctcatcacatataactgcagcagccattgctgccaagattccagactccatcatttctcgtggtgttcaggtgctcccacgagacacagcctccctcagcactactccttcagaatcgcctcgtgctcaggctacatctcgcctctctacagcttcctgcccaacaccaaaagtccagtccaggtgcagcagcaaggagaacattctcagagccagtcacagtgctgtcgatatcaccaaggtggctagaagacatcgcatgtctccttttcctctgacatctatggacaaagcctttatcacagtcctggagatgactccggtgcttgggacagaaatcatcaattaccgagatggaatggggcgagtccttgctcaagatgtatatgcaaaagacaatttaccccccttcccagcatcagtaaaagatggctatgctgtccgagctgctgatggcccaggagatcgtttcatcattggggaatcccaagctggtgaacagccaactcagacagtaatgccaggacaagtcatgcgggttacaacaggtgctccaataccctgcggtgctgatgcagtagtacaagtggaagataccgaacttatcagggaatcagatgatggcactgaagaacttgaagtgcgaattctggtgcaagctcggccaggccaagatatcagacccatcggccatgacattaaaagaggggaatgtgttttggccaaaggaacccacatgggcccctcagagattggtcttctggcaactgtaggtgtcacagaggttgaagttaataagtttccagtggttgcagtcatgtcaacagggaatgagctgctaaatcctgaagatgacctcttaccagggaagattcgagacagcaatcgttcaactcttctagcaacaattcaggaacatggttaccccacgatcaacttgggtattgtaggagacaacccagatgacttactcaatgccttgaatgagggtatcagtcgtgctgatgtcatcatcacatcagggggtgtatccatgggggaaaaggactatctcaagcaggtgctggacattgatcttcatgctcagatccattttggcagggtttttatgaaaccaggcttgccaacaacatttgcaactttggatattgatggtgtaagaaaaataatctttgcactacctgggaatcctgtatcggctgtggtcacctgcaatctctttgttgtgcctgcactgaggaaaatgcagggcatcttggatcctcggccaaccatcatcaaagcaaggttatcatgtgatgtaaaacttgatcctcgtccagaataccatcggtgtatactaacttggcatcaccaagaaccactaccttgggcacagagtacaggtaatcaaatgagcagccgtctgatgagcatgcgcagtgccaatggattgttgatgctacctccaaagacagaacagtacgtggagctccacaaaggcgaggtggtggatgtcatggtcattggacggctatgatggtcaccagcaggagaaagctttgatgcatgtccacatatcattgactgtatcctgtaatatgcaacggcacagctagttttcccgatttggataaaagttgatctgtatagtcaacatcttgaactatatttcaaatgaatttaaatatcttttaaagaaaaaaacacctaaaaataaatcttaacagaaaattctgttctgattatatcaaggcaaatttttcctttcttgcaaattgctttgtgtgttcaatgctaggtctgatagcgatagcttttagtagacagcggtaggtgcctgcagaacttgtgtttttctcatctttaaaatacaactacttatgctcttaaatcaaggctgtctgcttatttatactagcgtaggcaacacttggatttcccttcttagtatgcttcataactgctttacagagagcttttgcttgttctttctcatgtatctcgtgtttatgtgcacagtgccaaaagaagactgactgggtggaggctctgccttgcctcaagaaccatcccctgcagagcatccagggaggtttctcgccccaatagcctcacggcacagtactcttgggcagtaactggacaccttttatttgaagaaacaaactgaagaaaaaatgcttccttaagtgctgacagcctttttaaccaatacatttaaaattgtacagaacaaaaaaataaaatcaaagactgatcttgtacagatattagtgttaccagcattcatgtggaaatcaagagcaaagacaaaataatgttaaacaattctgtaccataacattttctgtaatgatactgaaacttaatgaataaaaaaattccttgatcattattt

SEQ ID NO: 8731 - DNA, 4297 bp, Homo sapiens
  source 1..4297: mol_type = unassigned DNA; mol_type = unassigned DNA
agcagcgctcatggcgaagaggcttaaggccacaaaaccgtgggacagcaggaggaagagaagccaggtatctccactccagctgccctgcctcagactcctcagtttcgcacgtgaggatcgtcttgcaggcactgactggagatggaatcctaaagcataggtgaagcggaaatcctccttcagggagagcccactgaggaagccagcggctagcacgaggcaggacaggatacctccctcttcgcccacggcggcctctctgtcatagtagccaccgttctgccactcatgcagctttctaagacacctctcggttccccagcgctttcagtggggcggccggccattcccgagggttgcaagaggaggcccggggtgctgagccagcctcgctgcccccgcgtagaaagccggcccgccggcgagagccagcctaaggcgcggacaaccaacgaggtgtcaggctcggcaggggattgcttctgtctggggcccggccgaggttgcgttcgtgcctcgcgcgcacacgctccgcgttcactcagccaatccggtgctactcgcgcgcccaggagcgatccgcggtcctactcaggctgggccggctccttcccgctcccaatactcagcacccgagctctcactcctcccctcactctccacgagttccacgcctaggggtgtagctccgcccttgtccccgagtccgcccccgcaacctccagagcgtgtgctatcctttcctctcagtcctgccatctagctgccttgggtctcgcgctccgcagagcgttccgacactctccggcctcgttctgccgcctccgcgcgctctccccgtgcggccaccgcgccccccaagcttgcctccttcttgccggacttggggccgcgcgccctgactccttcccctcccgcggacccgcgcactcccggcgcggcctctcccccacgcaggccaccgtgcactctgtggcctccccctccttccccgctctcctcgcgcttctctggctccctagctgtcgcgctctcctcggcgagcgcgctcccggcccgcgcgctccgggctccggtttctcccggctcctgtcagtgcggtgactgcgctgggaaacatggcgaccgagggaatgatccttactaaccacgaccatcaaatccgtgtcggagtccttacagtgagtgatagttgcttcaggaatcttgcagaagaccgcagtgggataaatctcaaagatctcgtacaagatccttctttgttgggtgggactatatcagcatacaagatagtaccagatgaaatagaagaaatcaaggaaaccctgatagattggtgtgatgaaaaggaacttaatttgatattaacaactggaggaacaggatttgcaccacgagatgtcactccagaggccacaaaagaagtaatagaacgggaagcaccagggatggccctggcaatgctgatgggatcacttaatgttacacctctgggcatgctctctaggcctgtatgtggaatcagagggaaaacgctcataattaacctgccaggtagcaagaaaggatctcaggaatgctttcaattcatactgccagctctacctcatgccattgaccttttacgtgatgccattgtaaaagtaaaggaggtgcatgatgaacttgaagatttgccttccccacctccccctctttcccctcctcctactaccagcccccataaacagacagaagacaaaggagttcaatgtgaggaagaggaagaagagaagaaagacagtggtgttgcttcaacagaagatagttcctcatcacatataactgcagcagccattgctgccaagaagcatccattctacaccagtcctgctgttgtcatggcacacggtgaacagcccatccctggtctcatcaattattcccatcattcaacagatgaacggattccagactccatcatttctcgtggtgttcaggtgctcccacgagacacagcctccctcagcactactccttcagaatcgcctcgtgctcaggctacatctcgcctctctacagcttcctgcccaacaccaaaagtccagtccaggtgcagcagcaaggagaacattctcagagccagtcacagtgctgtcgatatcaccaaggtggctagaagacatcgcatgtctccttttcctctgacatctatggacaaagcctttatcacagtcctggagatgactccggtgcttgggacagaaatcatcaattaccgagatggaatggggcgagtccttgctcaagatgtatatgcaaaagacaatttaccccccttcccagcatcagtaaaagatggctatgctgtccgagctgctgatggcccaggagatcgtttcatcattggggaatcccaagctggtgaacagccaactcagacagtaatgccaggacaagtcatgcgggttacaacaggtgctccaataccctgcggtgctgatgcagtagtacaagtggaagataccgaacttatcagggaatcagatgatggcactgaagaacttgaagtgcgaattctggtgcaagctcggccaggccaagatatcagacccatcggccatgacattaaaagaggggaatgtgttttggccaaaggaacccacatgggcccctcagagattggtcttctggcaactgtaggtgtcacagaggttgaagttaataagtttccagtggttgcagtcatgtcaacagggaatgagctgctaaatcctgaagatgacctcttaccagggaagattcgagacagcaatcgttcaactcttctagcaacaattcaggaacatggttaccccacgatcaacttgggtattgtaggagacaacccagatgacttactcaatgccttgaatgagggtatcagtcgtgctgatgtcatcatcacatcagggggtgtatccatgggggaaaaggactatctcaagcaggtgctggacattgatcttcatgctcagatccattttggcagggtttttatgaaaccaggcttgccaacaacatttgcaactttggatattgatggtgtaagaaaaataatctttgcactacctgggaatcctgtatcggctgtggtcacctgcaatctctttgttgtgcctgcactgaggaaaatgcagggcatcttggatcctcggccaaccatcatcaaagcaaggttatcatgtgatgtaaaacttgatcctcgtccagaataccatcggtgtatactaacttggcatcaccaagaaccactaccttgggcacagagtacaggtaatcaaatgagcagccgtctgatgagcatgcgcagtgccaatggattgttgatgctacctccaaagacagaacagtacgtggagctccacaaaggcgaggtggtggatgtcatggtcattggacggctatgatggtcaccagcaggagaaagctttgatgcatgtccacatatcattgactgtatcctgtaatatgcaacggcacagctagttttcccgatttggataaaagttgatctgtatagtcaacatcttgaactatatttcaaatgaatttaaatatcttttaaagaaaaaaacacctaaaaataaatcttaacagaaaattctgttctgattatatcaaggcaaatttttcctttcttgcaaattgctttgtgtgttcaatgctaggtctgatagcgatagcttttagtagacagcggtaggtgcctgcagaacttgtgtttttctcatctttaaaatacaactacttatgctcttaaatcaaggctgtctgcttatttatactagcgtaggcaacacttggatttcccttcttagtatgcttcataactgctttacagagagcttttgcttgttctttctcatgtatctcgtgtttatgtgcacagtgccaaaagaagactgactgggtggaggctctgccttgcctcaagaaccatcccctgcagagcatccagggaggtttctcgccccaatagcctcacggcacagtactcttgggcagtaactggacaccttttatttgaagaaacaaactgaagaaaaaatgcttccttaagtgctgacagcctttttaaccaatacatttaaaattgtacagaacaaaaaaataaaatcaaagactgatcttgtacagatattagtgttaccagcattcatgtggaaatcaagagcaaagacaaaataatgttaaacaattctgtaccataacattttctgtaatgatactgaaacttaatgaataaaaaaattccttgatcattatttaaaaa

SEQ ID NO: 8732 - DNA, 1723 bp, Homo sapiens
  source 1..1723: mol_type = unassigned DNA; mol_type = unassigned DNA
gtgtgctatcctttcctctcagtcctgccatctagctgccttgggtctcgcgctccgcagagcgttccgacactctccggcctcgttctgccgcctccgcgcgctctccccgtgcggccaccgcgccccccaagcttgcctccttcttgccggacttggggccgcgcgccctgactccttcccctcccgcggacccgcgcactcccggcgcggcctctcccccacgcaggccaccgtgcactctgtggcctccccctccttccccgctctcctcgcgcttctctggctccctagctgtcgcgctctcctcggcgagcgcgctcccggcccgcgcgctccgggctccggtttctcccggctcctgtcagtgcggtgactgcgctgggaaacatggcgaccgagggaatgatccttactaaccacgaccatcaaatccgtgtcggagtccttacagtgagtgatagttgcttcaggaatcttgcagaagaccgcagtgggataaatctcaaagatctcgtacaagatccttctttgttgggtgggactatatcagcatacaagatagtaccagatgaaatagaagaaatcaagaaattcccaacattcccattttgtgggctccagaaaggggccacaaaagaagtaatagaacgggaagcaccagggatggccctggcaatgctgatgggatcacttaatgttacacctctgggcatgctctctaggcctgtatgtggaatcagagggaaaacgctcataattaacctgccaggtagcaagaaaggatctcaggaatgctttcaattcatactgccagctctacctcatgccattgaccttttacgtgatgccattgtaaaagtaaaggaggtgcatgatgaacttgaagatttgccttccccacctccccctctttcccctcctcctactaccagcccccataaacagacagaagacaaaggagttcaatgtgaggaagaggaagaagagaagaaagacagtggtgttgcttcaacagaagatagttcctcatcacatataactgcagcagccattgctgccaagaagcatccattctacaccagtcctgctgttgtcatggcacacggtgaacagcccatccctggtctcatcaattattcccatcattcaacagatgaacggattccagactccatcatttctcgtggtgttcaggtgctcccacgagacacagcctccctcagcactactccttcagaatcgcctcgtgctcaggctacatctcgcctctctacagcttcctgcccaacaccaaaagtccagtccaggtgcagcagcaaggagaacattctcagagccagtcacagtgctgtcgatatcaccaaggtggctagaagacatcgcatgtctccttttcctctgacatctatggacaaagcctttatcacagtcctggagatgactccggtgcttgggacagaaatcatcaattaccgaggtactattatatttgaccattgccctttcttttcttcatttttttccaaataagattcatgtaacattaatgcacagttttcctgaaaaagaaagattattaaccattattacagttatcatcattctttttttttcttatttctactcaataagaaaaaggctaagggttcagccttaacagtatacagagtaaaatccatgaaactgccttttcattaaaaaaaggaaaaaaaaaaaaaaa

SEQ ID NO: 8733 - DNA, 2459 bp, Homo sapiens
  source 1..2459: mol_type = unassigned DNA; mol_type = unassigned DNA
agtgcggtgactgcgctgggaaacatggcgaccgagggaatgatccttactaaccacgaccatcaaatccgtgtcggagtccttacagtgagtgatagttgcttcaggaatcttgcagaagaccgcagtgggataaatctcaaagatctcgtacaagatccttctttgttgggtgggactatatcagcatacaagatagtaccagatgaaatagaagaaatcaaggaaaccctgatagattggtgtgatgaaaaggaacttaatttgatattaacaactggaggaacaggatttgcaccacgagatgtcactccagagaaattcccaacattcccattttgtgggctccagaaaggggccacaaaagaagtaatagaacgggaagcaccagggatggccctggcaatgctgatgggatcacttaatgttacacctctgggcatgctctctaggcctgtatgtggaatcagagggaaaacgctcataattaacctgccaggtagcaagaaaggatctcaggaatgctttcaattcatactgccagctctacctcatgccattgaccttttacgtgatgccattgtaaaagtaaaggaggtgcatgatgaacttgaagatttgccttccccacctccccctctttcccctcctcctactaccagcccccataaacagacagaagacaaaggagttcaatgtgaggaagaggaagaagagaagaaagacagtggtgttgcttcaacagaagatagttcctcatcacatataactgcagcagccattgctgccaagattccagactccatcatttctcgtggtgttcaggtgctcccacgagacacagcctccctcagcactactccttcagaatcgcctcgtgctcaggctacatctcgcctctctacagcttcctgcccaacaccaaaacaaattagacggccggatgaaagcaaaggagttgctagtagagttggatccctcaaagctcggcttccctcgtgctcatctacctatagtgtatctgaggtccagtccaggtgcagcagcaaggagaacattctcagagccagtcacagtgctgtcgatatcaccaaggtggctagaagacatcgcatgtctccttttcctctgacatctatggacaaagcctttatcacagtcctggagatgactccggtgcttgggacagaaatcatcaattaccgagatggaatggggcgagtccttgctcaagatgtatatgcaaaagacaatttaccccccttcccagcatcagtaaaagatggctatgctgtccgagctgctgatggcccaggagatcgtttcatcattggggaatcccaagctggtgaacagccaactcagacagtaatgccaggacaagtcatgcgggttacaacaggtgctccaataccctgcggtgctgatgcagtagtacaagtggaagataccgaacttatcagggaatcagatgatggcactgaagaacttgaagtgcgaattctggtgcaagctcggccaggccaagatatcagacccatcggccatgacattaaaagaggggaatgtgttttggccaaaggaacccacatgggcccctcagagattggtcttctggcaactgtaggtgtcacagaggttgaagttaataagtttccagtggttgcagtcatgtcaacagggaatgagctgctaaatcctgaagatgacctcttaccagggaagattcgagacagcaatcgttcaactcttctagcaacaattcaggaacatggttaccccacgatcaacttgggtattgtaggagacaacccagatgacttactcaatgccttgaatgagggtatcagtcgtgctgatgtcatcatcacatcagggggtgtatccatgggggaaaaggactatctcaagcaggtgctggacattgatcttcatgctcagatccattttggcagggtttttatgaaaccaggcttgccaacaacatttgcaactttggatattgatggtgtaagaaaaataatctttgcactacctgggaatcctgtatcggctgtggtcacctgcaatctctttgttgtgcctgcactgaggaaaatgcagggcatcttggatcctcggccaaccatcatcaaagcaaggttatcatgtgatgtaaaacttgatcctcgtccagaataccatcggtgtatactaacttggcatcaccaagaaccactaccttgggcacagagtacaggtaatcaaatgagcagccgtctgatgagcatgcgcagtgccaatggattgttgatgctacctccaaagacagaacagtacgtggagctccacaaaggcgaggtggtggatgtcatggtcattggacggctatgatggtcaccagcaggagaaagctttgatgcatgtccacatatcattgactgtatcctgtaatatgcaacggcacagctagttttccc

SEQ ID NO: 8734 - DNA, 550 bp, Homo sapiens
  source 1..550: mol_type = unassigned DNA; mol_type = unassigned DNA
gcggtgactgcgctgggaaacatggcgaccgagggaatgatccttactaaccacgaccatcaaatccgtgtcggagtccttacagtgagtgatagttgcttcaggaatcttgcagaagaccgcagtgggataaatctcaaagatctcgtacaagatccttctttgggataaattccaaaactgccagtgaatggctgaaaccacagatactactgaacccaagtactgcgataccacaatagctgatctgataacccagatggctggttgggtgggactatatcagcatacaagatagtaccagatgaaatagaagaaatcaaggaaaccctgatagattggtgtgatgaaaaggaacttaatttgatattaacaactggaggaacaggatttgcaccacgagatgtcactccagagaaattcccaacattcccattttgtgggctccagaaaggggccacaaaagaagtaatagaacgggaagcaccagggatggccctggcaatgctgatgggatcacttaatgttacacctctgggcatgctctcta

SEQ ID NO: 8735 - DNA, 512 bp, Homo sapiens
  source 1..512: mol_type = unassigned DNA; mol_type = unassigned DNA
gcggtgactgcgctgggaaacatggcgaccgagggaatgatccttactaaccacgaccatcaaatccgtgtcggagtccttacagtgagtgatagttgcttcaggaatcttgcagaagaccgcagtgggataaatctcaaagatctcgtacaagatccttctttgaaaccctgatagattggtgtgatgaaaaggaacttaatttgatattaacaactggaggaacaggatttgcaccacgagatgtcactccagaggccacaaaagaagtaatagaacgggaagcaccagggatggccctggcaatgctgatgggatcacttaatgttacacctctgggcatgctctctaggcctgtatgtggaatcagagggaaaacgctcataattaacctgccaggtagcaagaaaggatctcaggaatgctttcaattcatactgccagctctacctcatgccattgaccttttacgtgatgccattgtaaaagtaaaggaggtgcatgatgaactt

SEQ ID NO: 8736 - DNA, 503 bp, Homo sapiens
  source 1..503: mol_type = unassigned DNA; mol_type = unassigned DNA
gcgctgggaaacatggcgaccgagggaatgatccttactaaccacgaccatcaaatccgtgtcggagtccttacagtgagtgatagttgcttcaggaatcttgcagaagaccgcagtgggataaatctcaaagatctcgtacaagatccttctttgggataaattccaaaactgccagtgaatggctgaaaccacagatactactgaacccaagtactgcgataccacaatagctgatctgataacccagatggctggttgggtgggactatatcagcatacaagatagtaccagatgaaatagaagaaatcaaggaaaccctgatagattggtgtgatgaaaaggaacttaatttgatattaacaactggaggaacaggatttgcaccacgagatgtcactccagaggccacaaaagaagtaatagaacgggaagcaccagggatggccctggcaatgctgatgggatcacttaatgttacacctctgggcatgctctctag

SEQ ID NO: 8737 - DNA, 574 bp, Homo sapiens
  source 1..574: mol_type = unassigned DNA; mol_type = unassigned DNA
gcgctgggaaacatggcgaccgagggaatgatccttactaaccacgaccatcaaatccgtgtcggagtccttacagtagggatggagtttcaccgtgttagccaggatggtctcgatctcctgaccttgtgatccacccatctcggcctcccaaagtgctgggattacaggcgtgagccaccacgcccggccagcagtaaggtatttttaaattaagtgagtgatagttgcttcaggaatcttgcagaagaccgcagtgggataaatctcaaagatctcgtacaagatccttctttgttgggtgggactatatcagcatacaagatagtaccagatgaaatagaagaaatcaaggaaaccctgatagattggtgtgatgaaaaggaacttaatttgatattaacaactggaggaacaggatttgcaccacgagatgtcactccagaggccacaaaagaagtaatagaacgggaagcaccagggatggccctggcaatgctgatgggatcacttaatgttacacctctgggcatgctctctaggcctgtatgtggaatcagagggaaaacgctca

SEQ ID NO: 8738 - DNA, 562 bp, Homo sapiens
  source 1..562: mol_type = unassigned DNA; mol_type = unassigned DNA
agtatctgtgcttgcctggacgagactcaggtgttaatcagatgaaactgctcctcctcgggttgtccctcgcgggccgggcgtcccctcagccacccatggggcacccttcgcctccctcgggggatgggggatcggcttgcgtccggacctcggaaagtgtctgccttctgcctttccgcgcaaaaggccctctgtctgcctcgtcgtttccttagcgaggacgggctgcagcctgctgccggggatccagctttttacttgagagggcaggattcccctactcgggctcctctccccctcctttctgggaacccccaccccggtagagcgtcccgaggctgtgagtgatagttgcttcaggaatcttgcagaagaccgcagtgggataaatctcaaagatctcgtacaagatccttctttgttgggtgggactatatcagcatacaagatagtaccagatgaaatagaagaaatcaaggaaaccctgatagattggtgtgatgaaaaggaacttaatttgatattaacaactggaggaacaggatttgcaccacgagat

SEQ ID NO: 8739 - DNA, 2514 bp, Homo sapiens
  source 1..2514: mol_type = unassigned DNA; mol_type = unassigned DNA
aggttcaagtgattctcttgcctcaatctcctgagtagctgggactacaagcgcgctccaccatgcttggccaatttttgtacttttagtagagatggagttttgccatgttggccaggctgttctcaagctcctgaccttacgtgatccacccgcctcggcctcccaaagtgctgggattacaagcatgagccactcacccagctggtttttttatataccagaaagaatagagagctatttataagagaaaccctgatagattggtgtgatgaaaaggaacttaatttgatattaacaactggaggaacaggatttgcaccacgagatgtcactccagaggccacaaaagaagtaatagaacgggaagcaccagggatggccctggcaatgctgatgggatcacttaatgttacacctctgggcatgctctctaggcctgtatgtggaatcagagggaaaacgctcataattaacctgccaggtagcaagaaaggatctcaggaatgctttcaattcatactgccagctctacctcatgccattgaccttttacgtgatgccattgtaaaagtaaaggaggtgcatgatgaacttgaagatttgccttccccacctccccctctttcccctcctcctactaccagcccccataaacagacagaagacaaaggagttcaatgtgaggaagaggaagaagagaagaaagacagtggtgttgcttcaacagaagatagttcctcatcacatataactgcagcagccattgctgccaagaagcatccattctacaccagtcctgctgttgtcatggcacacggtgaacagcccatccctggtctcatcaattattcccatcattcaacagatgaacggattccagactccatcatttctcgtggtgttcaggtgctcccacgagacacagcctccctcagcactactccttcagaatcgcctcgtgctcaggctacatctcgcctctctacagcttcctgcccaacaccaaaagtccagtccaggtgcagcagcaaggagaacattctcagagccagtcacagtgctgtcgatatcaccaaggtggctagaagacatcgcatgtctccttttcctctgacatctatggacaaagcctttatcacagtcctggagatgactccggtgcttgggacagaaatcatcaattaccgagatggaatggggcgagtccttgctcaagatgtatatgcaaaagacaatttaccccccttcccagcatcagtaaaagatggctatgctgtccgagctgctgatggcccaggagatcgtttcatcattggggaatcccaagctggtgaacagccaactcagacagtaatgccaggacaagtcatgcgggttacaacaggtgctccaataccctgcggtgctgatgcagtagtacaagtggaagataccgaacttatcagggaatcagatgatggcactgaagaacttgaagtgcgaattctggtgcaagctcggccaggccaagatatcagacccatcggccatgacattaaaagaggggaatgtgttttggccaaaggaacccacatgggcccctcagagattggtcttctggcaactgtaggtgtcacagaggttgaagttaataagtttccagtggttgcagtcatgtcaacagggaatgagctgctaaatcctgaagatgacctcttaccagggaagattcgagacagcaatcgttcaactcttctagcaacaattcaggaacatggttaccccacgatcaacttgggtattgtaggagacaacccagatgacttactcaatgccttgaatgagggtatcagtcgtgctgatgtcatcatcacatcagggggtgtatccatgggggaaaaggactatctcaagcaggtgctggacattgatcttcatgctcagatccattttggcagggtttttatgaaaccaggcttgccaacaacatttgcaactttggatattgatggtgtaagaaaaataatctttgcactacctgggaatcctgtatcggctgtggtcacctgcaatctctttgttgtgcctgcactgaggaaaatgcagggcatcttggatcctcggccaaccatcatcaaagcaaggttatcatgtgatgtaaaacttgatcctcgtccagaataccatcggtgtatactaacttggcatcaccaagaaccactaccttgggcacagagtacaggtaatcaaatgagcagccgtctgatgagcatgcgcagtgccaatggattgttgatgctacctccaaagacagaacagtacgtggagctccacaaaggcgaggtggtggatgtcatggtcattggacggctatgatggtcaccagcaggagaaagctttgatgcatgtccacatatcattgactgtatcctgtaatatgcaacggcacagctagttttcccgatttggataaaagttgatctgtatagtcaacatcttgaactatatttcaaatgaatttaaatatctttt

SEQ ID NO: 8740 - DNA, 841 bp, Homo sapiens
  source 1..841: mol_type = unassigned DNA; mol_type = unassigned DNA
gaaaccctgatagattggtgtgatgaaaaggaacttaatttgatattaacaactggaggaacaggatttgcaccacgagatgtcactccagaggccacaaaagaagtaatagaacgggaagcaccagggatggccctggcaatgctgatgggatcacttaatgttacacctctgggcatgctctctaggcctgtatgtggaatcagagggaaaacgctcataattaacctgccaggtagcaagaaaggatctcaggaatgctttcaattcatactgccagctctacctcatgccattgaccttttacgtgatgccattgtaaaagtaaaggaggtgcatgatgaacttgaagatttgccttccccacctccccctctttcccctcctcctactaccagcccccataaacagacagaagacaaaggagttcaatgtgaggaagaggaagaagagaagaaagacagtggtgttgcttcaacagaagatagttcctcatcacatataactgcagcagccattgctgccaagattccagactccatcatttctcgtggtgttcaggtgctcccacgagacacagcctccctcagcactactccttcagaatcgcctcgtgctcaggctacatctcgcctctctacagcttcctgcccaacaccaaaacaaattagacggccggatgaaagcaaaggagttgctagtagagttggatccctcaaagtccagtccaggtgcagcagcaaggagaacattctcagagccagtcacagtgctgtcgatatcaccaaggtggctagaagacatcgcatgtctccttttcctctgacatctatggacaaag

SEQ ID NO: 8741 - DNA, 435 bp, Homo sapiens
  source 1..435: mol_type = unassigned DNA; mol_type = unassigned DNA
gtcacagtgctgtcgatatcaccaaggtggctagaagacatcgcatgtctccttttcctctgacatctatggacaaagcctttatcacagtcctggagatgactccggtgcttgggacagaaatcatcaattaccgagatggaatggggcgagtccttgctcaagatgtatatgcaaaagacaatttaccccccttcccagcatcagtaaaagatggctatgctgtccgagctgctgatggcccaggagatcgtttcatcattggggaatcccaagctggtgaacagccaactcagacagtaatgccaggacaagtcatgcgggttacaacaggtgctccaataccctgcggtgctgatgcagtagtacaagtggaagataccgaacttatcagggaatcagatgatgtacgtcatcaccaagtcttactgtgct

SEQ ID NO: 8742 - DNA, 493 bp, Homo sapiens
  source 1..493: mol_type = unassigned DNA; mol_type = unassigned DNA
atcagacccatcggccatgacattaaaagaggggaatgtgttttggccaaaggaacccacatgggcccctcagagattggtcttctggcaactgtaggtgtcacagaggttgaagttaataagtttccagtggttgcagtcatgtcaacagggaatgagctgctaaatcctgaagatgacctcttaccagggaagattcgagacagcaatcgttcaactcttctagcaacaattcaggaacatggttaccccacgatcaacttgggtattgtaggagacaacccagatgacttactcaatgccttgaatgagggtatcagtcgtgctgatgtcatcatcacatcagggggtgtatccatgggggaaaagcttgccaacaacatttgcaactttggatattgatggtgtaagaaaaataatctttgcactacctgggaatcctgtatcggctgtggtcacctgcaatctctttgttgtgcctgcactgaggaaa

SEQ ID NO: 8743 - DNA, 655 bp, Homo sapiens
  source 1..655: mol_type = unassigned DNA; mol_type = unassigned DNA
cacatgggcccctcagagattggtcttctggcaactgtaggtgtcacagaggttgaagttaataagtttccagtggttgcagtcatgtcaacagggaatgagctgctaaatcctgaagatgacctcttaccagggaagattcgagacagcaatcgttcaactcttctagcaacaattcaggaacatggttaccccacgatcaacttgggtattgtaggagacaacccagatgacttactcaatgccttgaatgagggtatcagtcgtgctgatgtcatcatcacatcagggggtgtatccatgggggaaaaggactatctcaagcaggtgctggacattgatcttcatgctcagatccattttggcagggtttttatgaaaccaggcttgccaacaacatttgcaactttggatattgatggtgtaagaaaaataatctttgcactacctgggaatcctgtatcggctgtggtcacctgcaatctctttgttgtgcctgcactgaggaaaatgcagggcatcttggatcctcggccaaccatcatcaaagcaagggtaatgctttctaatgaccagaaaccaaaatggaagcctggtaacagttagggatatgatttcctaactgtccaaaataaacatctagagttttctatta

SEQ ID NO: 8744 - DNA, 592 bp, Homo sapiens
  source 1..592: mol_type = unassigned DNA; mol_type = unassigned DNA
ttgccttggattcctaggacatctgactttagtactaaaacaggaatattcctaggcaaaccaggatagttagacatcctccaacatctcattgtctcctttcattatagtggcttgttagaataaaaagccctgtgaaatcgccagtagccactacttcagcatgtacaaggtcctttctccataataagacttaatgctcctgttaggcagagacccttttgattcccacttcatacagaatatagtgctgtactcatgttaatgcctattagtgaataaggcgatgtagttttaagttggcactatatctaaaatcttttccttgtgtgttaatttctttgtctttatttttttccagcccagatgacttactcaatgccttgaatgagggtatcagtcgtgctgatgtcatcatcacatcagggggtgtatccatgggggaaaaggactatctcaagcaggtgctggacattgatcttcatgctcagatccattttggcagggtttttatgaaaccaggcttgccaacaacatttgcaactttggatattgatggtgtaagaaaaataatctttgcactacctggtaa

SEQ ID NO: 8745 - DNA, 404 bp, Homo sapiens
  source 1..404: mol_type = unassigned DNA; mol_type = unassigned DNA
gattgttgatgctacctccaaagacagaacatgccaaaagaagactgactgggtggaggctctgccttgcctcaagaaccatcccctgcagagcatccagggaggtttctcgccccaatagcctcacggcacagtactcttgggcagtaactggacaccttttatttgaagaaacaaactgaagaaaaaatgcttccttaagtgctgacagcctttttaaccaatacatttaaaattgtacagaacaaaaaaataaaatcaaagactgatcttgtacagatattagtgttaccagcattcatgtggaaatcaagagcaaagacaaaataatgttaaacaattctgtaccataacattttctgtaatgatactgaaacttaatgaataaaaaaattccttgatca

SEQ ID NO: 8746 - DNA, 793 bp, Homo sapiens
  source 1..793: mol_type = unassigned DNA; mol_type = unassigned DNA
agagtgatctcttggcaatagttaagcaatcaaacggagctatagtaatggcttataaccaaagtacacaatcagtgtcaaaaagaaagacagggatgtgaacacacaggttcccaggagacgcggagccagaacttagcatgggatcccagccctgcatttctcaactttttttcagtctgtgactttggtgggatctgtctccccactctttgcctgtcctgctctgaccatcccatctgacccaggatttcatgatgtgctgggcaatgaaagaccttctgcttacatgagggagcacaatcaattaaatggctggtcttctgatgaaaatgactggaatgaaaaactctacccagtgtggaagcggggagacatgaggtggaaaaactcctggaagggaggccgtgtgcaggcggtcctgaccagtgactcaccagccctcgtgggctcaaatataacatttgcggtgaacctgatattccctagatgccaaaaggaagatgccaatggcaacatagtctatgagaagaactgcagaaatgaggctggtttatctgctgatccgtatgtttacaactggacagcatggtcagaggacagtgacggggaaaatggcaccggccaaagccatcataacgtcttccctgatgggaaaccttttcctcaccaccccggatggagaagatggaatttcatctacgtcttccacacacttggtcagtatttccagaaattgggacgatgttcagtgagagtttctgtgaacacagccaatgtgacacttgggcct

SEQ ID NO: 8747 - DNA, 721 bp, Homo sapiens
  source 1..721: mol_type = unassigned DNA; mol_type = unassigned DNA
atagtaatggcttataaccaaagtacacaatcagtgtcaaaaagaaagacagggatgtgaacacacaggttcccaggagacgcggagccagaacttagcatgggatcccagccctgcatttctcaactttttttcagtctgtgactttggtgggatctgtctccccactctttgcctgtcctgctctgaccatcccatctgacccaggtatgaacacagagtccatccacgcagtcctccccaagaggaacttggaggaagtaggggccatggatttcatgatgtgctgggcaatgaaagaccttctgcttacatgagggagcacaatcaattaaatggctggtcttctgatgaaaatgactggaatgaaaaactctacccagtgtggaagcggggagacatgaggtggaaaaactcctggaagggaggccgtgtgcaggcggtcctgaccagtgactcaccagccctcgtgggctcaaatataacatttgcggtgaacctgatattccctagatgccaaaaggaagatgccaatggcaacatagtctatgagaagaactgcagaaatgaggctggtttatctgctgatccgtatgtttacaactggacagcatggtcagaggacagtgacggggaaaatggcaccggccaaagccatcataacgtcttccctgatgggaaaccttttcctcaccaccccggatggagaagatggaatttc

SEQ ID NO: 8748 - DNA, 2862 bp, Homo sapiens
  source 1..2862: mol_type = unassigned DNA; mol_type = unassigned DNA
ttgaatctagtaaatgtggaatcacaaaattgaaataatgtgcatctgaaaagtgaataaatagatgccaagaaggagtgagtcataagcacatgagttgtaagaggttgaacttgagagaccagatcaggcagtgccgcttaataccatcacatgatcctccccgaggccctgtatttaattaaaatagagagggaggcaccacagatgccagaagaacactgttgctcttggtggacgggcccagaggaattcagagttaaaccttgagtgcctgcgtccgtgagaattcagcatggaatgtctctactatttcctgggatttctgctcctggctgcaagattgccacttgatgccgccaaacgatttcatgatgtgctgggcaatgaaagaccttctgcttacatgagggagcacaatcaattaaatggctggtcttctgatgaaaatgactggaatgaaaaactctacccagtgtggaagcggggagacatgaggtggaaaaactcctggaagggaggccgtgtgcaggcggtcctgaccagtgactcaccagccctcgtgggctcaaatataacatttgcggtgaacctgatattccctagatgccaaaaggaagatgccaatggcaacatagtctatgagaagaactgcagaaatgaggctggtttatctgctgatccgtatgtttacaactggacagcatggtcagaggacagtgacggggaaaatggcaccggccaaagccatcataacgtcttccctgatgggaaaccttttcctcaccaccccggatggagaagatggaatttcatctacgtcttccacacacttggtcagtatttccagaaattgggacgatgttcagtgagagtttctgtgaacacagccaatgtgacacttgggcctcaactcatggaagtgactgtctacagaagacatggacgggcatatgttcccatcgcacaagtgaaagatgtgtacgtggtaacagatcagattcctgtgtttgtgactatgttccagaagaacgatcgaaattcatccgacgaaaccttcctcaaagatctccccattatgtttgatgtcctgattcatgatcctagccacttcctcaattattctaccattaactacaagtggagcttcggggataatactggcctgtttgtttccaccaatcatactgtgaatcacacgtatgtgctcaatggaaccttcagccttaacctcactgtgaaagctgcagcaccaggaccttgtccgccaccgccaccaccacccagaccttcaaaacccaccccttctttaggacctgctggtgacaaccccctggagctgagtaggattcctgatgaaaactgccagattaacagatatggccactttcaagccaccatcacaattgtagagggaatcttagaggttaacatcatccagatgacagacgtcctgatgccggtgccatggcctgaaagctccctaatagactttgtcgtgacctgccaagggagcattcccacggaggtctgtaccatcatttctgaccccacctgcgagatcacccagaacacagtctgcagccctgtggatgtggatgagatgtgtctgctgactgtgagacgaaccttcaatgggtctgggacgtactgtgtgaacctcaccctgggggatgacacaagcctggctctcacgagcaccctgatttctgttcctgacagagacccagcctcgcctttaaggatggcaaacagtgccctgatctccgttggctgcttggccatatttgtcactgtgatctccctcttggtgtacaaaaaacacaaggaatacaacccaatagaaaatagtcctgggaatgtggtcagaagcaaaggcctgagtgtctttctcaaccgtgcaaaagccgtgttcttcccgggaaaccaggaaaaggatccgctactcaaaaaccaagaatttaaaggagtttcttaaatttcgaccttgtttctgaagctcacttttcagtgccattgatgtgagatgtgctggagtggctattaacctttttttcctaaagattattgttaaatagatattgtggtttggggaagttgaattttttataggttaaatgtcattttagagatggggagagggattatactgcaggcagcttcagccatgttgtgaaactgataaaagcaacttagcaaggcttcttttcattattttttatgtttcacttataaagtcttaggtaactagtaggatagaaacactgtgtcccgagagtaaggagagaagctactattgattagagcctaacccaggttaactgcaagaagaggcgggatactttcagctttccatgtaactgtatgcataaagccaatgtagtccagtttctaagatcatgttccaagctaactgaatcccacttcaatacacactcatgaactcctgatggaacaataacaggcccaagcctgtggtatgatgtgcacacttgctagactcagaaaaaatactactctcataaatgggtgggagtattttggtgacaacctactttgcttggctgagtgaaggaatgatattcatatattcatttattccatggacatttagttagtgctttttatataccaggcatgatgctgagtgacactcttgtgtatatttccaaatttttgtacagtcgctgcacatatttgaaatcatatattaagactttccaaagatgaggtccctggtttttcatggcaacttgatcagtaaggatttcacctctgtttgtaactaaaaccatctactatatgttagacatgacattctttttctctccttcctgaaaaataaagtgtgggaagagacaa

SEQ ID NO: 8749 - DNA, 2763 bp, Homo sapiens
  source 1..2763: mol_type = unassigned DNA; mol_type = unassigned DNA
tgccgcttaataccatcacatgatcctccccgaggccctgtatttaattaaaatagagagggaggcaccacagatgccagaagaacactgttgctcttggtggacgggcccagaggaattcagagttaaaccttgagtgcctgcgtccgtgagaattcagcatggaatgtctctactatttcctgggatttctgctcctggctgcaagattgccacttgatgccgccaaacgatttcatgatgtgctgggcaatgaaagaccttctgcttacatgagggagcacaatcaattaaatggctggtcttctgatgaaaatgactggaatgaaaaactctacccagtgtggaagcggggagacatgaggtggaaaaactcctggaagggaggccgtgtgcaggcggtcctgaccagtgactcaccagccctcgtgggctcaaatataacatttgcggtgaacctgatattccctagatgccaaaaggaagatgccaatggcaacatagtctatgagaagaactgcagaaatgaggctggtttatctgctgatccgtatgtttacaactggacagcatggtcagaggacagtgacggggaaaatggcaccggccaaagccatcataacgtcttccctgatgggaaaccttttcctcaccaccccggatggagaagatggaatttcatctacgtcttccacacacttggtcagtatttccagaaattgggacgatgttcagtgagagtttctgtgaacacagccaatgtgacacttgggcctcaactcatggaagtgactgtctacagaagacatggacgggcatatgttcccatcgcacaagtgaaagatgtgtacgtggtaacagatcagattcctgtgtttgtgactatgttccagaagaacgatcgaaattcatccgacgaaaccttcctcaaagatctccccattatgtttgatgtcctgattcatgatcctagccacttcctcaattattctaccattaactacaagtggagcttcggggataatactggcctgtttgtttccaccaatcatactgtgaatcacacgtatgtgctcaatggaaccttcagccttaacctcactgtgaaagctgcagcaccaggaccttgtccgccaccgccaccaccacccagaccttcaaaacccaccccttctttagcaactactctaaaatcttatgattcaaacaccccaggacctgctggtgacaaccccctggagctgagtaggattcctgatgaaaactgccagattaacagatatggccactttcaagccaccatcacaattgtagagggaatcttagaggttaacatcatccagatgacagacgtcctgatgccggtgccatggcctgaaagctccctaatagactttgtcgtgacctgccaagggagcattcccacggaggtctgtaccatcatttctgaccccacctgcgagatcacccagaacacagtctgcagccctgtggatgtggatgagatgtgtctgctgactgtgagacgaaccttcaatgggtctgggacgtactgtgtgaacctcaccctgggggatgacacaagcctggctctcacgagcaccctgatttctgttcctgacagagacccagcctcgcctttaaggatggcaaacagtgccctgatctccgttggctgcttggccatatttgtcactgtgatctccctcttggtgtacaaaaaacacaaggaatacaacccaatagaaaatagtcctgggaatgtggtcagaagcaaaggcctgagtgtctttctcaaccgtgcaaaagccgtgttcttcccgggaaaccaggaaaaggatccgctactcaaaaaccaagaatttaaaggagtttcttaaatttcgaccttgtttctgaagctcacttttcagtgccattgatgtgagatgtgctggagtggctattaacctttttttcctaaagattattgttaaatagatattgtggtttggggaagttgaattttttataggttaaatgtcattttagagatggggagagggattatactgcaggcagcttcagccatgttgtgaaactgataaaagcaacttagcaaggcttcttttcattattttttatgtttcacttataaagtcttaggtaactagtaggatagaaacactgtgtcccgagagtaaggagagaagctactattgattagagcctaacccaggttaactgcaagaagaggcgggatactttcagctttccatgtaactgtatgcataaagccaatgtagtccagtttctaagatcatgttccaagctaactgaatcccacttcaatacacactcatgaactcctgatggaacaataacaggcccaagcctgtggtatgatgtgcacacttgctagactcagaaaaaatactactctcataaatgggtgggagtattttggtgacaacctactttgcttggctgagtgaaggaatgatattcatatattcatttattccatggacatttagttagtgctttttatataccaggcatgatgctgagtgacactcttgtgtatatttccaaatttttgtacagtcgctgcacatatttgaaatcatatattaagactttccaaagatgaggtccctggtttttcatggcaacttgatcagtaaggatttcacctctgtttgtaactaaaaccatctactatatgttagacatgacattctttttctctccttcctgaaaaataaagtgtgggaagagaca

SEQ ID NO: 8750 - DNA, 1673 bp, Homo sapiens
  source 1..1673: mol_type = unassigned DNA; mol_type = unassigned DNA
ccatcacatgatcctccccgaggccctgtatttaattaaaatagagagggaggcaccacagatgccagaagaacactgttgctcttggtggacgggcccagaggaattcagagttaaaccttgagtgcctgcgtccgtgagaattcagcatggaatgtctctactatttcctgggatttctgctcctggctgcaagattgccacttgatgccgccaaacgatttcatgatgtgctgggcaatgaaagaccttctgcttacatgagggagcacaatcaattaaatggctggtcttctgatgaaaatgactggaatgaaaaactctacccagtgtggaagcggggagacatgaggtggaaaaactcctggaagggaggccgtgtgcaggcggtcctgaccagtgactcaccagccctcgtgggctcaaatataacatttgcggtgaacctgatattccctagatgccaaaaggaagatgccaatggcaacatagtctatgagaagaactgcagaaatgaggctggtttatctgctgatccgtatgtttacaactggacagcatggtcagaggacagtgacggggaaaatggcaccggccaaagccatcataacgtcttccctgatgggaaaccttttcctcaccaccccggatggagaagatggaatttcatctacgtcttccacacacttggttggcttttacaaacccctaagcttcttctttacctttccttaaaatttcaaccttctcttttcttactctataattgagaatgataacacagagagttaataacagtcaccctgctaactttccttagcatgagtgaacagtgagagataaaaatgaaatcttggttaaccttgccaaatctccaggacaccgaagagttaaaaagagagaaaaacaaaaagattaagctctttttcaaaaaaacaaaaccacttaatttttttctacctaaaaccataacaagaaaaaatgctaacacttatttatttgaatggcacatggagaccgggcatgtggctcacacttgtaatcccagcaccttggaaggcggaggcgggtggatcacctgaagtcaggagttcaagaccagcctggccaacatggtgaagtcccgtccctactaaaaatacaaaaattagccaggtgtggtggtgcgcacctgtaatcccagctactcaggaggctgaggcaggagaatcacttgaatccgggaggtggaggttgcagtgagaggagattgagccattgcactccagcctgggcaacagagtgagactccatctcgaaaaacaaacaaacaaacaaaaaacagaatggcacattgatgagcattcattgattgattctttagtttttttatgttctctaaagaatttttaagatttaaagaagcatgtgctatttatttgtaggaaatcctcagaaaaggtacaaataaaaaataaaaattatccataattaataccagagattataattgttaattattatggtgttttctttgctagtatttaagatcattattaagatcacatacacatttttgcttactatcattagcatttgatgatatgatttttttaatttttatacattgttttaatggctgcacgatatttcattgtgtacaaataaaataactactgttccgctttgaccta

SEQ ID NO: 8751 - DNA, 577 bp, Homo sapiens
  source 1..577: mol_type = unassigned DNA; mol_type = unassigned DNA
acagatgccagaagaacactgttgctcttggtggacgggcccagaggaattcagagttaaaccttgagtgcctgcgtccgtgagaattcagcatggaatgtctctactatttcctgggatttctgctcctggctgcaagattgccacttgatgccgccaaacgagaccccgcggccgcgccctaaccctcagtctcccgactgcgactgcgacccgggaaaacgcctacgtttttggaaaggaagtcccatcacagggagctgacccggtgtcagcgcgcagcacgttcccggcccgcagtgcgccgcgcgtcctcctagcagcccgcggagcccggcactgtgatggtcccgcttcccacacgaggccacgggccacagagtgggcaaggaactcgccccaagccacacagcggatctgaggaagaggaagactctctggaacagtggaaagaacttgtccttgtcctgggaatcaaaagatgtgaatcttgatttctactaaagatgaccctaggatttcatgatgtgctgggcaatgaaagaccttctgcttacatgagggagcacaatcaatt

SEQ ID NO: 8752 - DNA, 577 bp, Homo sapiens
  source 1..577: mol_type = unassigned DNA; mol_type = unassigned DNA
agatgccagaagaacactgttgctcttggtggacgggcccagaggaattcagagttaaaccttgagtgcctgcgtccgtgagaattcagcatggaatgtctctactatttcctgggatttctgctcctggctgcaagattgccacttgatgccgccaaacatctgaggaagaggaagactctctggaacagtggaaagaacttgtccttgtcctgggaatcaaaagatgtgaatcttgatttctactaaagatgaccctaggatttcatgatgtgctgggcaatgaaagaccttctgcttacatgagggagcacaatcaattaaatggctggtcttctgatgaaaatgactggaatgaaaaactctacccagtgtggaagcggggagacatgaggtggaaaaactcctggaagggaggccgtgtgcaggcggtcctgaccagtgactcaccagccctcgtgggctcaaatataacatttgcggtgaacctgatattccctagatgccaaaaggaagatgccaatggcaacatagtctatgagaagaactgcagaaatgaggctggtttatctgctga

SEQ ID NO: 8753 - DNA, 513 bp, Homo sapiens
  source 1..513: mol_type = unassigned DNA; mol_type = unassigned DNA
cagaagaacactgttgctcttggtggacgggcccagaggaattcagagttaaaccttgagtgcctgcgtccgtgagaattcagcatggaatgtctctactatttcctgggatttctgctcctggctgcaagattgccacttgatgccgccaaacaggttggactgaagttcttcaggaagctttcatctctggctcactcatctcttcttctgcaaactgttgggaaggctgaaactacagcaaaatgcctccagctccattctttgctttcggctcatggaaagtaaaaactatgctgcccttctcttgtgaagcttcttttccattgcaattgcaacccattcttgccagacagtggttgggggagggttggacagcctccggccacagaacaaagcaactccaccaactaaactatgtccagcttccatccaaaagggtggagacctcacatgaaatggggtctccaatctggaggcaaatttacgaatctccccagccctgaagctatt

SEQ ID NO: 8754 - DNA, 447 bp, Homo sapiens
  source 1..447: mol_type = unassigned DNA; mol_type = unassigned DNA
gaaatctgcgttttgattatgttcctggaaacaataactttctttcaagatctgaggaagaggaagactctctggaacagtggaaagaacttgtccttgtcctgggaatcaaaagatgtgaatcttgatttctactaaagatgaccctaggatttcatgatgtgctgggcaatgaaagaccttctgcttacatgagggagcacaatcaattaaatggctggtcttctgatgaaaatgactggaatgaaaaactctacccagtgtggaagcggggagacatgaggtggaaaaactcctggaagggaggccgtgtgcaggcggtcctgaccagtgactcaccagccctcgtgggctcaaatataacatttgcggtgaacctgatattccctagatgccaaaaggaagatgccaatggcaacatagtctatgagaagaactgcagaaatg

SEQ ID NO: 8755 - DNA, 788 bp, Homo sapiens
  source 1..788: mol_type = unassigned DNA; mol_type = unassigned DNA
ggggtttcaccatgttagtcaggatgggctcgatctcctgacctcatgatctgcccccctcggcctcccaaagtgctgggattacaggcatgagccactgcacccggccagtttcaacgtcttatttgcttcttgtgttcacacaaaatgtgggattatgcttccttacataatttagcaattataataccttatagctctcacatctgtgtaaattatgacacatttagttcaaatttctatagcaatttcatagtatagtgttcctgatatttttctaaaaagcaaatggcaaatgtttagattttttattatatcacatgtatcttttatgttcgtagcaactactctaaaatcttatgattcaaacaccccaggacctgctggtgacaaccccctggagctgagtaggattcctgatgaaaactgccagattaacagatatggccactttcaagccaccatcacaattgtagagggaatcttagaggttaacatcatccagatgacagacgtcctgatgccggtgccatggcctgaaagctccctaatagactttgtcgtgacctgccaagggagcattcccacggaggtctgtaccatcatttctgaccccacctgcgagatcacccagaacacagtctgcagccctgtggatgtggatgagatgtgtctgctgactgtgagacgaaccttcaatgggtctgggacgtactgtgtgaacctcaccctgggggatgacacaagcctggctctcacgagcaccctgatttctgttcctgacagag

SEQ ID NO: 8756 - DNA, 538 bp, Homo sapiens
  source 1..538: mol_type = unassigned DNA; mol_type = unassigned DNA
gatgtggatgagatgtgtctgctgactgtgagacgaaccttcaatgggtctgggacgtactgtgtgaacctcaccctgggggatgacacaagcctggctctcacgagcaccctgatttctgttcctgacagagacccagcctcgcctttaaggatggcaaacagtgccctgatctccgttggctgcttggccatatttgtcactgtgatctccctcttggtgtacaagtaagtttttggttcctacgctttatatcactatagtgtattgtcaaaagtgaatatatctctgtgtaaataggcatttttcccttttttgcttttaaacattttgtgtaggggaggaaaatattacattgaatggtgaataccaaactggcctgttaatcttgttgtggtttgtttttaatcctaaaagatgctaccagatctcagtaactttacaaaattatgtcaacttaattttaacatgatagtctcaaattatagtaagcaggcacatttcttgcatgaacaagagtaaataaatgtactttcat

SEQ ID NO: 8757 - DNA, 378 bp, Homo sapiens
  source 1..378: mol_type = unassigned DNA; mol_type = unassigned DNA
atgagccggggaagggcactcctgtaagggggcacggaggtctgaaagagcacggggagtatggccaactttcaggatttttagcacagctagaagacccagcctcgcctttaaggatggcaaacagtgccctgatctccgttggctgcttggccatatttgtcactgtgatctccctcttggtgtacaaaaaacacaaggaatacaacccaatagaaaatagtcctgggaatgtggtcagaagcaaaggcctgagtgtctttctcaaccgtgcaaaagccgtgttcttcccgggaaaccaggaaaaggatccgctactcaaaaaccaagaatttaaaggagtttcttaaatttcgaccttgtttctgaagctcactt

SEQ ID NO: 8758 - DNA, 862 bp, Homo sapiens
  source 1..862: mol_type = unassigned DNA; mol_type = unassigned DNA
aggtgtctccaggacgtgacatctctcccccgcgcccttaccacagtgttccagacatgctgactcattctctaaatagaagataagctgacccaaagactatacccagcctcgcctttaaggatggcaaacagtgccctgatctccgttggctgcttggccatatttgtcactgtgatctccctcttggtgtacaaaaaacacaaggaatacaacccaatagaaaatagtcctgggaatgtggtcagaagcaaaggcctgagtgtctttctcaaccgtgcaaaagccgtgttcttcccgggaaaccaggaaaaggatccgctactcaaaaaccaagaatttaaaggagtttcttaaatttcgaccttgtttctgaagctcacttttcagtgccattgatgtgagatgtgctggagtggctattaacctttttttcctaaagattattgttaaatagatattgtggtttggggaagttgaattttttataggttaaatgtcattttagagatggggagagggattatactgcaggcagcttcagccatgttgtgaaactgataaaagcaacttagcaaggcttcttttcattattttttatgtttcacttataaagtcttaggtaactagtaggatagaaacactgtgtcccgagagtaaggagagaagctactattgattagagcctaacccaggttaactgcaagaagaggcgggatactttcagctttccatgtaactgtatgcataaagccaatgtagtccagtttctaagatcatgttccaagctaactgaatcccacttcaatacacactcatgaactcctgatggaacaataacaggcccaagcctgtggtatga

SEQ ID NO: 8759 - DNA, 808 bp, Homo sapiens
  source 1..808: mol_type = unassigned DNA; mol_type = unassigned DNA
ctcccccgcgcccttaccacagtgttccagacatgctgactcattctctaaatagaagataagctgacccaaagactatgtattatttaatagaaaagattactgaaagcccagagggagccatatatcttctgtgacggctcccttcctcatttatttaatggcattataagcggcatgtcctctaggtggaagacataactaacatgctcttgcttctgttttaagacccagcctcgcctttaaggatggcaaacagtgccctgatctccgttggctgcttggccatatttgtcactgtgatctccctcttggtgtacaaaaaacacaaggaatacaacccaatagaaaatagtcctgggaatgtggtcagaagcaaaggcctgagtgtctttctcaaccgtgcaaaagccgtgttcttcccgggaaaccaggaaaaggatccgctactcaaaaaccaagaatttaaaggagtttcttaaatttcgaccttgtttctgaagctcacttttcagtgccattgatgtgagatgtgctggagtggctattaacctttttttcctaaagattattgttaaatagatattgtggtttggggaagttgaattttttataggttaaatgtcattttagagatggggagagggattatactgcaggcagcttcagccatgttgtgaaactgataaaagcaacttagcaaggcttcttttcattattttttatgtttcacttataaagtcttaggtaactagtaggatagaaacactgtgtcccgagagtaaggagagaagctactattgattag

SEQ ID NO: 8760 - DNA, 7353 bp, Homo sapiens
  source 1..7353: mol_type = unassigned DNA; mol_type = unassigned DNA
attattgcaaccatttcgcttgtatttgagtgtgaagcgcctagaaaaccacaggacccctacggcgagccgggaatttttagatattttcctccgagtcaacgctcagtgaaatcagttcaatcagtggcccgacaccgtgcggctgacacagcttatcccccgaccctgagatcaggggtccccggagcccaaggtcgcttccaaagctcagcgaggcggaggtgcggcccgggctggtctggttcggccaccgttgttatggcaaccgccaataggttggcttcatctctaactgaaagtctgcacaggagcggccgatcgaagggccccgaggtgggcagcacaggctcctcgacgacttcctaggtcgcaatctccaggaaaacgaccacagggtcagcggagctagccgccgagccccgctccccgggcccttccggcggctgcgccctttcaccccggacgtgggcgggagaggaagcggctggtgatgctggaacaaacatggccgctctggcgcccgtcggctcccccgcctcccgcggtcctaggctggccgcgggcctccggctgctcccaatgctgggtttgctgcagttgctggccgagcctggcctgggccgcgtccatcacctggcactcaaggatgatgtgaggcataaagttcatctgaacacctttggcttcttcaaggatgggtacatggtggtgaatgtcagtagcctctcactgaatgagcctgaagacaaggatgtgactattggatttagcctagaccgtacaaagaatgatggcttttcttcttacctggatgaagatgtgaattactgtattttaaagaaacagtctgtctctgtcacccttttaatcctagacatctccagaagtgaggtaagagtaaagtctccaccagaagctggtacccagttaccaaagatcatcttcagcagggatgagaaagtccttggtcagagccaggagcctaatgttaaccctgcttcagcaggcaaccagacccagaagacacaagatggtggaaagtctaaaagaagtacagtggattcaaaggccatgggagagaaatccttttctgttcataataatggtggggcagtgtcatttcagtttttctttaacatcagcactgatgaccaagaaggcctttacagtctttattttcataaatgccttggaaaagaattgccaagtgacaagtttacattcagccttgatattgagatcacagagaagaatcctgacagctacctctcagcaggagaaattcctctccccaaattatacatctcaatggcctttttcttctttctttctgggaccatctggattcatatccttcgaaaacgacggaatgatgtatttaaaatccactggctgatggcggcccttcctttcaccaagtctctttccttggtgttccatgcaattgactaccactacatctcctcccagggcttccctatcgaaggctgggctgttgtgtactacataactcaccttttgaaaggggcgctactcttcatcaccattgcactcattggcactggctgggctttcattaagcacatcctttctgataaagacaaaaagatcttcatgattgtcattccactccaggtcctggcaaatgtagcctacatcatcatagagtccaccgaggagggcacgactgaatatggcttgtggaaggactctctatttctggtcgacctgttgtgttgtggtgccatcctcttcccagtggtgtggtcaatcagacatttacaagaagcatcagcaacagatggaaaaggtgacagcatgggacctcttcagcagagagcgaatctaagagcaggaagtcgcatagagtctcaccattttgcccaggctgatcttgaactcctggcctctagctgtcctcctgcctcagtctcccaaagggctgggattacagctgctattaacttagcaaagctgaaacttttcagacattattacgtcttgattgtgtgttacatatacttcactaggatcattgcatttctcctcaaactcgctgttccattccagtggaagtggctctaccagctcctggatgaaacggccacactggtcttctttgttctaacggggtataaattccgtccggcttcagataacccctacctacaactttctcaggaagaagaagacttggaaatggagtccgttgtgacaacatctggggtgatggaaagtatgaagaaagtcaagaaggtgaccaacggctccgtggagccccagggcgagtgggaaggcgccgtgtgacagagccgaccctgaggatggcactgtccaaggaaactgttaacttattcatagtcctattggacagcaggagcagctcctacagtgaactattggcaccaccgacagtgacaccagggcacatggctggagcacagtgccgcggaaacctgattttgtactctcttttatggaaacgatctgtggctgtttagaggcagctggatcctctttcaggcgggaatgggagggcgggcacagggaggaggagaggaagagaaaaggaagaattcatttttaatttaggtttctttttttcttcttcatttcggagctctaaggtgtatgcagttgtgaccccatgtgtggggaagtgtagcaaggacggctggtggagggggaaggagggtgcgaggtgtctgtctgatgctttaggaaatgtctactgaggaccctgggacttaagaagaagggcggggagagtgccattgcctgtttgggagacaaaaatgaacgaaaacaggtgactttggaaagcaaagtcaaaacccagtttaggatgtagcacctgccccaggattcctgccctcggctttgccccagacccttattccagatgctgagagtgaccaggacagcagctcctgaggcccagtggtcttctttccaacaggaaaagaaggctgtgatgtcgctgtcaggatcatgccctgtggcacagcacaggtggtgggaggtggttttctgactgagatgttgcctgatggatggaaagaaatgtatttttaagttcaaaaagcattatcctgtggcgttgcctggacatccactccctgacagcccagagcagcactgtctggcttcccttcatgcttgtggctttgttgtgtttgatcagaattttgggggaaatggaaagttttcctcaaggagcagctgggggcagaataggtagtatttaagcaaatacttaagtccaagcaaatcatccccattaaaaagcttttcctgtaggctagtaggatttctaaatagatgaattcaacagacttggtccccatagtccaagagtatgtatgtgaagaaagtgagcatgattcaacagtttcactctcagggattttaggatggcaaaatacttcacagaaactcaatgattaagttcccttccacacttccagagcttgaatgaacacaggtagccacctaaattgagcagtattgcaactcagagagaaaatcatctgaatagtaggacaagctcagaaggtacattgtgactgagggcttaaaaggagaccaaaacatggccccatcagggaagcttcttaatgcttggggggccagctaggtagggttgcttccaaaagctggagcccacccctgcctaggggttgtcagagagccacacctgcaggggaacaggtacctccgagggtgagagtcgtggtctctgggagttgttttctcacctctggcttagaagggtcaggcagaaaccacaggatgtggggtcacactcactgtcccaagtttgggaacctgaaaaagtctccattcagaacatggttgttctccctgtcccatgctatcttatcttcctaaatgactaatgaggaagcgggtgttctttttctgcactttgattcgccatctgggttctgtagggtgctctgaaggtgtgatctgccttctggctgatgtggaggaagagcaagcgccttcccaggccacagctgctcacctctcggcagatattttaggcaagcatccgtgtgtcttcccatcttcaggagaaaggtaaatgcaccctaagtgttcacttctggacctttttcaagttcacttgggactgtgtgacagaagggagttggagggaggatgggaatatttttaacactttgttttcctgtgcagaaacataataccagttttcgcagaaatgtgtctcaatctgtgactaccaaagccctcctcagtccttccctcagagggacacatttgctgtttctcccgcaagcagatgttgtggatgaggcgatagactccttggcaagaacgaaaggtgtgatgaaacctccctgctcggaagggtctccgtggaggtgtcctcatttcacatgctgggttttgcaagcgaggaagccaggcagtggaggaactagagagaggcaggcgtgtgtgtggacaagcgctggagccgcagccctcagactggcacgggaacgccagcgttgggtgttcagattccacgcgtatgtctgggctcactcacagcatggccgagtgtctgcagtgctggtcctgacccttccagagcagcagtggacagatgagataagactgtttcagaaacaaagatggccacagccttcctaacaagcaggtcatctggccatgtctgtattgtaactggtaaaaggcttcaagtcagattgatgatcaagaaaagtcaaaaccccagcccaagattgggaaagcaggtggtggttccaagcttttaaaaaattattgaagctctccatcctgttctgtgagtgtgtcttctctttctccttcacgtcatagccgtgacccaccgttcatctctgctcttgcgtaaagatgaccgatggagtccaaagccaagtggcttcaccagctgacaagccaccctcctgcagcctgagtttcacagtccactgggttcgttgtcatgcggtgtttgaatggttaagcccttgcagtatttcagatcgggcaaaaaatatcggatgcacatagcagaaccattggtggtatttatagctttgctttgtactcctcactgtttctgcctacgcaaaatatccatgtttcctctgagaaatctgttgtggactgaaagcgctgctggctgtgaaatttaataaagtgtgtatgctttgctagaaaattatttcttggacaataggaacagtcattgatctgtaaatcctggctcttaacagtgagtggccaaggacttgatcagcccatttcttggtccctcagtgctttaaaatttaagtagcactgcattttgtaatgttgaatatgactctagtgacttgtaggaggcacttgtgaggagatgcttgcttcagtgtaaaagatgctcatggcctgagtcagttgagttttctttcaagaaaccacttcagagtgaaatatccagggtttccccgccctggacatgtccagcctgcccaggcagcacacagccctgtaagtccacctcgtgtgggtgagatttcctcctgcgtgatgacctcatcgccatctctgctgtctcattccacagcctccctccctcttctctcctcctctgccctcgcccttcccccttccccatcccctccccctcctcctctgccctcgcccttacccctcccccttccccttccgctcctcctccctcctccacctctttctcctcctccttccctcctcctccctcctcttcccttctctgccatctttctccccgtgcctattgatcccacataggctcattctgggtacaccggctaaaggctttggtgcattgcagcgttttctcccagcagctgtgtgaaagatgcattttctaagctaaggagaattttctcaagagtggcatactcatgccaaatattattgctctgggccatataggctggtcttcctccacactaaaatgggtgtcttgttttggtacttaaaacagtctactccaggcatccagtccttacagaccaaggaagagcatagcgatgcctgttggaattgcagatgcattctggccttctcccccgtcctgaaacattttctttgaggaaggctcttagaacattagatagtctgctgaggttgttggcccagctccatacacccagtagaacagtggaacaactcatgcttcatgctgccaagctgctgtacttcaaaggaaacagatctagcacactgctgcacccctgcttccacactccacacttcaccccgctgcttttctctgacccgcccctggccttgtaagactcacgtaagctaagtccaggatgcctgtggcctgcggcttgattcttccctttaggattcagcaagttaatggcttcctcgctatagaagtgagactttgacttgatgcctcttggtatatcaaaaagatattcatccagaaagtaccaaatgttctgaaagacccgctcttcactccagttttccctagggtgtttctggcagggcgtttttaaaaggcatctacctgagttgacgctaatacttgtcaccacctggaacgtagttatcggtcggcaggctgaacatactccagattccccagaggccacttctgtagcccagcgatgcatctgagcctctctgcgtggtttatgcttgaaaaatagataatgcttttagatggttcactgccaggccatgggccccacacatctcaggccctgtgtgagggagcacactgagatggtgcaggagtgaatgggcatggcttggcctcgctacctcggggacctgttggagttctggcagcagggtgtctgcaggtgggacggcgttctgggcagagtcagaatggtcagaatgaaacagaacagccaactcacccacaggacagcttattttgaggcaaggttttggattttggaggaagcagccagatgaggcggtgagcctccagaaggtcagcctttggagcacgtaagatactgttacagggtccagaaatcgtgttcacatgggggctttgactcttcaaacagcttttgcagatcgtaaattgcatttgcctagtcgtgtgacctcaaaagaagtcagacatatttaatccagaaatagtttcgtttgagggagggcttgcaggtctgtaaatagcatttgctttcctggttagagattgggatgcagaaggagttttcagtattttttttaaaacactaatgatcattgaagagtatttatgtaaacatacaacgtataatgggtgggggatccgatcatggtgatgtacggggtgaattctcttgccgtgttgcaaatgtgtaaaataaagattatctggcagaa

SEQ ID NO: 8761 - DNA, 7209 bp, Homo sapiens
  source 1..7209: mol_type = unassigned DNA; mol_type = unassigned DNA
attattgcaaccatttcgcttgtatttgagtgtgaagcgcctagaaaaccacaggacccctacggcgagccgggaatttttagatattttcctccgagtcaacgctcagtgaaatcagttcaatcagtggcccgacaccgtgcggctgacacagcttatcccccgaccctgagatcaggggtccccggagcccaaggtcgcttccaaagctcagcgaggcggaggtgcggcccgggctggtctggttcggccaccgttgttatggcaaccgccaataggttggcttcatctctaactgaaagtctgcacaggagcggccgatcgaagggccccgaggtgggcagcacaggctcctcgacgacttcctaggtcgcaatctccaggaaaacgaccacagggtcagcggagctagccgccgagccccgctccccgggcccttccggcggctgcgccctttcaccccggacgtgggcgggagaggaagcggctggtgatgctggaacaaacatggccgctctggcgcccgtcggctcccccgcctcccgcggtcctaggctggccgcgggcctccggctgctcccaatgctgggtttgctgcagttgctggccgagcctggcctgggccgcgtccatcacctggcactcaaggatgatgtgaggcataaagttcatctgaacacctttggcttcttcaaggatgggtacatggtggtgaatgtcagtagcctctcactgaatgagcctgaagacaaggatgtgactattggatttagcctagaccgtacaaagaatgatggcttttcttcttacctggatgaagatgtgaattactgtattttaaagaaacagtctgtctctgtcacccttttaatcctagacatctccagaagtgaggtaagagtaaagtctccaccagaagctggtacccagttaccaaagatcatcttcagcagggatgagaaagtccttggtcagagccaggagcctaatgttaaccctgcttcagcaggcaaccagacccagaagacacaagatggtggaaagtctaaaagaagtacagtggattcaaaggccatgggagagaaatccttttctgttcataataatggtggggcagtgtcatttcagtttttctttaacatcagcactgatgaccaagaaggcctttacagtctttattttcataaatgccttggaaaagaattgccaagtgacaagtttacattcagccttgatattgagatcacagagaagaatcctgacagctacctctcagcaggagaaattcctctccccaaattatacatctcaatggcctttttcttctttctttctgggaccatctggattcatatccttcgaaaacgacggaatgatgtatttaaaatccactggctgatggcggcccttcctttcaccaagtctctttccttggtgttccatgcaattgactaccactacatctcctcccagggcttccctatcgaaggctgggctgttgtgtactacataactcaccttttgaaaggggcgctactcttcatcaccattgcactcattggcactggctgggctttcattaagcacatcctttctgataaagacaaaaagatcttcatgattgtcattccactccaggtcctggcaaatgtagcctacatcatcatagagtccaccgaggagggcacgactgaatatggcttgtggaaggactctctatttctggtcgacctgttgtgttgtggtgccatcctcttcccagtggtgtggtcaatcagacatttacaagaagcatcagcaacagatggaaaagctgctattaacttagcaaagctgaaacttttcagacattattacgtcttgattgtgtgttacatatacttcactaggatcattgcatttctcctcaaactcgctgttccattccagtggaagtggctctaccagctcctggatgaaacggccacactggtcttctttgttctaacggggtataaattccgtccggcttcagataacccctacctacaactttctcaggaagaagaagacttggaaatggagtccgttgtgacaacatctggggtgatggaaagtatgaagaaagtcaagaaggtgaccaacggctccgtggagccccagggcgagtgggaaggcgccgtgtgacagagccgaccctgaggatggcactgtccaaggaaactgttaacttattcatagtcctattggacagcaggagcagctcctacagtgaactattggcaccaccgacagtgacaccagggcacatggctggagcacagtgccgcggaaacctgattttgtactctcttttatggaaacgatctgtggctgtttagaggcagctggatcctctttcaggcgggaatgggagggcgggcacagggaggaggagaggaagagaaaaggaagaattcatttttaatttaggtttctttttttcttcttcatttcggagctctaaggtgtatgcagttgtgaccccatgtgtggggaagtgtagcaaggacggctggtggagggggaaggagggtgcgaggtgtctgtctgatgctttaggaaatgtctactgaggaccctgggacttaagaagaagggcggggagagtgccattgcctgtttgggagacaaaaatgaacgaaaacaggtgactttggaaagcaaagtcaaaacccagtttaggatgtagcacctgccccaggattcctgccctcggctttgccccagacccttattccagatgctgagagtgaccaggacagcagctcctgaggcccagtggtcttctttccaacaggaaaagaaggctgtgatgtcgctgtcaggatcatgccctgtggcacagcacaggtggtgggaggtggttttctgactgagatgttgcctgatggatggaaagaaatgtatttttaagttcaaaaagcattatcctgtggcgttgcctggacatccactccctgacagcccagagcagcactgtctggcttcccttcatgcttgtggctttgttgtgtttgatcagaattttgggggaaatggaaagttttcctcaaggagcagctgggggcagaataggtagtatttaagcaaatacttaagtccaagcaaatcatccccattaaaaagcttttcctgtaggctagtaggatttctaaatagatgaattcaacagacttggtccccatagtccaagagtatgtatgtgaagaaagtgagcatgattcaacagtttcactctcagggattttaggatggcaaaatacttcacagaaactcaatgattaagttcccttccacacttccagagcttgaatgaacacaggtagccacctaaattgagcagtattgcaactcagagagaaaatcatctgaatagtaggacaagctcagaaggtacattgtgactgagggcttaaaaggagaccaaaacatggccccatcagggaagcttcttaatgcttggggggccagctaggtagggttgcttccaaaagctggagcccacccctgcctaggggttgtcagagagccacacctgcaggggaacaggtacctccgagggtgagagtcgtggtctctgggagttgttttctcacctctggcttagaagggtcaggcagaaaccacaggatgtggggtcacactcactgtcccaagtttgggaacctgaaaaagtctccattcagaacatggttgttctccctgtcccatgctatcttatcttcctaaatgactaatgaggaagcgggtgttctttttctgcactttgattcgccatctgggttctgtagggtgctctgaaggtgtgatctgccttctggctgatgtggaggaagagcaagcgccttcccaggccacagctgctcacctctcggcagatattttaggcaagcatccgtgtgtcttcccatcttcaggagaaaggtaaatgcaccctaagtgttcacttctggacctttttcaagttcacttgggactgtgtgacagaagggagttggagggaggatgggaatatttttaacactttgttttcctgtgcagaaacataataccagttttcgcagaaatgtgtctcaatctgtgactaccaaagccctcctcagtccttccctcagagggacacatttgctgtttctcccgcaagcagatgttgtggatgaggcgatagactccttggcaagaacgaaaggtgtgatgaaacctccctgctcggaagggtctccgtggaggtgtcctcatttcacatgctgggttttgcaagcgaggaagccaggcagtggaggaactagagagaggcaggcgtgtgtgtggacaagcgctggagccgcagccctcagactggcacgggaacgccagcgttgggtgttcagattccacgcgtatgtctgggctcactcacagcatggccgagtgtctgcagtgctggtcctgacccttccagagcagcagtggacagatgagataagactgtttcagaaacaaagatggccacagccttcctaacaagcaggtcatctggccatgtctgtattgtaactggtaaaaggcttcaagtcagattgatgatcaagaaaagtcaaaaccccagcccaagattgggaaagcaggtggtggttccaagcttttaaaaaattattgaagctctccatcctgttctgtgagtgtgtcttctctttctccttcacgtcatagccgtgacccaccgttcatctctgctcttgcgtaaagatgaccgatggagtccaaagccaagtggcttcaccagctgacaagccaccctcctgcagcctgagtttcacagtccactgggttcgttgtcatgcggtgtttgaatggttaagcccttgcagtatttcagatcgggcaaaaaatatcggatgcacatagcagaaccattggtggtatttatagctttgctttgtactcctcactgtttctgcctacgcaaaatatccatgtttcctctgagaaatctgttgtggactgaaagcgctgctggctgtgaaatttaataaagtgtgtatgctttgctagaaaattatttcttggacaataggaacagtcattgatctgtaaatcctggctcttaacagtgagtggccaaggacttgatcagcccatttcttggtccctcagtgctttaaaatttaagtagcactgcattttgtaatgttgaatatgactctagtgacttgtaggaggcacttgtgaggagatgcttgcttcagtgtaaaagatgctcatggcctgagtcagttgagttttctttcaagaaaccacttcagagtgaaatatccagggtttccccgccctggacatgtccagcctgcccaggcagcacacagccctgtaagtccacctcgtgtgggtgagatttcctcctgcgtgatgacctcatcgccatctctgctgtctcattccacagcctccctccctcttctctcctcctctgccctcgcccttcccccttccccatcccctccccctcctcctctgccctcgcccttacccctcccccttccccttccgctcctcctccctcctccacctctttctcctcctccttccctcctcctccctcctcttcccttctctgccatctttctccccgtgcctattgatcccacataggctcattctgggtacaccggctaaaggctttggtgcattgcagcgttttctcccagcagctgtgtgaaagatgcattttctaagctaaggagaattttctcaagagtggcatactcatgccaaatattattgctctgggccatataggctggtcttcctccacactaaaatgggtgtcttgttttggtacttaaaacagtctactccaggcatccagtccttacagaccaaggaagagcatagcgatgcctgttggaattgcagatgcattctggccttctcccccgtcctgaaacattttctttgaggaaggctcttagaacattagatagtctgctgaggttgttggcccagctccatacacccagtagaacagtggaacaactcatgcttcatgctgccaagctgctgtacttcaaaggaaacagatctagcacactgctgcacccctgcttccacactccacacttcaccccgctgcttttctctgacccgcccctggccttgtaagactcacgtaagctaagtccaggatgcctgtggcctgcggcttgattcttccctttaggattcagcaagttaatggcttcctcgctatagaagtgagactttgacttgatgcctcttggtatatcaaaaagatattcatccagaaagtaccaaatgttctgaaagacccgctcttcactccagttttccctagggtgtttctggcagggcgtttttaaaaggcatctacctgagttgacgctaatacttgtcaccacctggaacgtagttatcggtcggcaggctgaacatactccagattccccagaggccacttctgtagcccagcgatgcatctgagcctctctgcgtggtttatgcttgaaaaatagataatgcttttagatggttcactgccaggccatgggccccacacatctcaggccctgtgtgagggagcacactgagatggtgcaggagtgaatgggcatggcttggcctcgctacctcggggacctgttggagttctggcagcagggtgtctgcaggtgggacggcgttctgggcagagtcagaatggtcagaatgaaacagaacagccaactcacccacaggacagcttattttgaggcaaggttttggattttggaggaagcagccagatgaggcggtgagcctccagaaggtcagcctttggagcacgtaagatactgttacagggtccagaaatcgtgttcacatgggggctttgactcttcaaacagcttttgcagatcgtaaattgcatttgcctagtcgtgtgacctcaaaagaagtcagacatatttaatccagaaatagtttcgtttgagggagggcttgcaggtctgtaaatagcatttgctttcctggttagagattgggatgcagaaggagttttcagtattttttttaaaacactaatgatcattgaagagtatttatgtaaacatacaacgtataatgggtgggggatccgatcatggtgatgtacggggtgaattctcttgccgtgttgcaaatgtgtaaaataaagattatctggcagaa

SEQ ID NO: 8762 - DNA, 2833 bp, Homo sapiens
  source 1..2833: mol_type = unassigned DNA; mol_type = unassigned DNA
gctggaacaaacatggccgctctggcgcccgtcggctcccccgcctcccgcggtcctaggctggccgcgggcctccggctgctcccaatgctgggtttgctgcagttgctggccgagcctggcctgggccgcgtccatcacctggcactcaaggatgatgtgaggcataaagttcatctgaacacctttggcttcttcaaggatgggtacatggtggtgaatgtcagtagcctctcactgaatgagcctgaagacaaggatgtgactattggatttagcctagaccgtacaaagaatgatggcttttcttcttacctggatgaagatgtgaattactgtattttaaagaaacagtctgtctctgtcacccttttaatcctagacatctccagaaggtaagagtaaagtctccaccagaagctggtacccagttaccaaagatcatcttcagcagggatgagaaagtccttggtcagagccaggagcctaatgttaaccctgcttcagcaggcaaccagacccagaagacacaagatggtggaaagtctaaaagaagtacagtggattcaaaggccatgggagagaaatccttttctgttcataataatggtggggcagtgtcatttcagtttttctttaacatcagcactgatgaccaagaaggcctttacagtctttattttcataaatgccttggaaaagaattgccaagtgacaagtttacattcagccttgatattgagatcacagagaagaatcctgacagctacctctcagcaggagaaattcctctccccaaattatacatctcaatggcctttttcttctttctttctgggaccatctggattcatatccttcgaaaacgacggaatgatgtatttaaaatccactggctgatggcggcccttcctttcaccaagtctctttccttggtgttccatgcaattgactaccactacatctcctcccagggcttccctatcgaaggctgggctgttgtgtactacataactcaccttttgaaaggggcgctactcttcatcaccattgcactcattggcactggctgggctttcattaagcacatcctttctgataaagacaaaaagatcttcatgattgtcattccactccaggtcctggcaaatgtagcctacatcatcatagagtccaccgaggagggcacgactgaatatggcttgtggaaggactctctatttctggtcgacctgttgtgttgtggtgccatcctcttcccagtggtgtggtcaatcagacatttacaagaagcatcagcaacagatggaaaagctgctattaacttagcaaagctgaaacttttcagacattattacgtcttgattgtgtgttacatatacttcactaggatcattgcatttctcctcaaactcgctgttccattccagtggaagtggctctaccagctcctggatgaaacggccacactggtcttctttgttctaacggggtataaattccgtccggcttcagataacccctacctacaactttctcaggaagaagaagacttggaaatggagtccgtgtaagaaatctttcttccctcttccttagccctgacccctttgcctaacacaaagcagcacagtgtgaatcgggtcggctgctctcagcatttcgtggctgcaggggtggttcctctatttttagcagaaggaagcggacactggagccccaggctgtctgatctggtttgaagtacagtatctgccaaacctagctgggtcttgtcagggaagatggaacttgccgttccactaagcatcattggagcctgctttcaagaactcagtggcaagaacttaggaatatacgtggccagttcacgagggagaacagggggccgactttctgtcaggcccgccatcaggcgcttacgtctgaaaatggaatcttctgagtcatctctaagtctgctaatgatcctcagacatcctctatcgtcagataactgcgtggcttttcacagcacaatgactttgacctatatctgagcactaataggggcttttctgagtcacacagtgaatgactctagggtcctattttctgggaaagggccatcattgtctagaaaaatgagtagtgattaagcatatttgcttgttaactgaaatttgataagccaggtcaatgctgtgtttgatgattagcctaaggcagagttttcccttcttggttcactggtatcaagtgttctgcccccagccctggcagcctttgaattcttcccaattcagaggctgagactcggcccatgctaagctctgcttggctgtcagcgggtcaggcagcatgggacagctctctctgctcagctccacggcaacagtaaaggaaggcaggtcctgccagcgggcgccaaacagcatctccccatgcagaggaagaaacacctccttctaaacagtggagaggagtgcaggaggcccatcagctgtgcctttcccagaagtggcaggatctgagcaagtgtctgttggttgaagaggcacacatgtcaggctggcaaccagcagcatcaggaaataacctaagacgcggtgtgtttatcattcccctgctgggagcctttggcttggtccgtccgcataacacggggttctttgggtaggcagctagaagccgagcggccgggtcgcagcatcgtctcctttactgcattgtactccacagtcgtaatgggaggttcccgcttcccacatcctttccctcagccgttacatcttggagcctggatgcattatgaaggtatttttgtttcgtggcaacaatttttttaaaattt

SEQ ID NO: 8763 - DNA, 389 bp, Homo sapiens
  source 1..389: mol_type = unassigned DNA; mol_type = unassigned DNA
taagctagaatatccagaaatgaattctgttgttactattaccggttactagataccatttataatataacaaggtctaatttgctgcttcgacagtacaagaattatgttttgggacctgaggaaatggcagtccccaagattattttgtttaattatttgatattagacaagctgaagcctcataaaatgatactgtaatatatatatgtatctgtaagttgagtcatgcagcactctcttttaaatgttcttgcttctagatggtggaaagtctaaaagaagtacagtggattcaaaggccatgggagagaaatccttttctgttcataataatggtggggcagtgtcatttcagtttttctttaacatcagcactgatgaccaag

SEQ ID NO: 8764 - DNA, 177 bp, Homo sapiens
  source 1..177: mol_type = unassigned DNA; mol_type = unassigned DNA
catcagcaacagatggaaaaggtgacagcatgggacctcttcagcagagagcgaatctaagagcaggaagtcgcatagctgctattaacttagcaaagctgaaacttttcagacattattacgtcttgattgtgtgttacatatacttcactaggatcattgcatttctcctcaaac

SEQ ID NO: 8765 - DNA, 648 bp, Homo sapiens
  source 1..648: mol_type = unassigned DNA; mol_type = unassigned DNA
gcgggcgccaaacagcatctccccatgcagaggaagaaacacctccttctaaacagtggagaggagtgcaggaggcccatcagctgtgcctttcccagaagtggcaggatctgagcaagtgtctgttggttgaagaggcacacatgtcaggctggcaaccagcagcatcaggaaataacctaagacgcggtgtgtttatcattcccctgctgggagcctttggcttggtccgtccgcataacacggggttctttgggtaggcagctagaagccgagcggccgggtcgcagcatcgtctcctttactgcattgtactccacagtcgtaatgggaggttcccgcttcccacatcctttccctcagccgttacatcttggagcctggatgcattatgaagatcctctgcatctcatgacgggcttcctggcttccccgattccccggcagagggattcttctcagcccgagccatcaccgaacccggttcccagcactcctgtctctgttggaagtggctttgcagggttgctgtggaagaccatctcttctcctgggctgtgggctccgaagagcaataagaccacttctttttccttgatgacctagcatgaggcctgtcttgaagaataaaagttgttttctcacttg

SEQ ID NO: 8766 - DNA, 6991 bp, Homo sapiens
  source 1..6991: mol_type = unassigned DNA; mol_type = unassigned DNA
tggcttcatctctaactgaaagtctgcacaggagcggccgatcgaagggccccgaggtgggcagcacaggctcctcgacgacttcctaggtcgcaatctccaggaaaacgaccacagggtcagcggagctagccgccgagccccgctccccgggcccttccggcggctgcgccctttcaccccggacgtgggcgggagaggaagcggctggtgatgctggaacaaacatggccgctctggcgcccgtcggctcccccgcctcccgcggtcctaggctggccgcgggcctccggctgctcccaatgctgggtttgctgcagttgctggccgagcctggcctgggccgcgtccatcacctggcactcaaggatgatgtgaggcataaagttcatctgaacacctttggcttcttcaaggatgggtacatggtggtgaatgtcagtagcctctcactgaatgagcctgaagacaaggatgtgactattggatttagcctagaccgtacaaagaatgatggcttttcttcttacctggatgaagatgtgaattactgtattttaaagaaacagtctgtctctgtcacccttttaatcctagacatctccagaagtgaggtaagagtaaagtctccaccagaagctggtacccagttaccaaagatcatcttcagcagggatgagaaagtccttggtcagagccaggagcctaatgttaaccctgcttcagcaggcaaccagacccagaagacacaagatggtggaaagtctaaaagaagtacagtggattcaaaggccatgggagagaaatccttttctgttcataataatggtggggcagtgtcatttcagtttttctttaacatcagcactgatgaccaagaaggcctttacagtctttattttcataaatgccttggaaaagaattgccaagtgacaagtttacattcagccttgatattgagatcacagagaagaatcctgacagctacctctcagcaggagaaattcctctccccaaattatacatctcaatggcctttttcttctttctttctgggaccatctggattcatatccttcgaaaacgacggaatgatgtatttaaaatccactggctgatggcggcccttcctttcaccaagtctctttccttggtgttccatgcaattgactaccactacatctcctcccagggcttccctatcgaaggctgggctgttgtgtactacataactcaccttttgaaaggggcgctactcttcatcaccattgcactcattggcactggctgggctttcattaagcacatcctttctgataaagacaaaaagatcttcatgattgtcattccactccaggtcctggcaaatgtagcctacatcatcatagagtccaccgaggagggcacgactgaatatggcttgtggaaggactctctatttctggtcgacctgttgtgttgtggtgccatcctcttcccagtggtgtggtcaatcagacatttacaagaagcatcagcaacagatggaaaaggtgacagcatgggacctcttcagcagagagcgaatctaagagcaggaagtcgcatagctgctattaacttagcaaagctgaaacttttcagacattattacgtcttgattgtgtgttacatatacttcactaggatcattgcatttctcctcaaactcgctgttccattccagtggaagtggctctaccagctcctggatgaaacggccacactggtcttctttgttctaacggggtataaattccgtccggcttcagataacccctacctacaactttctcaggaagaagaagacttggaaatggagtccgttgtgacaacatctggggtgatggaaagtatgaagaaagtcaagaaggtgaccaacggctccgtggagccccagggcgagtgggaaggcgccgtgtgacagagccgaccctgaggatggcactgtccaaggaaactgttaacttattcatagtcctattggacagcaggagcagctcctacagtgaactattggcaccaccgacagtgacaccagggcacatggctggagcacagtgccgcggaaacctgattttgtactctcttttatggaaacgatctgtggctgtttagaggcagctggatcctctttcaggcgggaatgggagggcgggcacagggaggaggagaggaagagaaaaggaagaattcatttttaatttaggtttctttttttcttcttcatttcggagctctaaggtgtatgcagttgtgaccccatgtgtggggaagtgtagcaaggacggctggtggagggggaaggagggtgcgaggtgtctgtctgatgctttaggaaatgtctactgaggaccctgggacttaagaagaagggcggggagagtgccattgcctgtttgggagacaaaaatgaacgaaaacaggtgactttggaaagcaaagtcaaaacccagtttaggatgtagcacctgccccaggattcctgccctcggctttgccccagacccttattccagatgctgagagtgaccaggacagcagctcctgaggcccagtggtcttctttccaacaggaaaagaaggctgtgatgtcgctgtcaggatcatgccctgtggcacagcacaggtggtgggaggtggttttctgactgagatgttgcctgatggatggaaagaaatgtatttttaagttcaaaaagcattatcctgtggcgttgcctggacatccactccctgacagcccagagcagcactgtctggcttcccttcatgcttgtggctttgttgtgtttgatcagaattttgggggaaatggaaagttttcctcaaggagcagctgggggcagaataggtagtatttaagcaaatacttaagtccaagcaaatcatccccattaaaaagcttttcctgtaggctagtaggatttctaaatagatgaattcaacagacttggtccccatagtccaagagtatgtatgtgaagaaagtgagcatgattcaacagtttcactctcagggattttaggatggcaaaatacttcacagaaactcaatgattaagttcccttccacacttccagagcttgaatgaacacaggtagccacctaaattgagcagtattgcaactcagagagaaaatcatctgaatagtaggacaagctcagaaggtacattgtgactgagggcttaaaaggagaccaaaacatggccccatcagggaagcttcttaatgcttggggggccagctaggtagggttgcttccaaaagctggagcccacccctgcctaggggttgtcagagagccacacctgcaggggaacaggtacctccgagggtgagagtcgtggtctctgggagttgttttctcacctctggcttagaagggtcaggcagaaaccacaggatgtggggtcacactcactgtcccaagtttgggaacctgaaaaagtctccattcagaacatggttgttctccctgtcccatgctatcttatcttcctaaatgactaatgaggaagcgggtgttctttttctgcactttgattcgccatctgggttctgtagggtgctctgaaggtgtgatctgccttctggctgatgtggaggaagagcaagcgccttcccaggccacagctgctcacctctcggcagatattttaggcaagcatccgtgtgtcttcccatcttcaggagaaaggtaaatgcaccctaagtgttcacttctggacctttttcaagttcacttgggactgtgtgacagaagggagttggagggaggatgggaatatttttaacactttgttttcctgtgcagaaacataataccagttttcgcagaaatgtgtctcaatctgtgactaccaaagccctcctcagtccttccctcagagggacacatttgctgtttctcccgcaagcagatgttgtggatgaggcgatagactccttggcaagaacgaaaggtgtgatgaaacctccctgctcggaagggtctccgtggaggtgtcctcatttcacatgctgggttttgcaagcgaggaagccaggcagtggaggaactagagagaggcaggcgtgtgtgtggacaagcgctggagccgcagccctcagactggcacgggaacgccagcgttgggtgttcagattccacgcgtatgtctgggctcactcacagcatggccgagtgtctgcagtgctggtcctgacccttccagagcagcagtggacagatgagataagactgtttcagaaacaaagatggccacagccttcctaacaagcaggtcatctggccatgtctgtattgtaactggtaaaaggcttcaagtcagattgatgatcaagaaaagtcaaaaccccagcccaagattgggaaagcaggtggtggttccaagcttttaaaaaattattgaagctctccatcctgttctgtgagtgtgtcttctctttctccttcacgtcatagccgtgacccaccgttcatctctgctcttgcgtaaagatgaccgatggagtccaaagccaagtggcttcaccagctgacaagccaccctcctgcagcctgagtttcacagtccactgggttcgttgtcatgcggtgtttgaatggttaagcccttgcagtatttcagatcgggcaaaaaatatcggatgcacatagcagaaccattggtggtatttatagctttgctttgtactcctcactgtttctgcctacgcaaaatatccatgtttcctctgagaaatctgttgtggactgaaagcgctgctggctgtgaaatttaataaagtgtgtatgctttgctagaaaattatttcttggacaataggaacagtcattgatctgtaaatcctggctcttaacagtgagtggccaaggacttgatcagcccatttcttggtccctcagtgctttaaaatttaagtagcactgcattttgtaatgttgaatatgactctagtgacttgtaggaggcacttgtgaggagatgcttgcttcagtgtaaaagatgctcatggcctgagtcagttgagttttctttcaagaaaccacttcagagtgaaatatccagggtttccccgccctggacatgtccagcctgcccaggcagcacacagccctgtaagtccacctcgtgtgggtgagatttcctcctgcgtgatgacctcatcgccatctctgctgtctcattccacagcctccctccctcttctctcctcctctgccctcgcccttcccccttccccatcccctccccctcctcctctgccctcgcccttacccctcccccttccccttccgctcctcctccctcctccacctctttctcctcctccttccctcctcctccctcctcttcccttctctgccatctttctccccgtgcctattgatcccacataggctcattctgggtacaccggctaaaggctttggtgcattgcagcgttttctcccagcagctgtgtgaaagatgcattttctaagctaaggagaattttctcaagagtggcatactcatgccaaatattattgctctgggccatataggctggtcttcctccacactaaaatgggtgtcttgttttggtacttaaaacagtctactccaggcatccagtccttacagaccaaggaagagcatagcgatgcctgttggaattgcagatgcattctggccttctcccccgtcctgaaacattttctttgaggaaggctcttagaacattagatagtctgctgaggttgttggcccagctccatacacccagtagaacagtggaacaactcatgcttcatgctgccaagctgctgtacttcaaaggaaacagatctagcacactgctgcacccctgcttccacactccacacttcaccccgctgcttttctctgacccgcccctggccttgtaagactcacgtaagctaagtccaggatgcctgtggcctgcggcttgattcttccctttaggattcagcaagttaatggcttcctcgctatagaagtgagactttgacttgatgcctcttggtatatcaaaaagatattcatccagaaagtaccaaatgttctgaaagacccgctcttcactccagttttccctagggtgtttctggcagggcgtttttaaaaggcatctacctgagttgacgctaatacttgtcaccacctggaacgtagttatcggtcggcaggctgaacatactccagattccccagaggccacttctgtagcccagcgatgcatctgagcctctctgcgtggtttatgcttgaaaaatagataatgcttttagatggttcactgccaggccatgggccccacacatctcaggccctgtgtgagggagcacactgagatggtgcaggagtgaatgggcatggcttggcctcgctacctcggggacctgttggagttctggcagcagggtgtctgcaggtgggacggcgttctgggcagagtcagaatggtcagaatgaaacagaacagccaactcacccacaggacagcttattttgaggcaaggttttggattttggaggaagcagccagatgaggcggtgagcctccagaaggtcagcctttggagcacgtaagatactgttacagggtccagaaatcgtgttcacatgggggctttgactcttcaaacagcttttgcagatcgtaaattgcatttgcctagtcgtgtgacctcaaaagaagtcagacatatttaatccagaaatagtttcgtttgagggagggcttgcaggtctgtaaatagcatttgctttcctggttagagattgggatgcagaaggagttttcagtattttttttaaaacactaatgatcattgaagagtatttatgtaaacatacaacgtataatgggtgggggatccgatcatggtgatgtacggggtgaattctcttgccgtgttgcaaatgtgtaaaataaagattatctggcagaaccgtg

SEQ ID NO: 8767 - DNA, 2813 bp, Homo sapiens
  source 1..2813: mol_type = unassigned DNA; mol_type = unassigned DNA
gaacaaacatggccgctctggcgcccgtcggctcccccgcctcccgcggtcctaggctggccgcgggcctccggctgctcccaatgctgggtttgctgcagttgctggccgagcctggcctgggccgcgtccatcacctggcactcaaggatgatgtgaggcataaagttcatctgaacacctttggcttcttcaaggatgggtacatggtggtgaatgtcagtagcctctcactgaatgagcctgaagacaaggatgtgactattggatttagcctagaccgtacaaagaatgatggcttttcttcttacctggatgaagatgtgaattactgtattttaaagaaacagtctgtctctgtcacccttttaatcctagacatctccagaagtgaggtaagagtaaagtctccaccagaagctggtacccagttaccaaagatcatcttcagcagggatgagaaagtccttggtcagagccaggagcctaatgttaaccctgcttcagcaggcaaccagacccagaagacacaagatggtggaaagtctaaaagaagtacagtggattcaaaggccatgggagagaaatccttttctgttcataataatggtggggcagtgtcatttcagtttttctttaacatcagcactgatgaccaagaaggcctttacagtctttattttcataaatgccttggaaaagaattgccaagtgacaagtttacattcagccttgatattgagatcacagagaagaatcctgacagctacctctcagcaggagaaattcctctccccaaattatacatctcaatggcctttttcttctttctttctgggaccatctggattcatatccttcgaaaacgacggaatgatgtatttaaaatccactggctgatggcggcccttcctttcaccaagtctctttccttggtgttccatgcaattgactaccactacatctcctcccagggcttccctatcgaaggctgggctgttgtgtactacataactcaccttttgaaaggggcgctactcttcatcaccattgcactcattggcactggctgggctttcattaagcacatcctttctgataaagacaaaaagatcttcatgattgtcattccactccaggtcctggcaaatgtagcctacatcatcatagagtccaccgaggagggcacgactgaatatggcttgtggaaggactctctatttctggtcgacctgttgtgttgtggtgccatcctcttcccagtggtgtggtcaatcagacatttacaagaagcatcagcaacagatggaaaaggtgacagcatgggacctcttcagcagagagcgaatctaagagcaggaagtcgcatagagtctcaccattttgcccaggctgatcttgaactcctggcctctagctgtcctcctgcctcagtctcccaaagggctgggattacagctgctattaacttagcaaagctgaaacttttcagacattattacgtcttgattgtgtgttacatatacttcactaggatcattgcatttctcctcaaactcgctgttccattccagtggaagtggctctaccagctcctggatgaaacggccacactggtcttctttgttctaacggggtataaattccgtccggcttcagataacccctacctacaactttctcaggaagaagaagacttggaaatggagtccgttgtgacaacatctggggtgatggaaagtatgaagaaagtcaagaaggtgaccaacggctccgtggagccccagggcgagtgggaaggcgccgtgtgacagagccgaccctgaggatggcactgtccaaggaaactgttaacttattcatagtcctattggacagcaggagcagctcctacagtgaactattggcaccaccgacagtgacaccagggcacatggctggagcacagtgccgcggaaacctgattttgtactctcttttatggaaacgatctgtggctgtttagaggcagctggatcctctttcaggcgggaatgggagggcgggcacagggaggaggagaggaagagaaaaggaagaattcatttttaatttaggtttctttttttcttcttcatttcggagctctaaggtgtatgcagttgtgaccccatgtgtggggaagtgtagcaaggacggctggtggagggggaaggagggtgcgaggtgtctgtctgatgctttaggaaatgtctactgaggaccctgggacttaagaagaagggcggggagagtgccattgcctgtttgggagacaaaaatgaacgaaaacaggtgactttggaaagcaaagtcaaaacccagtttaggatgtagcacctgccccaggattcctgccctcggctttgccccagacccttattccagatgctgagagtgaccaggacagcagctcctgaggcccagtggtcttctttccaacaggaaaagaaggctgtgatgtcgctgtcaggatcatgccctgtggcacagcacaggtggtgggaggtggttttctgactgagatgttgcctgatggatggaaagaaatgtatttttaagttcaaaaagcattatcctgtggcgttgcctggacatccactccctgacagcccagagcagcactgtctggcttcccttcatgcttgtggctttgttgtgtttgatcagaattttgggggaaatggaaagttttcctcaaggagcagctgggggcagaataggtagtatttaagcaaatacttaagtccaagcaaatcatccccattaaaaagcttttcctgtaggctagtagg

SEQ ID NO: 8768 - DNA, 2540 bp, Homo sapiens
  source 1..2540: mol_type = unassigned DNA; mol_type = unassigned DNA
gccgagcccagctccccgcggcggccgctagcccccggccccgagccaccactccgacctagcggccgccgcccccggtgcgggatgaggagatccgcggccgccactgggccccatggaggagccgcagccgccccgcccaccagcgagcatggccttactgggcagccagcactccggcgccccctccgcggccggcccacctggcgggacttcctccgcggccacggcggccgtgctctccttcagcaccgtggcgaccgcggcgctggggaacctgagcgacgcaagcggaggcggcacagctgccgctcccggtggcggcggccttggcgggtccggggcagcgcgggaggcgggggcggcggtgaggcggccgctaggcccggaggcggcgccgctgctgtcgcacggagctgcagtggcggcccaggcgctcgtcctcctgctcatcttcctgctgtctagccttggcaactgcgcggtgatgggggtgattgtgaagcaccggcagctccgcaccgtcaccaacgccttcatcctgtcgctgtccctatcggatctgctcacggcgctgctctgcctgcccgccgccttcctggacctcttcactccgcccgggggttcggcgcctgccgccgccgcggggccctggcgcggcttctgcgccgccagccgcttcttcagctcgtgcttcggcatcgtgtccacgctcagcgtggcgctcatctcgttggaccgttactgcgctatcgtgcggccgccgcgggagaagatcggccgccgccgcgcgctgcagctgctggcgggcgcctggctgacggccctgggcttctccttgccctgggagctgctcggggcgccccgggaactcgcggcggcgcagagcttccacggctgcctctaccggacctccccggaccccgcgcagctgggcgcggccttcagcgtggggctggtggtggcctgctacctgctgcccttcctgctcatgtgcttctgccactaccacatctgcaagacggtgcgcctgtcggacgtgcgcgtgcggccggtgaacacctacgcgcgcgtgctgcgcttcttcagcgaggtgcgcacggccaccaccgtcctcatcatgatcgtcttcgtcatctgctgctgggggccctactgcttcctggtgctgctggccgccgcccggcaggcccagaccatgcaggccccctcgctcctcagcgtggtggccgtctggctgacctgggccaatggggccatcaaccctgtcatctacgccatccgcaatcccaacatttcgatgctcctagggcgcaaccgcgaggagggctaccggactaggaatgtggacgctttcctgcccagccagggcccgggtctgcaagccagaagccgcagtcgccttcgaaaccgctatgccaaccggctgggggcctgcaacaggatgtcctcttccaacccggccagcggagtggcaggggacgtggccatgtgggcccgcaaaaatccagttgtacttttctgccgagagggaccaccagagccggtgacggcagtgaccaaacagcctaaatccgaagctggggataccagcctctaagacggttggaatggccagcttatgaaggcaaatttccactcgcattatttaatgatggaagattctgggggagagttgtggatttcataaagccaaacatttaaagctagagacgggggaggcttaccactttccccaaacaacataaaagacaatgtcccttcttcaaaagtgccaaaaggaatgtaaaatgcaaaaattaaaacaatcttaaaccacataaccaagcattgtgaactgctatccaactatttagtggtagaactaggatttgaactgcagtctgtttggcctcagaactccatgtttgtttctctctatccccacagaagtctacagggcaacttcctgggagctaaggctactaaaaggtagaagccacagtactcatctgcagagggcttacagcctcagcaaggaccttgtggctttgtaacaacaatcagccataacaagtttacttgtggaaaagaaaaggtgtagcactttcagaagaggctatcaaagaaaagagatgaacttggaagcaagagatacgcagctcagcatgacagagactccattccaggtggaaaaagcacatggctctttcttctccgagatcccaggactatcttattttcctcagaggggcaggttacaagaacttcacatctctcaggctacatgttgcaaaggttaaattccaggttgtacgatttttcacttccaccatcaagttatgagtgtgattgtttccctgcagttttgccaatagagtgattttagactatttacatcgtgggttacaaccaatgtcagttattctggggaaacccaactgccatgttgtgaggacactcaagcagccctatggaggagcccacatggtgagtgaataactacaagctgactctaattttaaaaaataaaaattttatctctcaccaattttaaaatg

SEQ ID NO: 8769 - DNA, 4578 bp, Homo sapiens
  source 1..4578: mol_type = unassigned DNA; mol_type = unassigned DNA
ggccgagcccagctccccgcggcggccgctagcccccggccccgagccaccactccgacctagcggccgccgcccccggtgcgggatgaggagatccgcggccgccactgggccccatggaggagccgcagccgccccgcccaccagcgagcatggccttactgggcagccagcactccggcgccccctccgcggccggcccacctggcgggacttcctccgcggccacggcggccgtgctctccttcagcaccgtggcgaccgcggcgctggggaacctgagcgacgcaagcggaggcggcacagctgccgctcccggtggcggcggccttggcgggtccggggcagcgcgggaggcgggggcggcggtgaggcggccgctaggcccggaggcggcgccgctgctgtcgcacggagctgcagtggcggcccaggcgctcgtcctcctgctcatcttcctgctgtctagccttggcaactgcgcggtgatgggggtgattgtgaagcaccggcagctccgcaccgtcaccaacgccttcatcctgtcgctgtccctatcggatctgctcacggcgctgctctgcctgcccgccgccttcctggacctcttcactccgcccgggggttcggcgcctgccgccgccgcggggccctggcgcggcttctgcgccgccagccgcttcttcagctcgtgcttcggcatcgtgtccacgctcagcgtggcgctcatctcgttggaccgttactgcgctatcgtgcggccgccgcgggagaagatcggccgccgccgcgcgctgcagctgctggcgggcgcctggctgacggccctgggcttctccttgccctgggagctgctcggggcgccccgggaactcgcggcggcgcagagcttccacggctgcctctaccggacctccccggaccccgcgcagctgggcgcggccttcagcgtggggctggtggtggcctgctacctgctgcccttcctgctcatgtgcttctgccactaccacatctgcaagacggtgcgcctgtcggacgtgcgcgtgcggccggtgaacacctacgcgcgcgtgctgcgcttcttcagcgaggtgcgcacggccaccaccgtcctcatcatgatcgtcttcgtcatctgctgctgggggccctactgcttcctggtgctgctggccgccgcccggcaggcccagaccatgcaggccccctcgctcctcagcgtggtggccgtctggctgacctgggccaatggggccatcaaccctgtcatctacgccatccgcaatcccaacatttcgatgctcctagggcgcaaccgcgaggagggctaccggactaggaatgtggacgctttcctgcccagccagggcccgggtctgcaagccagaagccgcagtcgccttcgaaaccgctatgccaaccggctgggggcctgcaacaggatgtcctcttccaacccggccagcggagtggcaggggacgtggccatgtgggcccgcaaaaatccagttgtacttttctgccgagagggaccaccagagccggtgacggcagtgaccaaacagcctaaatccgaagctggggataccagcctctaagacggttggaatggccagcttatgaaggcaaatttccactcgcattatttaatgatggaagattctgggggagagttgtggatttcataaagccaaacatttaaagctagagacgggggaggcttaccactttccccaaacaacataaaagacaatgtcccttcttcaaaagtgccaaaaggaatgtaaaatgcaaaaattaaaacaatcttaaaccacataaccaagcattgtgaactgtaagtgccaaaaatgacaaaaataacattcactataactgaaaagctcatattataggaccacactgtgaaacaaacaaaacattgaatgcaaccagtattgttcaactacacagaatttcaggaatgaatggagaccttcagagctgcttgaaagcccctctaaatcgctaccatccaacaaaactttagcttctagagcttgcacctctgacatgctttgggtgcttagattgcaagtggaaaagtcttatccttacacacattggtgcacctcctcaccccaccccctaataacctttgtggaaaatttttaattcataacccatttaaaatcattttaggattttgaaaagctggttattattagataaaattcaaccatctgaaggacaaatagaagtatgaacataaagaaatgtgtcttttaaatgttttccaagattatatgtaaaaattaacattccttccacccgcgtcatacctccaaaatgatcttccttggaaaactttgaagttttatccttactctaacctgttacttttatttctgataaattttggaatgctgctctcagaatgctttcacatttaaaaaaatattttcattgtagaaaatttttgtcttttgaggtaaatttgatttttggatatagccaaaaatgtaatttgaagtcaagttgattgaataaggtgagtgatgccactttatttaaatttttattattttttaaaatgagacctctataaaacaacaaggttgggtttcctacgtggcttttagctaactgaaaacgattccaaagagaaattctaaaactattttgagaagcagcctcttggaattagcgtagacttttccaaatagatcataccctcctacatttagaaatttggtatattttgtattttttaaaatagctgatggttgctttatagctatgacttgtcgaagataatgtatttattaaagggagaataggtgtgggactatatgtaacggtattaaaacacaggcataaagttggagaagaacttcaagcaaactgaaaatatctttagaaatatgcaaatcaaagatgctttttaaatttctatcttagcagaaaagatggttttacaataattcaaaagcgtatgtgaactttctaatgttaaatacgactatacacagaatcatttactcagaatttttttaaatattatttttccctttcttttcctccatcctgccccttttcttcagtatttcatagccttaattgaacaagttatttacagtagatatgaaaagacattagctgtcgtatgaagatttcaatgtgaaatagccagcattttcttcctgtaaagtatttaaatatgtttttaagtatttctttgtttgacaggtgggtacatgtcattattttgtaatcaaaggtggaaatatatgagtcatgtcagagctaaagatgttttaattttttctgcttctcagggtatcatcacaaatcagaagtttgtaaattgtatatattttgctacactcaatgtagtacaaagtagatgagataatccctcccctctagcccttattttataaagcatatacagacttcatgcagctggactaacaaaaacaggtgtctgcggtatttgcctgttaaaggcaaaaaattgtgtattttttggcaccgagtcacttttgggatttagagagaaatgataaagtcttcaattataaaagacatcatagaatagaagtacagttgtgaataaagggcagagggttagagatcttagagtaaggaggtgagcgtgttgcaaaatagtgtgttgcctgagaagaagaattgaaggaaggcattgaaaaataaatgtgatatagaataaacctacctggtgagtgaagggaaaatctgagagattggaagtgacaaggtgatggcatgaaggactttaaggaagaaaaggaattccagccctaccttttcggtggcaggaagttttaggaaaggcatggcttgtgaaagaggccattctgttagtggctccgagagtcatggtaggcaagaattggaggggaaaaagagaaaattgttcataaattactgaacaatttacaatgctctaaattgtttgtttttaatccaaggctatccaactatttagtggtagaactaggatttgaactgcagtctgtttggcctcagaactccatgtttgtttctctctatccccacagaagtctacaggtaaggaaatcaatcatgatcaattatggtactgtcatcattatcatcatcgtgatcatcatctaccatttttgtttcctactttatataagggcaacttcctgggagctaaggctactaaaaggtagaagccacagtactcatctgcagagggcttacagcctcagcaaggaccttgtggctttgtaacaacaatcagccataacaagtttacttgtggaaaagaaaaggtgtagcactttcagaagaggctatcaaagaaaagagatgaacttggaagcaagagatacgcaggtataagtcagccacccatttgacccagtgtaaatacttagacaatcaatacctcaaaaggtgaagaaagaatgattctcaaaataatctaagacttcgacctttcgttgtgcttactatgagtatgcaattatagtgacttcatgggaaaacgagaaagaaaagctatgaaatattggaatggattaaatattgagtactatgtaa

SEQ ID NO: 8770 - DNA, 4082 bp, Homo sapiens
  source 1..4082: mol_type = unassigned DNA; mol_type = unassigned DNA
ccgccgccagcatgccccggcccgcgggccgctccgccgccagccacccccgcggccctcggcggcctgcgctcggcccgggggcgcgggaaccgcagccggagccggaggcgggagcagcgagccggagccccgggcgctcgaatgcaggatgctcgtggtccccagcatccttgagccaccaggagtgagggctgctgctccctgagacctggctccaaggaggatgccacagccgcctgccagctccggtctgcaccatgagtgatgagcggcggctgcctggcagtgcagtgggctggctggtatgtgggggcctctccctgctggccaatgcctggggcatcctcagcgttggcgccaagcagaagaagtggaagcccttggagttcctgctgtgtacactcgcggccacccacatgctaaatgtggccgtgcccatcgccacctactccgtggtgcagctgcggcggcagcgccccgacttcgagtggaatgagggtctctgcaaggtcttcgtgtccaccttctacaccctcaccctggccacctgtttctctgtcacctccctctcctaccaccgcatgtggatggtctgctggcctgtcaactaccggctgagcaatgccaagaagcaggcggtgcacacagtcatgggtatctggatggtgtccttcatcctgtcggccctgcctgccgttggctggcacgacaccagcgagcgcttctacacccatggctgccgcttcatcgtggctgagatcggcctgggctttggcgtctgcttcctgctgctggtgggcggcagcgtggccatgggcgtgatctgcacagccatcgccctcttccagacgctggccgtgcaggtggggcgccaggccgaccgccgcgccttcaccgtgcccaccatcgtggtggaggacgcgcagggcaagcggcgctcctccatcgatggctcggagcccgccaaaacctctctgcagaccacgggcctcgtgaccaccatagtcttcatctacgactgcctcatgggcttccctgtgctggtggtgagcttcagcagcctgcgggccgacgcctcagcgccctggatggcactctgcgtgctgtggtgctccgtggcccaggccctgctgctgcctgtgttcctctgggcctgcgaccgctaccgggctgacctcaaagctgtccgggagaagtgcatggccctcatggccaacgacgaggagtcagacgatgagaccagcctggaaggtggcatctccccggacctggtgttggagcgctccctggactatggctatggaggtgattttgtggccctagataggatggccaagtatgagatctccgccctggaggggggcctgccccagctctacccactgcggcccttgcaggaggacaagatgcaatacctgcaggtcccgcccacgcggcgcttctcccacgacgatgcggacgtgtgggccgccgtcccgctgcccgccttcctgccgcgctggggctccggcgaggacctggccgccctggcgcacctggtgctgcctgccgggcccgagcggcgccgcgccagcctcctggccttcgcggaggacgcaccaccgtcccgcgcgcgccgccgctcggccgagagcctgctgtcgctgcggccctcggccctggatagcggcccgcggggagcccgcgactcgccccccggcagcccgcgccgccgccccgggcccggcccccgctccgcctcggcctcgctgctgcccgacgccttcgccctgaccgccttcgagtgcgagccacaggccctgcgccgcccgcccgggcccttccccgctgcgcccgccgcccccgacggcgcagatcccggagaggccccgacgcccccaagcagcgcccagcggagcccagggccacgcccctctgcgcactcgcacgccggctctctgcgccccggcctgagcgcgtcgtggggcgagcccggggggctgcgcgcggcgggcggcggcggcagcaccagcagcttcctgagttccccctccgagtcctcgggctacgccacgctgcactcggactcgctgggctccgcgtcctaggaccgccggcgcctccccacggacgccaggcaggccaggccgctctccggggccgcagcaccaaagacgcccgcctccgccccgcgcgcagacatgcgccacccctcccaggggtgagggggcgttggcctcagcgtttgtcttccggctcctcccagctggccttgtcccaggggcgacggctgccccggacgactgcgctgggcaccgcatgtcccgggccgagtgaggtcgggcctggggagctgagtgacatcccaagcttgggcttgggtagtgagtgacatgtgcacacgtccagctgcgccatcaccagccctgcgcaacaggacgtcgggagcagggaacctgagacagggccactgcgggatcggacaaagccccgctttggagaggctgagctggagccattggcctccccaggggctttccacccacactgcaccataaccgccacacccttcggggggggggagggtacagagggtctctaagcacaggggtgttcagagcccgaacaagctttgatcaggtttccctgcttccgacctgtcctgcctcagtttccccatctgtgatgagcaggtgaccacgttaactctcagggctgtttgaagtctcttggttgtaggccctcgccactgagtggcccaggtgtgagaggtagtctagagccctctgcggcctttgtggaggtccgttttcagcatgtggcctggtgtggctccctaggcctgaggcctcccactctcagtgccccctgcccccttgggaacccacactccaccccagctaagcacaacactgtggaccaccaccaatggcacctgagccaccttgaccaccattagtgtccccaccctcattactctgccgtcgttgcctgtccccaccacatcatctccctccatggctcccaccatgacgctggcaggtgcaagcggagagcacgagggcagcagggcctggccttccgtgtccctgcgtcatccccagcctcactccccacccgtgcaggcctggccaggaagggatcctggcaggggcttccaggttctcagctcaaggcctggtcccgggcaggcgtccaacccctgggagcaatgtatttctttgccttccatcctgggcagaccccttacaggcctgggcattgccatgggccctgggtcttcccaggctaaggagaaccaggaacagctataaccttgagctagtgaaatagggtagatgagaaggctgtctcctccagacccctacccctacacagtggccccacaatatgaagacctggggtaattccaaggtgagcatagagcctgcctgtgcccagttccttctggccctcaggtggccaagcccatctcttcatccttcagatagggtcccactcccagaagaagctgctggggtgggggtgggaggctgcctaagcctgtctgtgcttcagaggcccctccagtccctggctgtggggtaactgggggtatgagctgtggccacaggtgagcaaggcagggaactgcaatccagccctggccgcgggaggggccatctctggccaatgctgctgtgccttcaaggactgacaagttacgtaggggcagaggtcgccagctagccagtgtctcctccatctggggggcgtctgtccacttgtcaccttaggttttcactcatttgtcaccttggggttttgctctgtgtgtttcatatccaacggcaatacttgcagggggacagagtcctctaaatactccaatcctgcggtttttacaaacataaagggggagaccccaagtggaggaccctgggcctggagctccctcccaaactttgtccagcatccagcctgttccctgggctcactggggagggagttgtcttcatagcacacccagagccagggatccctttgtagttttttgacaacggagcatttctcttctgtacaggacccaataaaaacttccttatgatttgcacctggca

SEQ ID NO: 8771 - DNA, 2676 bp, Homo sapiens
  source 1..2676: mol_type = unassigned DNA; mol_type = unassigned DNA
gtaggtgcgtgcccgggactctgccgatgcgggccgcgccccctggggccaagagactccacgtcccgctcagggcaaagggtgtggggagaagcggtcacgcccctcggctggaatccgtgaggaccaggtctttttcagtgtgctcaatatggtcaccaagcctggaaacatagagtctcaccctgttgcttaggcagatggcgcgatctcggctcctgggttcaagcaattctcctgcctcagcctcctgaatagccgggattacagtcgtccagcatgctctgcccaccccacgccgaggtgcactgaccatgagcctcaactcctccctcagctgcaggaaggagctgagtaatctcactgaggaggagggtggcgaagggggcgtcatcatcacccagttcatcgccatcattgtcatcaccatttttgtctgcctgggaaacctggtcatcgtggtcaccttgtacaagaagtcctacctcctcaccctcagcaacaagttcgtcttcagcctgactctgtccaacttcctgctgtccgtgttggtgctgccttttgtggtgacgagctccatccgcagggaatggatctttggtgtagtgtggtgcaacttctctgccctcctctacctgctgatcagctctgccagcatgctaaccctcggggtcattgccatcgaccgctactatgctgtcctgtaccccatggtgtaccccatgaagatcacagggaaccgggctgtgatggcacttgtctacatctggcttcactcgctcatcggctgcctgccacccctgtttggttggtcatccgtggagtttgacgagttcaaatggatgtgtgtggctgcttggcaccgggagcctggctacacggccttctggcagatctggtgtgccctcttcccctttctggtcatgctggtgtgctatggcttcatcttccgcgtggccagggtcaaggcacgcaaggtgcactgtggcacagtcgtcatcgtggaggaggatgctcagaggaccgggaggaagaactccagcacctccacctcctcttcaggcagcaggaggaatgcctttcagggtgtggtctactcggccaaccagtgcaaagccctcatcaccatcctggtggtcctcggtgccttcatggtcacctggggcccctacatggttgtcatcgcctctgaggccctctgggggaaaagctccgtctccccgagcctggagacttgggccacatggctgtcctttgccagcgctgtctgccaccccctgatctatggactctggaacaagacagttcgcaaagaactactgggcatgtgctttggggaccggtattatcgggaaccatttgtgcaacgacagaggacttccaggctcttcagcatttccaacaggatcacagacctgggcctgtccccacacctcactgcgctcatggcaggtggacagcccctggggcacagcagcagcacgggggacactggcttcagctgctcccaggactcagggacagatatgatgctgcttgaggactacacgtctgatgacaaccctccctctcactgcacttgcccacccaagagaaggagctcggtgacatttgaggatgaagtggaacaaatcaaagaagctgccaagaactcgattcttcatgtgaaagctgaagtacacaagtccttggacagttacgcagcaagcttggccaaagccattgaggccgaagccaaaatcaacttatttggggaggaggctttgccaggggtcttggttacagcacggactgtcccggggggcggcttcgggggccgccgaggcagcagaactcttgtgagccagaggctgcagttgcagagcatcgaagaaggagatgttttagctgccgagcagagatgagggcctcagggtgccgtggggctgcagcctgagaggctggcccggggaggagttcccatcaccgcctgtgccgcggccttgggagcatgtcactgtgtacagctggccacacacagggaaggagcagcatctggtatgcagccaccaggacaaggactgaaaataatgtctacagtccacagcttcagcatttccagagaccacatgtgagcttcttttaggtcccagtgatgggaccagaagcatctaaagcaaaaaaaaaaccaaaaaaaaatctagagatgtggctgtggctttttgggaggtggggcatgggaggaccagagacgaagggcttggaaggagacccccacatgcatcatttcctcctcttcacagtgtgctgggagtccagccgtgcactgtgccagatgcctcaggaggagaaccctccccagtgtactgtgaaggatgacacagcacttcttcctaatgacacgcgaccgtcctggtgcctctacatggttgatgcgggcagtgtgggaccctcagttctaggactggtccgcagagaaagcacccaggagcagagcgcttcggagcggtcctcagtggcgccacctgctggtgctaatagggacagccacaggcctcttgcagactggcccaccctgcctacttccctactgacaagttctttggtatttcaaaagggagaaaccactataaaagacaagaggaagggcaggtactaggtgtttcatttccagaattaaaaaaaaaatccatttaa

SEQ ID NO: 8772 - DNA, 2512 bp, Homo sapiens
  source 1..2512: mol_type = unassigned DNA; mol_type = unassigned DNA
tgctcttgggagcctttgaaaaaccacctctgacttgacctgggtttcctgttccccatgagtgctccagggctgcgcctaagcctgtgtcatggaactcaggggtgagccttggggttggcaccgggaccaggccatgacctctcttagtcatggagaattttccttggaaaattccttatctggcaacccagagggccccgcaccacacggagtcatatatgaagcactgatcacactgtgccctctaggcctgagtccctcatgtgatttaaggaaagtctctgttactccccagtctgcttccctgttctcagacaactaaagggatccagaggcactgcaacattcattcattcattcattcattcagcagttatttgccacgttcctgccttggccggaccctgtgccagatgctgggggcacagtggtgaactgccattgttgtggaggcttcagttcataaaagattgaactgtaaagtatataaagattgtaaagtatacaattctcattgaattgtatactttaaatgagtcagttacatggcatgtgaattacatctctataaaactggttttgaaagatgatgaatgtgtcgagagctgtgaaaggggaagccctagtggagtgggagcccgtgggctgctataggtaggggagttagagagactgctctgagcatgcgatgtcgaaagctgaagcatacgtggaaggtgccccggcgcaaggagtgaggggacagcactgtaggcagaagaaagagcatgggcttcggggcacacagatctggtgtgagtctcagccctgccctttgttcgctgtgtccttatcaggaatgatggccctcaatttagcccctgctgtgtgcaagcactatgctagatgtttacatgtctcaactcaaaatccccacaactccgtgaggtagactgaatgatgaccccaggtttacagacgtggaaagatactgaggcattaaataacctgccagtgatcctaggtctgtccgacccaagcctgtgtgtttaaccaccatattctacctcccaaaggactgtttcttctctatgtcgggtaatcacacctctgcgaggtgctctgaaacagcatctaaagagctccaggtttctctttcttccttattttctgagcttcaaggcctttatggattgaaagctggaagctaagaacggggctggatctgacactggtcctagtgttggggaagggcactgttgagtgatgggtcccatctcagctcttccttccctcccttccctctgccccattccctctgcctgctctgcccacctatctctagtaggacttccctgaccttctccctttatttccctgctttttaggggaaaatttgtcaattattttttgatccccaaagaactctacattttggagctttacatgtttatttagtacaacatattttaactgtggtgatagaaattcagactgtaggaagaatcactcagaatataaagttccttttagtaggaccctctcctctactcggcccttctccccacttcccttccatgctgggccggcagatgccatgcttctggggtctggtcattgaggcagataaccccctacttcagataacttggctgcattttttgtgtggctgacgcagccccaccggctgtctgcaaactccctgaaacaggatgacaggcgggtgtttcttgggcacgtgctgcggcgcagtcagctccacttgatgatgggtttggatgaacgggagaagaggggtggaaggggtgttgagaggggagaagaggccaggaggactttagattgtagttacatatgcacaatctgcccgttgttttagggacagatatgatgctgcttgaggactacacgtctgatgacaaccctccctctcactgcacttgcccacccaagagaaggagctcggtgacatttgaggatgaagtggaacaaatcaaagaagctgccaagaactcgattcttcatgtgaaagctgaagtacacaagtccttggacagttacgcagcaagcttggccaaagccattgaggccgaagccaaaatcaacttatttggggaggaggctttgccaggggtcttggttacagcacggactgtcccggggggcggcttcgggggccgccgaggcagcagaactcttgtgagccagaggctgcagttgcagagcatcgaagaaggagatgttttagctgccgagcagagatgagggcctcagggtgccgtggggctgcagcctgagaggctggcccggggaggagttcccatcaccgcctgtgccgcggccttgggagcatgtcactgtgtacagctggccacacacagggaaggagcagcatctggtatgcagccaccaggacaaggactgaaaataatgtctacagtccacagcttcagcatttccagagaccacatgtgagcttcttttaggtcccagtgatgggaccagaagcatctaaagcaaaaaaaaaacc

SEQ ID NO: 8773 - DNA, 1983 bp, Homo sapiens
  source 1..1983: mol_type = unassigned DNA; mol_type = unassigned DNA
ggtgcgtgcccgggactctgccgatgcgggccgcgccccctggggccaagagactccacgtcccgctcagggcaaagggtgtggggagaagcggtcacgcccctcggctggaatccgtgaggaccaggtgagcagccttctcccagccgggactcagggcgctgtctccccgagcctgggcgggcggcgggtggcgcgcccagaagtggcccggcgccgccggatgggcggctctgcccctcagatctgcgggagggagattcggctggttcttggaaaggggagaactcgaccagccctcggcgccttctgggccaagcttaacccccgtgcaacctttggacaaaggcatatgggatgagaacgtctgttggcctggtgcactgtgcgtcctctgagaggtgaaggagcactgtgtggtcagagggctgcgagctctctgtttgggttccgaggaagacagaatgggctgaactggaactgacctaaatgtcagcaagaggagctactatgctgtcctgtaccccatggtgtaccccatgaagatcacagggaaccgggctgtgatggcacttgtctacatctggcttcactcgctcatcggctgcctgccacccctgtttggttggtcatccgtggagtttgacgagttcaaatggatgtgtgtggctgcttggcaccgggagcctggctacacggccttctggcagatctggtgtgccctcttcccctttctggtcatgctggtgtgctatggcttcatcttccgcgtggccagggtcaaggcacgcaaggtgcactgtggcacagtcgtcatcgtggaggaggatgctcagaggaccgggaggaagaactccagcacctccacctcctcttcaggcagcaggaggaatgcctttcagggtgtggtctactcggccaaccagtgcaaagccctcatcaccatcctggtggtcctcggtgccttcatggtcacctggggcccctacatggttgtcatcgcctctgaggccctctgggggaaaagctccgtctccccgagcctggagacttgggccacatggctgtcctttgccagcgctgtctgccaccccctgatctatggactctggaacaagacagttcgcaaagaactactgggcatgtgctttggggaccggtattatcgggaaccatttgtgcaacgacagaggacttccaggctcttcagcatttccaacaggatcacagacctgggcctgtccccacacctcactgcgctcatggcaggtggacagcccctggggcacagcagcagcacgggggacactggcttcagctgctcccaggactcagggacagatatgatgctgcttgaggactacacgtctgatgacaaccctccctctcactgcacttgcccacccaagagaaggagctcggtgacatttgaggatgaagtggaacaaatcaaagaagctgccaagaactcgattcttcatgtgaaagctgaagtacacaagtccttggacagttacgcagcaagcttggccaaagccattgaggccgaagccaaaatcaacttatttggggaggaggctttgccaggggtcttggttacagcacggactgtcccggggggcggcttcgggggccgccgaggcagcagaactcttgtgagccagaggctgcagttgcagagcatcgaagaaggagatgttttagctgccgagcagagatgagggcctcagggtgccgtggggctgcagcctgagaggctggcccggggaggagttcccatcaccgcctgtgccgcggccttgggagcatgtcactgtgtacagctggccacacacagggaaggagcagcatctggtatgcagccaccaggacaaggactgaaaataatgtctacagtccacagcttcagcatttccagagaccacatgtgagcttcttttaggtcccagtgatgggaccagaagcatctaaagcaaaaaaaaa

SEQ ID NO: 8774 - DNA, 2400 bp, Homo sapiens
  source 1..2400: mol_type = unassigned DNA; mol_type = unassigned DNA
gttttgtgatgactgctccctggccttttggttccgagggagtgcagggcagcagtgtgaagacctgtttacgtccactccccactccccggggctggcttcgggacgaattcactgtggtattaacagagcccgggacagagcctggcagaaggcagatggatgctcgtgcccgtcggctggatgaatgaaaggtgagcagcaaaggcgataccaggatcgtccacggcgggactggaggaggagaatgggactgtgcggagcctgcgggaagaatctgaaagtgtctgtgtgatggagagagacatggaaaaggcgacgtcccagcggctggaactggggcggaggaacgggaacagggaaggcctgagttaggcaccacaaaggttttcaggagaaaagtggggcgagccgagaggagtctcaccctgttgcttaggcagatggcgcgatctcggctcctgggttcaagcaattctcctgcctcagcctcctgaatagccgggattacagtcgtccagcatgctctgcccaccccacgccgaggtgcactgaccatgagcctcaactcctccctcagctgcaggaaggagctgagtaatctcactgaggaggagggtggcgaagggggcgtcatcatcacccagttcatcgccatcattgtcatcaccatttttgtctgcctgggaaacctggtcatcgtggtcaccttgtacaagaagtcctacctcctcaccctcagcaacaagttcgtcttcagcctgactctgtccaacttcctgctgtccgtgttggtgctgccttttgtggtgacgagctccatccgcagggaatggatctttggtgtagtgtggtgcaacttctctgccctcctctacctgctgatcagctctgccagcatgctaaccctcggggtcattgccatcgaccgctactatgctgtcctgtaccccatggtgtaccccatgaagatcacagggaaccgggctgtgatggcacttgtctacatctggcttcactcgctcatcggctgcctgccacccctgtttggttggtcatccgtggagtttgacgagttcaaatggatgtgtgtggctgcttggcaccgggagcctggctacacggccttctggcagatctggtgtgccctcttcccctttctggtcatgctggtgtgctatggcttcatcttccgcgtggccagggtcaaggcacgcaaggtgcactgtggcacagtcgtcatcgtggaggaggatgctcagaggaccgggaggaagaactccagcacctccacctcctcttcaggcagcaggaggaatgcctttcagggtgtggtctactcggccaaccagtgcaaagccctcatcaccatcctggtggtcctcggtgccttcatggtcacctggggcccctacatggttgtcatcgcctctgaggccctctgggggaaaagctccgtctccccgagcctggagacttgggccacatggctgtcctttgccagcgctgtctgccaccccctgatctatggactctggaacaagacagttcgcaaagaactactgggcatgtgctttggggaccggtattatcgggaaccatttgtgcaacgacagaggacttccaggctcttcagcatttccaacaggatcacagacctgggcctgtccccacacctcactgcgctcatggcaggtggacagcccctggggcacagcagcagcacgggggacactggcttcagctgctcccaggactcagggacagatatgatgctgcttgaggactacacgtctgatgacaaccctccctctcactgcacttgcccacccaagagaaggagctcggtgacatttgaggatgaagtggaacaaatcaaagaagctgccaagaactcgattcttcatgtgaaagctgaagtacacaagtccttggacagttacgcagcaagcttggccaaagccattgaggccgaagccaaaatcaacttatttggggaggaggctttgccaggggtcttggttacagcacggactgtcccggggggcggcttcgggggccgccgaggcagcagaactcttgtgagccagaggctgcagttgcagagcatcgaagaaggagatgttttagctgccgagcagagatgagggcctcagggtgccgtggggctgcagcctgagaggctggcccggggaggagttcccatcaccgcctgtgccgcggccttgggagcatgtcactgtgtacagctggccacacacagggaaggagcagcatctggtatgcagccaccaggacaaggactgaaaataatgtctacagtccacagcttcagcatttccagagaccacatgtgagcttcttttaggtcccagtgatgggaccagaagcatctaaagc

SEQ ID NO: 8775 - DNA, 1381 bp, Homo sapiens
  source 1..1381: mol_type = unassigned DNA; mol_type = unassigned DNA
gccttatctttccagtcgtccagcatgctctgcccaccccacgccgaggtgcactgaccatgagcctcaactcctccctcagctgcaggaaggagctgagtaatctcactgaggaggagggtggcgaagggggcgtcatcatcacccagttcatcgccatcattgtcatcaccatttttgtctgcctgggaaacctggtcatcgtggtcaccttgtacaagaagtcctacctcctcaccctcagcaacaagttcgtcttcagcctgactctgtccaacttcctgctgtccgtgttggtgctgccttttgtggtgacgagctccatccgcagggaatggatctttggtgtagtgtggtgcaacttctctgccctcctctacctgctgatcagctctgccagcatgctaaccctcggggtcattgccatcgaccgctactatgctgtcctgtaccccatggtgtaccccatgaagatcacagggaaccgggctgtgatggcacttgtctacatctggcttcactcgctcatcggctgcctgccacccctgtttggttggtcatccgtggagtttgacgagttcaaatggatgtgtgtggctgcttggcaccgggagcctggctacacggccttctggcagatctggtgtgccctcttcccctttctggtcatgctggtgtgctatggcttcatcttccgcgtggccagggtcaaggcacgcaaggtgcactgtggcacagtcgtcatcgtggaggaggatgctcagaggaccgggaggaagaactccagcacctccacctcctcttcaggcagcaggaggaatgcctttcagggtgtggtctactcggccaaccagtgcaaagccctcatcaccatcctggtggtcctcggtgccttcatggtcacctggggcccctacatggttgtcatcgcctctgaggccctctgggggaaaagctccgtctccccgagcctggagacttgggccacatggctgtcctttgccagcgctgtctgccaccccctgatctatggactctggaacaagacagttcgcaaagaactactgggcatgtgctttggggaccggtattatcgggaaccatttgtgcaacgacagaggacttccaggctcttcagcatttccaacaggatcacagacctgggcctgtccccacacctcactgcgctcatggcaggtggacagcccctggggcacagcagcagcacgggggacactggcttcagctgctcccaggactcaggtaacctgcgtgctttataagcctctcacctgtcgcgttttccctgtgttgcgtttcccccgtgtcgcgtttcccctgtgcaggctcaagagctggcggaggggcatttcccacggtg

SEQ ID NO: 8776 - DNA, 313 bp, Homo sapiens
  source 1..313: mol_type = unassigned DNA; mol_type = unassigned DNA
gcctggtgcactgtgcgtcctctgagaggtgaaggagcactgtgtggtcagagggctgcgagctctctgtttgggttccgaggaagacagaatgggctgaactggaactgacctaaatgtcagcaagaggaggtctttttcagtgtgctcaatatggtcaccaagcctggaaacatagacagagcttcattcttgttgctcaggctggagtacaatggcacgatctcggctcactgcagctgccacctcctgggttcaagcgattctcctgcctcagcctctcaagtagaaatttttttttatgtgtatatat

SEQ ID NO: 8777 - DNA, 7388 bp, Homo sapiens
  source 1..7388: mol_type = unassigned DNA; mol_type = unassigned DNA
gactgctccctggccttttggttccgagggagtgcagggcagcagtgtgaagacctgtttacgtccactccccactccccggggctggcttcgggacgaattcactgtggtattaacagagcccgggacagagcctggcagaaggcagatggatgctcgtgcccgtcggctggatgaatgaaagctactatgctgtcctgtaccccatggtgtaccccatgaagatcacagggaaccgggctgtgatggcacttgtctacatctggcttcactcgctcatcggctgcctgccacccctgtttggttggtcatccgtggagtttgacgagttcaaatggatgtgtgtggctgcttggcaccgggagcctggctacacggccttctggcagatctggtgtgccctcttcccctttctggtcatgctggtgtgctatggcttcatcttccgcgtggccagggtcaaggcacgcaaggtgcactgtggcacagtcgtcatcgtggaggaggatgctcagaggaccgggaggaagaactccagcacctccacctcctcttcaggcagcaggaggaatgcctttcagggtgtggtctactcggccaaccagtgcaaagccctcatcaccatcctggtggtcctcggtgccttcatggtcacctggggcccctacatggttgtcatcgcctctgaggccctctgggggaaaagctccgtctccccgagcctggagacttgggccacatggctgtcctttgccagcgctgtctgccaccccctgatctatggactctggaacaagacagttcgcaaagaactactgggcatgtgctttggggaccggtattatcgggaaccatttgtgcaacgacagaggacttccaggctcttcagcatttccaacaggatcacagacctgggcctgtccccacacctcactgcgctcatggcaggtggacagcccctggggcacagcagcagcacgggggacactggcttcagctgctcccaggactcagggacagatatgatgctgcttgaggactacacgtctgatgacaaccctccctctcactgcacttgcccacccaagagaaggagctcggtgacatttgaggatgaagtggaacaaatcaaagaagctgccaagaactcgattcttcatgtgaaagctgaagtacacaagtccttggacagttacgcagcaagcttggccaaagccattgaggccgaagccaaaatcaacttatttggggaggaggctttgccaggggtcttggttacagcacggactgtcccggggggcggcttcgggggccgccgaggcagcagaactcttgtgagccagaggctgcagttgcagagcatcgaagaaggagatgttttagctgccgagcagagatgagggcctcagggtgccgtggggctgcagcctgagaggctggcccggggaggagttcccatcaccgcctgtgccgcggccttgggagcatgtcactgtgtacagctggccacacacagggaaggagcagcatctggtatgcagccaccaggacaaggactgaaaataatgtctacagtccacagcttcagcatttccagagaccacatgtgagcttcttttaggtcccagtgatgggaccagaagcatctaaagcaaaaaaaaaaccaaaaaaaaatctagagatgtggctgtggctttttgggaggtggggcatgggaggaccagagacgaagggcttggaaggagacccccacatgcatcatttcctcctcttcacagtgtgctgggagtccagccgtgcactgtgccagatgcctcaggaggagaaccctccccagtgtactgtgaaggatgacacagcacttcttcctaatgacacgcgaccgtcctggtgcctctacatggttgatgcgggcagtgtgggaccctcagttctaggactggtccgcagagaaagcacccaggagcagagcgcttcggagcggtcctcagtggcgccacctgctggtgctaatagggacagccacaggcctcttgcagactggcccaccctgcctacttccctactgacaagttctttggtatttcaaaagggagaaaccactataaaagacaagaggaagggcaggtactaggtgtttcatttccagaattaaaaaaaaaatccatttaagacgtaccactgttttaccggactgaatgggactgtagtgccaagcacagccaggaaatagagaaactgttattatggaagggaatttgttcacatgggaaagcctcattaaatagattctatgtgtgatgtttgagtgaccaatgaaaatagctggcctcagttctgcatggcacactcccaagagcaacagttactattatcacaagcctggtataaataagatagaagcagccctggacccacagccagcaacctgggttattggcccagctctgtctttgtgtgcacatgtcatttggacatcttgtcacctttctaggtcctctgtaaagtgggaaaacagagtggagttggattgaatggtctccaagatcatttccagctctgacctttggtgttctcaggatttgtaaagcagagataggtaaaacacaaaagcagacccacggaccgacctttgtataactttggagtgtggttgctcatgcacatgtgaagtgcaggcagatcaaggttctgtggctttgtctgccctgtccattagagcacaatctggatagaatgccagccaccaagatgcatgaggggcagggtcaccatctcagaaggggaagcacaggaatgtgattgggatggttaaacctctcttctcctccctttgtgctggaacagcagttgaagtttggtcctggagtaattgctgtgatgacttgggaagccactgatctcctcttgcgtctgcccttggcctgcatcatgactaaataagttcaggacttctctgctttggttggcagaaggtagattccaaggagatcttgctggttgctgagaggcagctgttctagaaagtgaattacccttgtggttttttctttggggcccagctagctcctggtgaggttgtgtttttgtgttgtgtggcagaaaccaatggttagctggtcccctggtctgcagtttgtaaaagacctttcatgaggcctggagtcttgctacctgtggtgattgaactcaactattctgggtcacctggatgccaggcgctggcctagcttctggatgggagtgggaaggagcagagggcaggttcacctgtgcaggtcagacactctgcttccatcactggatggcattcctacgtctgcgtgtggttcacgttttctatatatattccctgtatatatttttttctagcacttgtctactttctgaagggaccatattcctgatcaactagtgtgcacagaggtggaacagggcagagagacctttatctctaggatgggttgctggttaggtgtaggcattcttgagtgcagcagcttggctttgaaacgcaagggttggagaatgttcccctgactgtactagactgggctctagggaaagaatcctgagacagccccccactcccccactgaccccacactagctgggctattatagaatttaatctaaatctagaaatactgcatttcacaaaatgattcactgtgtttccctttttttactgaggtccaattcatttagtcgtctaccagacactgcacatccagtgtatgcgaagcaccaggctaggctctgtaggcaataccactaaagtgtgcactctgatttagggagcaggacctgtggataccgattctaataactagcaaagtcaagtcgtggttatagaaagaagtgtggcttcagagggaggtgggtatttccaaatatggagttagggatggctccatgaggtaagtgacagtttgagctaagtcttgaaggatgcttggcagctagaaccatattttccatattcaggaattcaaatttgcctttattcagctagagagaaagagagaagggggtgtgggggagaaggaaaagagaattttcacacattttgaagttcctgagagcatttctgaggatatctgccgttagtgcagaaggtcgaaaccccaagtgcccccactaaacccaggctctttagctgtaaactgccatgcagtggcaggcctgcagccttcctgatgggaccacatggacagtggcacatgggacatttggctactcgttagcttaaacaactcagtcctgtgtcttctggttttgacaagaccacatttaggactgctgcccacctctgcctctttcattgagatttccgccttattgggtccctgtgctatgccacagataccaggtttggggttgttttgacccagaaggcattgggagtcccacattacagagcacacacacagctcaacacagccatttccctggccagaggcaccaagactgaagttcaggcccttagacactaggtggcagcggtgtggctgtgcagagccaaggatgaacctgagagcttgtttgcctctggctgggcactcttgttttgaattcctttgcccttatcgtgtagtccacggccttggtgaccaaggaccacctggctagcctgcttacatgcatgaccccatccaggttcacaggtattgccactgagtgatcttaggtagatcactgctcctggagaagcagagttgaggagtgtaagacaagggccatctagtgccaatgttccttgattcttatttgaggagctactatgtggtctttctgtaaacaagtgaacaaccaatgagactaaatatttgcaatagataggctaaggaatttgggttgagacaggagacggaggaaaaatgctttgatacaatgacagatggttagtctcttcagatttccctgaatattttccatcccgacaatatgcctcttagatacttgcagattagacatgtctctggatggaccacaagatacattcacaacatgtgttcagccttgagccctggctgtgtcctgtctggaaggaactgaggatgatgtggctataaagaggaggcagtgagctggcatgtgactgccttctgtgggcctgacctgtttgacatttgagggcctatgatgtgctaggtgctgtgttaggtacttccaaatgctttatctcattttaccccagtgcaagtgtgatatagtgaggatggtgaagacgtgggtatggttaagtcatgagttcagatcccgtgcttccaattacatgggtgttttcaaacaagtcactacttatgagtttcctcatctgtgaagggaagtttagtcatctgtttcaatgtggagacacacaggattgagggagtcctccgtcacagggtgactgtctggattctatgaggaaatacttggaaagcatgcagcacaatgcctggggtgcagctgaagctgagccactggtgtttcttcacagtatctctgtggggagggtgtattattcctttttatagggatctctataatgaagtgagaatcttgaaaatataagtgttatcctagatgggaggtgttaaaggtttttgccttgggaattttgtcatatttgttgcacagcaaggaaggactttcagaaaagcagggatgtggtgaggaagagcaggcaatagagagcagggaggaaaggctaagtagcatctggaacttgagaagtctaagggagccaaaatgagattttctattaaaaatgtctatcctcagccgggcgtggtagctcacgcctgtaatcccagcactttggggggtcgagatgggcagatcacctgaggtcaggagttcgagaccagcctgaccaatatggagaaaccccgtctctactaaaaatacaaaattagttgcgcgtggtggtgggcgcctgtaatcccagctactcaggagcctgaggcaggagaatcacttaaacccaggaggcggaggttgcagtgagccgagatcgcgccattgcactccagcctgggcaacaagagcgaaaccccgcctaaaaaaagaaaaaaaagaaaaagtctatcctctatgctactggcctgtttgtacaaagataaaatcattctaatttgtccggaatgactatcaaagatgatcaaatccccagggcctggtgtaacgttccaaatcatagcacaaatacagcttgaccttccttacagtccagaaaggacattctccctgagaaatgcccttggttgctgaggacagctctgtcctgtagtgacagagtgactgcctggctgtggctcttgggttcacagaatccctaatcctccaagcccctaagaggcagggcagggatgctacccacaatatatgcagaaccccagatggagcctgtgggagagagaggaaattaccgtcttcactgtaggcaaaggagaatggctgtgattagccatatatgcctataagaaggagcagagccatactgtccttgtgggttgggagaggggacacagaatccagggcaattgtctgaggtctcaaagtaagttaagccagagtcaaagccaaactccaagtcttggccaaggggatgagaaaagcaaggagctagtcttataggtcaaggaagatgaggtatagttaagagtcatcagtatcacagaacaggccagcagggctttattaggtatgtagaactattataaaccaaggatcttgggagatattaatatctgctggccagacctaaaaaaaactgaaggcccaaggaaagtgactggactcactggaaagtatctaacaaatactttggattccaaagtatttccaataccttgaagattcctttgaaaacatcaaagcacaaactcaaatctgcacaagattacaaaagcacaattttggtgttatttttagaatgcaatacacaaagctatgttcatttctctcagcaagcattttcctgggtagtagtaatagcttaggaatcaaatgccacttttgtttttccttttttcactagtttgaaataccacaaatcacaggtgagtcagtcctcccagaggaaaagacagtcctagggagaatcacaggcctggcagacaagaccacactgagagcagtagaaggaacctgcatgcttaagggacagaggactgtgttgtgttctcataatagaccgctggatgaagaagtggttaaaaaccaaccctcgaaaaacaaaaatccctggctaatcctgaaatatatttaacttgaagtctttggatgatttttttaaggttaaaaaaaagtttaggattattataaatcaatatttataaataagcaacaatgtatttggaatttttgtttacctgattaaatatgtttttggtatgtgt

SEQ ID NO: 8778 - DNA, 7806 bp, Homo sapiens
  source 1..7806: mol_type = unassigned DNA; mol_type = unassigned DNA
gactgctccctggccttttggttccgagggagtgcagggcagcagtgtgaagacctgtttacgtccactccccactccccggggctggcttcgggacgaattcactgtggtattaacagagcccgggacagagcctggcagaaggcagatggatgctcgtgcccgtcggctggatgaatgaaagtcgtccagcatgctctgcccaccccacgccgaggtgcactgaccatgagcctcaactcctccctcagctgcaggaaggagctgagtaatctcactgaggaggagggtggcgaagggggcgtcatcatcacccagttcatcgccatcattgtcatcaccatttttgtctgcctgggaaacctggtcatcgtggtcaccttgtacaagaagtcctacctcctcaccctcagcaacaagttcgtcttcagcctgactctgtccaacttcctgctgtccgtgttggtgctgccttttgtggtgacgagctccatccgcagggaatggatctttggtgtagtgtggtgcaacttctctgccctcctctacctgctgatcagctctgccagcatgctaaccctcggggtcattgccatcgaccgctactatgctgtcctgtaccccatggtgtaccccatgaagatcacagggaaccgggctgtgatggcacttgtctacatctggcttcactcgctcatcggctgcctgccacccctgtttggttggtcatccgtggagtttgacgagttcaaatggatgtgtgtggctgcttggcaccgggagcctggctacacggccttctggcagatctggtgtgccctcttcccctttctggtcatgctggtgtgctatggcttcatcttccgcgtggccagggtcaaggcacgcaaggtgcactgtggcacagtcgtcatcgtggaggaggatgctcagaggaccgggaggaagaactccagcacctccacctcctcttcaggcagcaggaggaatgcctttcagggtgtggtctactcggccaaccagtgcaaagccctcatcaccatcctggtggtcctcggtgccttcatggtcacctggggcccctacatggttgtcatcgcctctgaggccctctgggggaaaagctccgtctccccgagcctggagacttgggccacatggctgtcctttgccagcgctgtctgccaccccctgatctatggactctggaacaagacagttcgcaaagaactactgggcatgtgctttggggaccggtattatcgggaaccatttgtgcaacgacagaggacttccaggctcttcagcatttccaacaggatcacagacctgggcctgtccccacacctcactgcgctcatggcaggtggacagcccctggggcacagcagcagcacgggggacactggcttcagctgctcccaggactcagggacagatatgatgctgcttgaggactacacgtctgatgacaaccctccctctcactgcacttgcccacccaagagaaggagctcggtgacatttgaggatgaagtggaacaaatcaaagaagctgccaagaactcgattcttcatgtgaaagctgaagtacacaagtccttggacagttacgcagcaagcttggccaaagccattgaggccgaagccaaaatcaacttatttggggaggaggctttgccaggggtcttggttacagcacggactgtcccggggggcggcttcgggggccgccgaggcagcagaactcttgtgagccagaggctgcagttgcagagcatcgaagaaggagatgttttagctgccgagcagagatgagggcctcagggtgccgtggggctgcagcctgagaggctggcccggggaggagttcccatcaccgcctgtgccgcggccttgggagcatgtcactgtgtacagctggccacacacagggaaggagcagcatctggtatgcagccaccaggacaaggactgaaaataatgtctacagtccacagcttcagcatttccagagaccacatgtgagcttcttttaggtcccagtgatgggaccagaagcatctaaagcaaaaaaaaaaccaaaaaaaaatctagagatgtggctgtggctttttgggaggtggggcatgggaggaccagagacgaagggcttggaaggagacccccacatgcatcatttcctcctcttcacagtgtgctgggagtccagccgtgcactgtgccagatgcctcaggaggagaaccctccccagtgtactgtgaaggatgacacagcacttcttcctaatgacacgcgaccgtcctggtgcctctacatggttgatgcgggcagtgtgggaccctcagttctaggactggtccgcagagaaagcacccaggagcagagcgcttcggagcggtcctcagtggcgccacctgctggtgctaatagggacagccacaggcctcttgcagactggcccaccctgcctacttccctactgacaagttctttggtatttcaaaagggagaaaccactataaaagacaagaggaagggcaggtactaggtgtttcatttccagaattaaaaaaaaaatccatttaagacgtaccactgttttaccggactgaatgggactgtagtgccaagcacagccaggaaatagagaaactgttattatggaagggaatttgttcacatgggaaagcctcattaaatagattctatgtgtgatgtttgagtgaccaatgaaaatagctggcctcagttctgcatggcacactcccaagagcaacagttactattatcacaagcctggtataaataagatagaagcagccctggacccacagccagcaacctgggttattggcccagctctgtctttgtgtgcacatgtcatttggacatcttgtcacctttctaggtcctctgtaaagtgggaaaacagagtggagttggattgaatggtctccaagatcatttccagctctgacctttggtgttctcaggatttgtaaagcagagataggtaaaacacaaaagcagacccacggaccgacctttgtataactttggagtgtggttgctcatgcacatgtgaagtgcaggcagatcaaggttctgtggctttgtctgccctgtccattagagcacaatctggatagaatgccagccaccaagatgcatgaggggcagggtcaccatctcagaaggggaagcacaggaatgtgattgggatggttaaacctctcttctcctccctttgtgctggaacagcagttgaagtttggtcctggagtaattgctgtgatgacttgggaagccactgatctcctcttgcgtctgcccttggcctgcatcatgactaaataagttcaggacttctctgctttggttggcagaaggtagattccaaggagatcttgctggttgctgagaggcagctgttctagaaagtgaattacccttgtggttttttctttggggcccagctagctcctggtgaggttgtgtttttgtgttgtgtggcagaaaccaatggttagctggtcccctggtctgcagtttgtaaaagacctttcatgaggcctggagtcttgctacctgtggtgattgaactcaactattctgggtcacctggatgccaggcgctggcctagcttctggatgggagtgggaaggagcagagggcaggttcacctgtgcaggtcagacactctgcttccatcactggatggcattcctacgtctgcgtgtggttcacgttttctatatatattccctgtatatatttttttctagcacttgtctactttctgaagggaccatattcctgatcaactagtgtgcacagaggtggaacagggcagagagacctttatctctaggatgggttgctggttaggtgtaggcattcttgagtgcagcagcttggctttgaaacgcaagggttggagaatgttcccctgactgtactagactgggctctagggaaagaatcctgagacagccccccactcccccactgaccccacactagctgggctattatagaatttaatctaaatctagaaatactgcatttcacaaaatgattcactgtgtttccctttttttactgaggtccaattcatttagtcgtctaccagacactgcacatccagtgtatgcgaagcaccaggctaggctctgtaggcaataccactaaagtgtgcactctgatttagggagcaggacctgtggataccgattctaataactagcaaagtcaagtcgtggttatagaaagaagtgtggcttcagagggaggtgggtatttccaaatatggagttagggatggctccatgaggtaagtgacagtttgagctaagtcttgaaggatgcttggcagctagaaccatattttccatattcaggaattcaaatttgcctttattcagctagagagaaagagagaagggggtgtgggggagaaggaaaagagaattttcacacattttgaagttcctgagagcatttctgaggatatctgccgttagtgcagaaggtcgaaaccccaagtgcccccactaaacccaggctctttagctgtaaactgccatgcagtggcaggcctgcagccttcctgatgggaccacatggacagtggcacatgggacatttggctactcgttagcttaaacaactcagtcctgtgtcttctggttttgacaagaccacatttaggactgctgcccacctctgcctctttcattgagatttccgccttattgggtccctgtgctatgccacagataccaggtttggggttgttttgacccagaaggcattgggagtcccacattacagagcacacacacagctcaacacagccatttccctggccagaggcaccaagactgaagttcaggcccttagacactaggtggcagcggtgtggctgtgcagagccaaggatgaacctgagagcttgtttgcctctggctgggcactcttgttttgaattcctttgcccttatcgtgtagtccacggccttggtgaccaaggaccacctggctagcctgcttacatgcatgaccccatccaggttcacaggtattgccactgagtgatcttaggtagatcactgctcctggagaagcagagttgaggagtgtaagacaagggccatctagtgccaatgttccttgattcttatttgaggagctactatgtggtctttctgtaaacaagtgaacaaccaatgagactaaatatttgcaatagataggctaaggaatttgggttgagacaggagacggaggaaaaatgctttgatacaatgacagatggttagtctcttcagatttccctgaatattttccatcccgacaatatgcctcttagatacttgcagattagacatgtctctggatggaccacaagatacattcacaacatgtgttcagccttgagccctggctgtgtcctgtctggaaggaactgaggatgatgtggctataaagaggaggcagtgagctggcatgtgactgccttctgtgggcctgacctgtttgacatttgagggcctatgatgtgctaggtgctgtgttaggtacttccaaatgctttatctcattttaccccagtgcaagtgtgatatagtgaggatggtgaagacgtgggtatggttaagtcatgagttcagatcccgtgcttccaattacatgggtgttttcaaacaagtcactacttatgagtttcctcatctgtgaagggaagtttagtcatctgtttcaatgtggagacacacaggattgagggagtcctccgtcacagggtgactgtctggattctatgaggaaatacttggaaagcatgcagcacaatgcctggggtgcagctgaagctgagccactggtgtttcttcacagtatctctgtggggagggtgtattattcctttttatagggatctctataatgaagtgagaatcttgaaaatataagtgttatcctagatgggaggtgttaaaggtttttgccttgggaattttgtcatatttgttgcacagcaaggaaggactttcagaaaagcagggatgtggtgaggaagagcaggcaatagagagcagggaggaaaggctaagtagcatctggaacttgagaagtctaagggagccaaaatgagattttctattaaaaatgtctatcctcagccgggcgtggtagctcacgcctgtaatcccagcactttggggggtcgagatgggcagatcacctgaggtcaggagttcgagaccagcctgaccaatatggagaaaccccgtctctactaaaaatacaaaattagttgcgcgtggtggtgggcgcctgtaatcccagctactcaggagcctgaggcaggagaatcacttaaacccaggaggcggaggttgcagtgagccgagatcgcgccattgcactccagcctgggcaacaagagcgaaaccccgcctaaaaaaagaaaaaaaagaaaaagtctatcctctatgctactggcctgtttgtacaaagataaaatcattctaatttgtccggaatgactatcaaagatgatcaaatccccagggcctggtgtaacgttccaaatcatagcacaaatacagcttgaccttccttacagtccagaaaggacattctccctgagaaatgcccttggttgctgaggacagctctgtcctgtagtgacagagtgactgcctggctgtggctcttgggttcacagaatccctaatcctccaagcccctaagaggcagggcagggatgctacccacaatatatgcagaaccccagatggagcctgtgggagagagaggaaattaccgtcttcactgtaggcaaaggagaatggctgtgattagccatatatgcctataagaaggagcagagccatactgtccttgtgggttgggagaggggacacagaatccagggcaattgtctgaggtctcaaagtaagttaagccagagtcaaagccaaactccaagtcttggccaaggggatgagaaaagcaaggagctagtcttataggtcaaggaagatgaggtatagttaagagtcatcagtatcacagaacaggccagcagggctttattaggtatgtagaactattataaaccaaggatcttgggagatattaatatctgctggccagacctaaaaaaaactgaaggcccaaggaaagtgactggactcactggaaagtatctaacaaatactttggattccaaagtatttccaataccttgaagattcctttgaaaacatcaaagcacaaactcaaatctgcacaagattacaaaagcacaattttggtgttatttttagaatgcaatacacaaagctatgttcatttctctcagcaagcattttcctgggtagtagtaatagcttaggaatcaaatgccacttttgtttttccttttttcactagtttgaaataccacaaatcacaggtgagtcagtcctcccagaggaaaagacagtcctagggagaatcacaggcctggcagacaagaccacactgagagcagtagaaggaacctgcatgcttaagggacagaggactgtgttgtgttctcataatagaccgctggatgaagaagtggttaaaaaccaaccctcgaaaaacaaaaatccctggctaatcctgaaatatatttaacttgaagtctttggatgatttttttaaggttaaaaaaaagtttaggattattataaatcaatatttataaataagcaacaatgtatttggaatttttgtttacctgattaaatatgtttttggtatgtgt

SEQ ID NO: 8779 - DNA, 7655 bp, Homo sapiens
  source 1..7655: mol_type = unassigned DNA; mol_type = unassigned DNA
cccgggcggagagggcggtccggatggagccaggctaaactcattgtgcgaggctgagggctcagggcgcgggccgggaagggtccccgcccccacggcgctccctttctccccgcgcccctctcggaggtcagggctgtcctccgcccgcactgcgccttgctttggagagctggagctctttgtgggaagatgttgggggcgcgcccctcccctgcggcctggggcttctgagaggcccaccccattctgctgggtgcagcccgccccgtttctccggcgccgcccgaagcccctaaacagtccgctggatgggagggcgtaggtgcgtgcccgggactctgccgatgcgggccgcgccccctggggccaagagactccacgtcccgctcagggcaaagggtgtggggagaagcggtcacgcccctcggctggaatccgtgaggaccagctactatgctgtcctgtaccccatggtgtaccccatgaagatcacagggaaccgggctgtgatggcacttgtctacatctggcttcactcgctcatcggctgcctgccacccctgtttggttggtcatccgtggagtttgacgagttcaaatggatgtgtgtggctgcttggcaccgggagcctggctacacggccttctggcagatctggtgtgccctcttcccctttctggtcatgctggtgtgctatggcttcatcttccgcgtggccagggtcaaggcacgcaaggtgcactgtggcacagtcgtcatcgtggaggaggatgctcagaggaccgggaggaagaactccagcacctccacctcctcttcaggcagcaggaggaatgcctttcagggtgtggtctactcggccaaccagtgcaaagccctcatcaccatcctggtggtcctcggtgccttcatggtcacctggggcccctacatggttgtcatcgcctctgaggccctctgggggaaaagctccgtctccccgagcctggagacttgggccacatggctgtcctttgccagcgctgtctgccaccccctgatctatggactctggaacaagacagttcgcaaagaactactgggcatgtgctttggggaccggtattatcgggaaccatttgtgcaacgacagaggacttccaggctcttcagcatttccaacaggatcacagacctgggcctgtccccacacctcactgcgctcatggcaggtggacagcccctggggcacagcagcagcacgggggacactggcttcagctgctcccaggactcagggacagatatgatgctgcttgaggactacacgtctgatgacaaccctccctctcactgcacttgcccacccaagagaaggagctcggtgacatttgaggatgaagtggaacaaatcaaagaagctgccaagaactcgattcttcatgtgaaagctgaagtacacaagtccttggacagttacgcagcaagcttggccaaagccattgaggccgaagccaaaatcaacttatttggggaggaggctttgccaggggtcttggttacagcacggactgtcccggggggcggcttcgggggccgccgaggcagcagaactcttgtgagccagaggctgcagttgcagagcatcgaagaaggagatgttttagctgccgagcagagatgagggcctcagggtgccgtggggctgcagcctgagaggctggcccggggaggagttcccatcaccgcctgtgccgcggccttgggagcatgtcactgtgtacagctggccacacacagggaaggagcagcatctggtatgcagccaccaggacaaggactgaaaataatgtctacagtccacagcttcagcatttccagagaccacatgtgagcttcttttaggtcccagtgatgggaccagaagcatctaaagcaaaaaaaaaaccaaaaaaaaatctagagatgtggctgtggctttttgggaggtggggcatgggaggaccagagacgaagggcttggaaggagacccccacatgcatcatttcctcctcttcacagtgtgctgggagtccagccgtgcactgtgccagatgcctcaggaggagaaccctccccagtgtactgtgaaggatgacacagcacttcttcctaatgacacgcgaccgtcctggtgcctctacatggttgatgcgggcagtgtgggaccctcagttctaggactggtccgcagagaaagcacccaggagcagagcgcttcggagcggtcctcagtggcgccacctgctggtgctaatagggacagccacaggcctcttgcagactggcccaccctgcctacttccctactgacaagttctttggtatttcaaaagggagaaaccactataaaagacaagaggaagggcaggtactaggtgtttcatttccagaattaaaaaaaaaatccatttaagacgtaccactgttttaccggactgaatgggactgtagtgccaagcacagccaggaaatagagaaactgttattatggaagggaatttgttcacatgggaaagcctcattaaatagattctatgtgtgatgtttgagtgaccaatgaaaatagctggcctcagttctgcatggcacactcccaagagcaacagttactattatcacaagcctggtataaataagatagaagcagccctggacccacagccagcaacctgggttattggcccagctctgtctttgtgtgcacatgtcatttggacatcttgtcacctttctaggtcctctgtaaagtgggaaaacagagtggagttggattgaatggtctccaagatcatttccagctctgacctttggtgttctcaggatttgtaaagcagagataggtaaaacacaaaagcagacccacggaccgacctttgtataactttggagtgtggttgctcatgcacatgtgaagtgcaggcagatcaaggttctgtggctttgtctgccctgtccattagagcacaatctggatagaatgccagccaccaagatgcatgaggggcagggtcaccatctcagaaggggaagcacaggaatgtgattgggatggttaaacctctcttctcctccctttgtgctggaacagcagttgaagtttggtcctggagtaattgctgtgatgacttgggaagccactgatctcctcttgcgtctgcccttggcctgcatcatgactaaataagttcaggacttctctgctttggttggcagaaggtagattccaaggagatcttgctggttgctgagaggcagctgttctagaaagtgaattacccttgtggttttttctttggggcccagctagctcctggtgaggttgtgtttttgtgttgtgtggcagaaaccaatggttagctggtcccctggtctgcagtttgtaaaagacctttcatgaggcctggagtcttgctacctgtggtgattgaactcaactattctgggtcacctggatgccaggcgctggcctagcttctggatgggagtgggaaggagcagagggcaggttcacctgtgcaggtcagacactctgcttccatcactggatggcattcctacgtctgcgtgtggttcacgttttctatatatattccctgtatatatttttttctagcacttgtctactttctgaagggaccatattcctgatcaactagtgtgcacagaggtggaacagggcagagagacctttatctctaggatgggttgctggttaggtgtaggcattcttgagtgcagcagcttggctttgaaacgcaagggttggagaatgttcccctgactgtactagactgggctctagggaaagaatcctgagacagccccccactcccccactgaccccacactagctgggctattatagaatttaatctaaatctagaaatactgcatttcacaaaatgattcactgtgtttccctttttttactgaggtccaattcatttagtcgtctaccagacactgcacatccagtgtatgcgaagcaccaggctaggctctgtaggcaataccactaaagtgtgcactctgatttagggagcaggacctgtggataccgattctaataactagcaaagtcaagtcgtggttatagaaagaagtgtggcttcagagggaggtgggtatttccaaatatggagttagggatggctccatgaggtaagtgacagtttgagctaagtcttgaaggatgcttggcagctagaaccatattttccatattcaggaattcaaatttgcctttattcagctagagagaaagagagaagggggtgtgggggagaaggaaaagagaattttcacacattttgaagttcctgagagcatttctgaggatatctgccgttagtgcagaaggtcgaaaccccaagtgcccccactaaacccaggctctttagctgtaaactgccatgcagtggcaggcctgcagccttcctgatgggaccacatggacagtggcacatgggacatttggctactcgttagcttaaacaactcagtcctgtgtcttctggttttgacaagaccacatttaggactgctgcccacctctgcctctttcattgagatttccgccttattgggtccctgtgctatgccacagataccaggtttggggttgttttgacccagaaggcattgggagtcccacattacagagcacacacacagctcaacacagccatttccctggccagaggcaccaagactgaagttcaggcccttagacactaggtggcagcggtgtggctgtgcagagccaaggatgaacctgagagcttgtttgcctctggctgggcactcttgttttgaattcctttgcccttatcgtgtagtccacggccttggtgaccaaggaccacctggctagcctgcttacatgcatgaccccatccaggttcacaggtattgccactgagtgatcttaggtagatcactgctcctggagaagcagagttgaggagtgtaagacaagggccatctagtgccaatgttccttgattcttatttgaggagctactatgtggtctttctgtaaacaagtgaacaaccaatgagactaaatatttgcaatagataggctaaggaatttgggttgagacaggagacggaggaaaaatgctttgatacaatgacagatggttagtctcttcagatttccctgaatattttccatcccgacaatatgcctcttagatacttgcagattagacatgtctctggatggaccacaagatacattcacaacatgtgttcagccttgagccctggctgtgtcctgtctggaaggaactgaggatgatgtggctataaagaggaggcagtgagctggcatgtgactgccttctgtgggcctgacctgtttgacatttgagggcctatgatgtgctaggtgctgtgttaggtacttccaaatgctttatctcattttaccccagtgcaagtgtgatatagtgaggatggtgaagacgtgggtatggttaagtcatgagttcagatcccgtgcttccaattacatgggtgttttcaaacaagtcactacttatgagtttcctcatctgtgaagggaagtttagtcatctgtttcaatgtggagacacacaggattgagggagtcctccgtcacagggtgactgtctggattctatgaggaaatacttggaaagcatgcagcacaatgcctggggtgcagctgaagctgagccactggtgtttcttcacagtatctctgtggggagggtgtattattcctttttatagggatctctataatgaagtgagaatcttgaaaatataagtgttatcctagatgggaggtgttaaaggtttttgccttgggaattttgtcatatttgttgcacagcaaggaaggactttcagaaaagcagggatgtggtgaggaagagcaggcaatagagagcagggaggaaaggctaagtagcatctggaacttgagaagtctaagggagccaaaatgagattttctattaaaaatgtctatcctcagccgggcgtggtagctcacgcctgtaatcccagcactttggggggtcgagatgggcagatcacctgaggtcaggagttcgagaccagcctgaccaatatggagaaaccccgtctctactaaaaatacaaaattagttgcgcgtggtggtgggcgcctgtaatcccagctactcaggagcctgaggcaggagaatcacttaaacccaggaggcggaggttgcagtgagccgagatcgcgccattgcactccagcctgggcaacaagagcgaaaccccgcctaaaaaaagaaaaaaaagaaaaagtctatcctctatgctactggcctgtttgtacaaagataaaatcattctaatttgtccggaatgactatcaaagatgatcaaatccccagggcctggtgtaacgttccaaatcatagcacaaatacagcttgaccttccttacagtccagaaaggacattctccctgagaaatgcccttggttgctgaggacagctctgtcctgtagtgacagagtgactgcctggctgtggctcttgggttcacagaatccctaatcctccaagcccctaagaggcagggcagggatgctacccacaatatatgcagaaccccagatggagcctgtgggagagagaggaaattaccgtcttcactgtaggcaaaggagaatggctgtgattagccatatatgcctataagaaggagcagagccatactgtccttgtgggttgggagaggggacacagaatccagggcaattgtctgaggtctcaaagtaagttaagccagagtcaaagccaaactccaagtcttggccaaggggatgagaaaagcaaggagctagtcttataggtcaaggaagatgaggtatagttaagagtcatcagtatcacagaacaggccagcagggctttattaggtatgtagaactattataaaccaaggatcttgggagatattaatatctgctggccagacctaaaaaaaactgaaggcccaaggaaagtgactggactcactggaaagtatctaacaaatactttggattccaaagtatttccaataccttgaagattcctttgaaaacatcaaagcacaaactcaaatctgcacaagattacaaaagcacaattttggtgttatttttagaatgcaatacacaaagctatgttcatttctctcagcaagcattttcctgggtagtagtaatagcttaggaatcaaatgccacttttgtttttccttttttcactagtttgaaataccacaaatcacaggtgagtcagtcctcccagaggaaaagacagtcctagggagaatcacaggcctggcagacaagaccacactgagagcagtagaaggaacctgcatgcttaagggacagaggactgtgttgtgttctcataatagaccgctggatgaagaagtggttaaaaaccaaccctcgaaaaacaaaaatccctggctaatcctgaaatatatttaacttgaagtctttggatgatttttttaaggttaaaaaaaagtttaggattattataaatcaatatttataaataagcaacaatgtatttggaatttttgtttacctgattaaatatgtttttggtatgtgt

SEQ ID NO: 8780 - DNA, 8256 bp, Homo sapiens
  source 1..8256: mol_type = unassigned DNA; mol_type = unassigned DNA
aggcaaagtggggagtgaggaagggaaaacaaacattctgagaaggaactgttccgtcccccgagctgacagcgcccgctctttgttttgtgatgactgctccctggccttttggttccgagggagtgcagggcagcagtgtgaagacctgtttacgtccactccccactccccggggctggcttcgggacgaattcactgtggtattaacagagcccgggacagagcctggcagaaggcagatggatgctcgtgcccgtcggctggatgaatgaaaggtgagcagcaaaggcgataccaggatcgtccacggcgggactggaggaggagaatgggactgtgcggagcctgcgggaagaatctgaaagtgtctgtgtgatggagagagacatggaaaaggcgacgtcccagcggctggaactggggcggaggaacgggaacagggaaggcctgagttaggcaccacaaaggttttcaggagaaaagtggggcgagccgagaggcctggtgcactgtgcgtcctctgagaggtgaaggagcactgtgtggtcagagggctgcgagctctctgtttgggttccgaggaagacagaatgggctgaactggaactgacctaaatgtcagcaagaggagtcgtccagcatgctctgcccaccccacgccgaggtgcactgaccatgagcctcaactcctccctcagctgcaggaaggagctgagtaatctcactgaggaggagggtggcgaagggggcgtcatcatcacccagttcatcgccatcattgtcatcaccatttttgtctgcctgggaaacctggtcatcgtggtcaccttgtacaagaagtcctacctcctcaccctcagcaacaagttcgtcttcagcctgactctgtccaacttcctgctgtccgtgttggtgctgccttttgtggtgacgagctccatccgcagggaatggatctttggtgtagtgtggtgcaacttctctgccctcctctacctgctgatcagctctgccagcatgctaaccctcggggtcattgccatcgaccgctactatgctgtcctgtaccccatggtgtaccccatgaagatcacagggaaccgggctgtgatggcacttgtctacatctggcttcactcgctcatcggctgcctgccacccctgtttggttggtcatccgtggagtttgacgagttcaaatggatgtgtgtggctgcttggcaccgggagcctggctacacggccttctggcagatctggtgtgccctcttcccctttctggtcatgctggtgtgctatggcttcatcttccgcgtggccagggtcaaggcacgcaaggtgcactgtggcacagtcgtcatcgtggaggaggatgctcagaggaccgggaggaagaactccagcacctccacctcctcttcaggcagcaggaggaatgcctttcagggtgtggtctactcggccaaccagtgcaaagccctcatcaccatcctggtggtcctcggtgccttcatggtcacctggggcccctacatggttgtcatcgcctctgaggccctctgggggaaaagctccgtctccccgagcctggagacttgggccacatggctgtcctttgccagcgctgtctgccaccccctgatctatggactctggaacaagacagttcgcaaagaactactgggcatgtgctttggggaccggtattatcgggaaccatttgtgcaacgacagaggacttccaggctcttcagcatttccaacaggatcacagacctgggcctgtccccacacctcactgcgctcatggcaggtggacagcccctggggcacagcagcagcacgggggacactggcttcagctgctcccaggactcagggacagatatgatgctgcttgaggactacacgtctgatgacaaccctccctctcactgcacttgcccacccaagagaaggagctcggtgacatttgaggatgaagtggaacaaatcaaagaagctgccaagaactcgattcttcatgtgaaagctgaagtacacaagtccttggacagttacgcagcaagcttggccaaagccattgaggccgaagccaaaatcaacttatttggggaggaggctttgccaggggtcttggttacagcacggactgtcccggggggcggcttcgggggccgccgaggcagcagaactcttgtgagccagaggctgcagttgcagagcatcgaagaaggagatgttttagctgccgagcagagatgagggcctcagggtgccgtggggctgcagcctgagaggctggcccggggaggagttcccatcaccgcctgtgccgcggccttgggagcatgtcactgtgtacagctggccacacacagggaaggagcagcatctggtatgcagccaccaggacaaggactgaaaataatgtctacagtccacagcttcagcatttccagagaccacatgtgagcttcttttaggtcccagtgatgggaccagaagcatctaaagcaaaaaaaaaaccaaaaaaaaatctagagatgtggctgtggctttttgggaggtggggcatgggaggaccagagacgaagggcttggaaggagacccccacatgcatcatttcctcctcttcacagtgtgctgggagtccagccgtgcactgtgccagatgcctcaggaggagaaccctccccagtgtactgtgaaggatgacacagcacttcttcctaatgacacgcgaccgtcctggtgcctctacatggttgatgcgggcagtgtgggaccctcagttctaggactggtccgcagagaaagcacccaggagcagagcgcttcggagcggtcctcagtggcgccacctgctggtgctaatagggacagccacaggcctcttgcagactggcccaccctgcctacttccctactgacaagttctttggtatttcaaaagggagaaaccactataaaagacaagaggaagggcaggtactaggtgtttcatttccagaattaaaaaaaaaatccatttaagacgtaccactgttttaccggactgaatgggactgtagtgccaagcacagccaggaaatagagaaactgttattatggaagggaatttgttcacatgggaaagcctcattaaatagattctatgtgtgatgtttgagtgaccaatgaaaatagctggcctcagttctgcatggcacactcccaagagcaacagttactattatcacaagcctggtataaataagatagaagcagccctggacccacagccagcaacctgggttattggcccagctctgtctttgtgtgcacatgtcatttggacatcttgtcacctttctaggtcctctgtaaagtgggaaaacagagtggagttggattgaatggtctccaagatcatttccagctctgacctttggtgttctcaggatttgtaaagcagagataggtaaaacacaaaagcagacccacggaccgacctttgtataactttggagtgtggttgctcatgcacatgtgaagtgcaggcagatcaaggttctgtggctttgtctgccctgtccattagagcacaatctggatagaatgccagccaccaagatgcatgaggggcagggtcaccatctcagaaggggaagcacaggaatgtgattgggatggttaaacctctcttctcctccctttgtgctggaacagcagttgaagtttggtcctggagtaattgctgtgatgacttgggaagccactgatctcctcttgcgtctgcccttggcctgcatcatgactaaataagttcaggacttctctgctttggttggcagaaggtagattccaaggagatcttgctggttgctgagaggcagctgttctagaaagtgaattacccttgtggttttttctttggggcccagctagctcctggtgaggttgtgtttttgtgttgtgtggcagaaaccaatggttagctggtcccctggtctgcagtttgtaaaagacctttcatgaggcctggagtcttgctacctgtggtgattgaactcaactattctgggtcacctggatgccaggcgctggcctagcttctggatgggagtgggaaggagcagagggcaggttcacctgtgcaggtcagacactctgcttccatcactggatggcattcctacgtctgcgtgtggttcacgttttctatatatattccctgtatatatttttttctagcacttgtctactttctgaagggaccatattcctgatcaactagtgtgcacagaggtggaacagggcagagagacctttatctctaggatgggttgctggttaggtgtaggcattcttgagtgcagcagcttggctttgaaacgcaagggttggagaatgttcccctgactgtactagactgggctctagggaaagaatcctgagacagccccccactcccccactgaccccacactagctgggctattatagaatttaatctaaatctagaaatactgcatttcacaaaatgattcactgtgtttccctttttttactgaggtccaattcatttagtcgtctaccagacactgcacatccagtgtatgcgaagcaccaggctaggctctgtaggcaataccactaaagtgtgcactctgatttagggagcaggacctgtggataccgattctaataactagcaaagtcaagtcgtggttatagaaagaagtgtggcttcagagggaggtgggtatttccaaatatggagttagggatggctccatgaggtaagtgacagtttgagctaagtcttgaaggatgcttggcagctagaaccatattttccatattcaggaattcaaatttgcctttattcagctagagagaaagagagaagggggtgtgggggagaaggaaaagagaattttcacacattttgaagttcctgagagcatttctgaggatatctgccgttagtgcagaaggtcgaaaccccaagtgcccccactaaacccaggctctttagctgtaaactgccatgcagtggcaggcctgcagccttcctgatgggaccacatggacagtggcacatgggacatttggctactcgttagcttaaacaactcagtcctgtgtcttctggttttgacaagaccacatttaggactgctgcccacctctgcctctttcattgagatttccgccttattgggtccctgtgctatgccacagataccaggtttggggttgttttgacccagaaggcattgggagtcccacattacagagcacacacacagctcaacacagccatttccctggccagaggcaccaagactgaagttcaggcccttagacactaggtggcagcggtgtggctgtgcagagccaaggatgaacctgagagcttgtttgcctctggctgggcactcttgttttgaattcctttgcccttatcgtgtagtccacggccttggtgaccaaggaccacctggctagcctgcttacatgcatgaccccatccaggttcacaggtattgccactgagtgatcttaggtagatcactgctcctggagaagcagagttgaggagtgtaagacaagggccatctagtgccaatgttccttgattcttatttgaggagctactatgtggtctttctgtaaacaagtgaacaaccaatgagactaaatatttgcaatagataggctaaggaatttgggttgagacaggagacggaggaaaaatgctttgatacaatgacagatggttagtctcttcagatttccctgaatattttccatcccgacaatatgcctcttagatacttgcagattagacatgtctctggatggaccacaagatacattcacaacatgtgttcagccttgagccctggctgtgtcctgtctggaaggaactgaggatgatgtggctataaagaggaggcagtgagctggcatgtgactgccttctgtgggcctgacctgtttgacatttgagggcctatgatgtgctaggtgctgtgttaggtacttccaaatgctttatctcattttaccccagtgcaagtgtgatatagtgaggatggtgaagacgtgggtatggttaagtcatgagttcagatcccgtgcttccaattacatgggtgttttcaaacaagtcactacttatgagtttcctcatctgtgaagggaagtttagtcatctgtttcaatgtggagacacacaggattgagggagtcctccgtcacagggtgactgtctggattctatgaggaaatacttggaaagcatgcagcacaatgcctggggtgcagctgaagctgagccactggtgtttcttcacagtatctctgtggggagggtgtattattcctttttatagggatctctataatgaagtgagaatcttgaaaatataagtgttatcctagatgggaggtgttaaaggtttttgccttgggaattttgtcatatttgttgcacagcaaggaaggactttcagaaaagcagggatgtggtgaggaagagcaggcaatagagagcagggaggaaaggctaagtagcatctggaacttgagaagtctaagggagccaaaatgagattttctattaaaaatgtctatcctcagccgggcgtggtagctcacgcctgtaatcccagcactttggggggtcgagatgggcagatcacctgaggtcaggagttcgagaccagcctgaccaatatggagaaaccccgtctctactaaaaatacaaaattagttgcgcgtggtggtgggcgcctgtaatcccagctactcaggagcctgaggcaggagaatcacttaaacccaggaggcggaggttgcagtgagccgagatcgcgccattgcactccagcctgggcaacaagagcgaaaccccgcctaaaaaaagaaaaaaaagaaaaagtctatcctctatgctactggcctgtttgtacaaagataaaatcattctaatttgtccggaatgactatcaaagatgatcaaatccccagggcctggtgtaacgttccaaatcatagcacaaatacagcttgaccttccttacagtccagaaaggacattctccctgagaaatgcccttggttgctgaggacagctctgtcctgtagtgacagagtgactgcctggctgtggctcttgggttcacagaatccctaatcctccaagcccctaagaggcagggcagggatgctacccacaatatatgcagaaccccagatggagcctgtgggagagagaggaaattaccgtcttcactgtaggcaaaggagaatggctgtgattagccatatatgcctataagaaggagcagagccatactgtccttgtgggttgggagaggggacacagaatccagggcaattgtctgaggtctcaaagtaagttaagccagagtcaaagccaaactccaagtcttggccaaggggatgagaaaagcaaggagctagtcttataggtcaaggaagatgaggtatagttaagagtcatcagtatcacagaacaggccagcagggctttattaggtatgtagaactattataaaccaaggatcttgggagatattaatatctgctggccagacctaaaaaaaactgaaggcccaaggaaagtgactggactcactggaaagtatctaacaaatactttggattccaaagtatttccaataccttgaagattcctttgaaaacatcaaagcacaaactcaaatctgcacaagattacaaaagcacaattttggtgttatttttagaatgcaatacacaaagctatgttcatttctctcagcaagcattttcctgggtagtagtaatagcttaggaatcaaatgccacttttgtttttccttttttcactagtttgaaataccacaaatcacaggtgagtcagtcctcccagaggaaaagacagtcctagggagaatcacaggcctggcagacaagaccacactgagagcagtagaaggaacctgcatgcttaagggacagaggactgtgttgtgttctcataatagaccgctggatgaagaagtggttaaaaaccaaccctcgaaaaacaaaaatccctggctaatcctgaaatatatttaacttgaagtctttggatgatttttttaaggttaaaaaaaagtttaggattattataaatcaatatttataaataagcaacaatgtatttggaatttttgtttacctgattaaatatgtttttggtatgtgt

SEQ ID NO: 8781 - DNA, 460 bp, Homo sapiens
  source 1..460: mol_type = unassigned DNA; mol_type = unassigned DNA
tgcatctctctgcagtggagagaagcgacaagatgcttattgattccacagtaggaagagtgagagactgcagcagcctctaagcagcactacatgttccatacattagcagtactgctgaaacaatggcacactacagacacatattttcattaaggtcattttcgaagagatgtttatgaccctcttcccccagtcctctactaacaagtgaacaaaatgaatcaatccaaactggaaatgcttcaactacatcaagaatttatcaaatctttagcagagggccaatagcagctaattcagtatttacaactgacaatatgaagaatgcaattgactgagcatctccctagctgtctgaactacgaactgcaagatgttcttgtaacacgactttaagacattaaggagttaaaaccagggaataggtctacattactgatggaatataaaaaatcaa

SEQ ID NO: 8782 - DNA, 2942 bp, Homo sapiens
  source 1..2942: mol_type = unassigned DNA; mol_type = unassigned DNA
attctgcaaaagctgcccgaacaggctttcctctgaaaagcagtgccgttcctttttagaaagactgaatctaaatgttgtctctggagacaagaagccttcagtatgttaaattactttcattatgtattttcagatgcttattgattccacagtaggaagagtgagagactgcagcagcctctaagcagcactacatgttccatacattagcagtactgctgaaacaatggcacactacagacacatattttcattaaggtcattttcgaagagatgtttatgaccctcttcccccagtcctctactaacaagtgaacaaaatgaatcaatccaaactggaaatgcttcaactacatcaagaatttatcaaatctttagcagagggccaatagcagctaattcagtatttacaactgacaatatgaagaatgcaattgactgagcatctccctagctgtctgaactacgaactgcaagatgttcttgtaacacgactttaagacattaaggagttaaaaccagggaataggtctacattactgatggaatataaaaaatcaactgtatcctaagaagatgctacataaaataaccacaaaaagaaaaacaatataactgtaaaagcctgaaaagaatttttaaaaggggaagtttatactttcatataccagaattgtggaagttactgattctggaagacataatgaaacatgaatttccaaaaagaaaagaaaatactttatcagcacacaaaaggaagatttaggaagtgttttctgcactaaatattcagatattcatatcaattggtatgactaatggatttttctatctgacttttatgaccaattatgtatcctcttctaatgaaaacaaacaaaattaaacagcagatggtttttatcaaaaggacatggcctggatttataatataaagcaagttatgtgatcaagaaatcatttcaaaatagtgagcactgctattaaaaacagatttacaatggtaacaaaaggatgtctaaatatattttagaagctacaaacgttatgtttccttttttgttttcacatattctggaaaataaagaaatattatcatgtactccatcaaagggaaacataattcctatcatctgaggaaattcctcttggccgtgactttttaaagcaaaacaaatacaaatattatgtactgttctttagaaatccatcagccaactaaatctcataatgcatgcagttgaagtattggagagaaaacgaaagaattcctacaagacatgaaataaaacacagctacttcactgttgtcagggaaaaaaaccaactgctccaaaagaatgtgtttttctcccattctggaaatcaacatgcagtctgaatctaacattacagtgcgagatgacattgatgacatcaacaccaatatgtaccaaccactatcatatccgttaagctttcaagtgtctctcaccggatttcttatgttagaaattgtgttgggacttggcagcaacctcactgtattggtactttactgcatgaaatccaacttaatcaactctgtcagtaacattattacaatgaatcttcatgtacttgatgtaataatttgtgtgggatgtattcctctaactatagttatccttctgctttcactggagagtaacactgctctcatttgctgtttccatgaggcttgtgtatcttttgcaagtgtctcaacagcaatcaacgtttttgctatcactttggacagatatgacatctctgtaaaacctgcaaaccgaattctgacaatgggcagagctgtaatgttaatgatatccatttggattttttcttttttctctttcctgattccttttattgaggtaaattttttcagtcttcaaagtggaaatacctgggaaaacaagacacttttatgtgtcagtacaaatgaatactacactgaactgggaatgtattatcacctgttagtacagatcccaatattctttttcactgttgtagtaatgttaatcacatacaccaaaatacttcaggctcttaatattcgaataggcacaagattttcaacagggcagaagaagaaagcaagaaagaaaaagacaatttctctaaccacacaacatgaggctacagacatgtcacaaagcagtggtgggagaaatgtagtctttggtgtaagaacttcagtttctgtaataattgccctccggcgagctgtgaaacgacaccgtgaacgacgagaaagacaaaagagagtcttcaggatgtctttattgattatttctacatttcttctctgctggacaccaatttctgttttaaataccaccattttatgtttaggcccaagtgaccttttagtaaaattaagattgtgttttttagtcatggcttatggaacaactatatttcaccctctattatatgcattcactagacaaaaatttcaaaaggtcttgaaaagtaaaatgaaaaagcgagttgtttctatagtagaagctgatcccctgcctaataatgctgtaatacacaactcttggatagatcctaaaagaaacaaaaaaattacctttgaagatagtgaaataagagaaaaatgtttagtgcctcaggttgtcacagactagagaaaagtctcagtttcaccaaatccacattcaaatgagttttaaatttaaattgtaaaaactgatattactgccaaatataagaaaaatattttaagtattggttatgttgtaaattttcaatgtgaatgtcaattagataggtcatatatattcaatttcttcattacttaatgtatttgttgcatggcagtttgttaaagtactatcatgtgtatattttgtcaatattatgtccaacagaaaatattcatgtaagtcatattttttaaggaataaatacatagccttaaaaca

SEQ ID NO: 8783 - DNA, 1845 bp, Homo sapiens
  source 1..1845: mol_type = unassigned DNA; mol_type = unassigned DNA
ctctaagcagcactacatgttccatacattagcagtactgctgaaacaatggcacactacagacacatattttcattaaggtcattttcgaagagatgtttatgaccctcttcccccagtcctctactaacaagtgaacaaaatgaatcaatccaaactggaaatgcttcaactacatcaagaatttatcaaatctttagcagagggccaatagcagctaattcagtatttacaactgacaatatgaagaatgcaattgactgagcatctccctagctgtctgaactacgaactgcaagatgttcttgtaacacgactttaagacattaaggagttaaaaccagggaataggtctacattactgatggaatataaaaaatcaactgtatcctaagaagatgctacataaaataaccacaaaaagaaaaacaatataactgtaaaagcctgaaaagaatttttaaaaggggaagtttatactttcatataccagaattgtggaagttactgattctggaagacataatgaaacatgaatttccaaaaagaaaagaaaatactttatcagcacacaaaaggaagatttaggaagtgttttctgcactaaatattcagatattcatatcaattggtatgactaatggatttttctatctgacttttatgaccaattatgtatcctcttctaatgaaaacaaacaaaattaaacagcagatggtttttatcaaaaggacatggcctggatttataatataaagcaagttatgtgatcaagaaatcatttcaaaatagtgagcactgctattaaaaacagatttacaatggtaacaaaaggatgtctaaatatattttagaagctacaaacgttatgtttccttttttgttttcacatattctggaaaataaagaaatattatcatgtactccatcaaagggaaacataattcctatcatctgaggaaattcctcttggccgtgactttttaaagcaaaacaaatacaaatattatgtactgttctttagaaatccatcagccaactaaatctcataatgcatgcagttgaagtattggagagaaaacgaaagaattcctacaagacatgaaataaaacacagctacttcactgttgtcaggtaaaaattcatgtcaaaatctgtcaatgatatcatgtatcaatttgccaaaaactgtcatagtgaaccaaaaggcccataaggcaacagcaaacaggtaggtcagaagatgcatgcaccccaccacactgtttaacatttacgaaagaacagaatcttgctctagagaaaatgtatttttcttaatcatcatttaacttgacatttctgctttatttaattataaatctaactgatgtgacaaagacctgatgtttaatctgtcagttcagaaaatttggcacacttaaaattttccatttttataggatttcaatgttagctaagaccttaacttactcgaataaatatacctctagtaatacttcatactaattcaaaagaaataatgttaccatttgtgtttctgcaatattattcccaaaaaagttcataaataaaactgtattctaaaacttgtcaaatataacattaagtgaaagttaacatgaattttgaaaattattagcttttataatttatgttgaatatgattttgcagttgaaatgctgtatttgaaatgtgaaatatagttggttgtatgagttcatattttaaaatgaatatactgattaactgacattttagcccagaacattagacattattttttacaaattattctaaacccctatatattaaaatatagatttgcatgaattagcaaaa

SEQ ID NO: 8784 - DNA, 460 bp, Homo sapiens; identical to SEQ ID NO: 8781
  source 1..460: mol_type = unassigned DNA; mol_type = unassigned DNA

SEQ ID NO: 8785 - DNA, 2942 bp, Homo sapiens; identical to SEQ ID NO: 8782
  source 1..2942: mol_type = unassigned DNA; mol_type = unassigned DNA

SEQ ID NO: 8786 - DNA, 1845 bp, Homo sapiens
  source 1..1845: mol_type = unassigned DNA; mol_type = unassigned DNA
ctctaagcagcactacatgttccatacattagcagtactgctgaaacaatggcacactacagacacatattttcattaaggtcattttcgaagagatgtttatgaccctcttcccccagtcctctactaacaagtgaacaaaatgaatcaatccaaactggaaatgcttcaactacatcaagaatttatcaaatctttagcagagggccaatagcagctaattcagtatttacaactgacaatatgaagaatgcaattgactgagcatctccctagctgtctgaactacgaactgcaagatgttcttgtaacacgactttaagacattaaggagttaaaaccagggaataggtctacattactgatggaatataaaaaatcaactgtatcctaagaagatgctacataaaataaccacaaaaagaaaaacaatataactgtaaaagcctgaaaagaatttttaaaaggggaagtttatactttcatataccagaattgtggaagttactgattctggaagacataatgaaacatgaatttccaaaaagaaaagaaaatactttatcagcacacaaaaggaagatttaggaagtgttttctgcactaaatattcagatattcatatcaattggtatgactaatggatttttctatctgacttttatgaccaattatgtatcctcttctaatgaaaacaaacaaaattaaacagcagatggtttttatcaaaaggacatggcctggatttataatataaagcaagttatgtgatcaagaaatcatttcaaaatagtgagcactgctattaaaaacagatttacaatggtaacaaaaggatgtctaaatatattttagaagctacaaacgttatgtttccttttttgttttcacatattctggaaaataaagaaatattatcatgtactccatcaaagggaaacataattcctatcatctgaggaaattcctcttggccgtgactttttaaagcaaaacaaatacaaatattatgtactgttctttagaaatccatcagccaactaaatctcataatgcatgcagttgaagtattggagagaaaacgaaagaattcctacaagacatgaaataaaacacagctacttcactgttgtcaggtaaaaattcatgtcaaaatctgtcaatgatatcatgtatcaatttgccaaaaactgtcatagtgaaccaaaaggcccataaggcaacagcaaacaggtaggtcagaagatgcatgcaccccaccacactgtttaacatttacgaaagaacagaatcttgctctagagaaaatgtatttttcttaatcatcatttaacttgacatttctgctttatttaattataaatctaactgatgtgacaaagacctgatgtttaatctgtcagttcagaaaatttggcacacttaaaattttccatttttataggatttcaatgttagctaagaccttaacttactcgaataaatatacctctagtaatacttcatactaattcaaaagaaataatgttaccatttgtgtttctgcaatattattcccaaaaaagttcataaataaaactgtattctaaaacttgtcaaatataacatcaagtgaaagttaacatgaattttgaaaattattagcttttataatttatgttgaatatgattttgcagttgaaatgctgtatttgaaatgtgaaatatagttggttgtatgagttcatattttaaaatgaatatactgattaactgacattttagcccagaacattagacattattttttacaaattattctaaacccctatatattaaaatatagatttgcatgaattagcaaaa

SEQ ID NO: 8787 - DNA, 1928 bp, Homo sapiens
  source 1..1928: mol_type = unassigned DNA; mol_type = unassigned DNA
aaccaattgcaccacgaccggatggaagagcccagctgacacaaccaagacgagtctcagtgtctagggaagcttggggttctgctccttttacttcaggcgaacctgaactcagttaatgcaattttgaagcatgccctgaatagattcagtcattatcaagtcaaactaaaaacggtgaaaggttgcgactattaccaaataggaaaaatctgaagacataagaactacacatgaggaatatgtcatttagcactttcactttttgatctccacagaagacaatgagaagtcataccataacaatgacgacaacttcagtcagcagctggccttactcctcccacagaatgcgctttataaccaatcatagcgaccaaccgccacaaaacttctcagcaacaccaaatgttactacctgtcccatggatgaaaaattgctatctactgtgttaaccacatcctactctgttattttcatcgtgggactggttgggaacataatcgccctctatgtatttctgggtattcaccgtaaaagaaattccattcaaatttatctacttaacgtagccattgcagacctcctactcatcttctgcctccctttccgaataatgtatcatattaaccaaaacaagtggacactaggtgtgattctgtgcaaggttgtgggaacactgttttatatgaacatgtacattagcattattttgcttggattcatcagtttggatcgctatataaaaattaatcggtctatacagcaacggaaggcaataacaaccaaacaaagtatttatgtctgttgtatagtatggatgcttgctcttggtggattcctaactatgattattttaacacttaagaaaggagggcataattccacaatgtgtttccattacagagataagcataacgcaaaaggagaagccatttttaacttcattcttgtggtaatgttctggctaattttcttactaataatcctttcatatattaagattgggaagaatctattgaggatttctaaaaggaggtcaaaatttcctaattctggtaaatatgccactacagctcgtaactcctttattgtacttatcatttttactatatgttttgttccctatcatgcctttcgattcatctacatttcttcacagctaaatgtatcatcttgctactggaaagaaattgttcacaaaaccaatgagatcatgctggttctctcatctttcaatagttgcttagatccagtcatgtatttcctgatgtccagtaacattcgcaaaataatgtgccaacttctttttagacgatttcaaggtgaaccaagtaggagtgaaagcacttcagaatttaaaccaggatactccctgcatgatacatctgtggcagtgaaaatacagtctagttctaaaagtacttgaggtaaacatactaaaatgaattatataatgcagcctcttaattctttgaagaactaaaaaattaggaaacaaagttctagcatttacaaaactcagatctcaaagctctgcttgtatttgtgatatttcatttgcttaactgtaaaccatttcaaggtactaacttttaaatctgtatgtaaaatcttttcaaaatacatttttaagctaatactcttaacatagattatgaagttaagtgaaatttatggctctaacagcaaaataattaaagtgccatagtttctcaagtgactaaagtagttattaaaatcaagcacttgatactaatttgaagtgtgtttaaaagtaaatgatttgggaactgacaatgtgtcagaaaatatatgttcatttatcattttaaaatcttgtataatttgccactgtattcatttatgcctaaatctctataacagatgaaaagataattaataaaatcctaattaaaaaatgaga

SEQ ID NO: 8788 - DNA, 1815 bp, Homo sapiens
  source 1..1815: mol_type = unassigned DNA; mol_type = unassigned DNA
agctgacacaaccaagacgagtctcagtgtctagggaagcttggggttctgctccttttacttcaggcgaacctgaactttaatgcaattttgaagcatgccctgaatagattcagtcattatcaagtcaaactaaaaacggtgaaaggttgcgactattaccaaatagaagacaatgagaagtcataccataacaatgacgacaacttcagtcagcagctggccttactcctcccacagaatgcgctttataaccaatcatagcgaccaaccgccacaaaacttctcagcaacaccaaatgttactacctgtcccatggatgaaaaattgctatctactgtgttaaccacatcctactctgttattttcatcgtgggactggttgggaacataatcgccctctatgtatttctgggtattcaccgtaaaagaaattccattcaaatttatctacttaacgtagccattgcagacctcctactcatcttctgcctccctttccgaataatgtatcatattaaccaaaacaagtggacactaggtgtgattctgtgcaaggttgtgggaacactgttttatatgaacatgtacattagcattattttgcttggattcatcagtttggatcgctatataaaaattaatcggtctatacagcaacggaaggcaataacaaccaaacaaagtatttatgtctgttgtatagtatggatgcttgctcttggtggattcctaactatgattattttaacacttaagaaaggagggcataattccacaatgtgtttccattacagagataagcataacgcaaaaggagaagccatttttaacttcattcttgtggtaatgttctggctaattttcttactaataatcctttcatatattaagattgggaagaatctattgaggatttctaaaaggaggtcaaaatttcctaattctggtaaatatgccactacagctcgtaactcctttattgtacttatcatttttactatatgttttgttccctatcatgcctttcgattcatctacatttcttcacagctaaatgtatcatcttgctactggaaagaaattgttcacaaaaccaatgagatcatgctggttctctcatctttcaatagttgcttagatccagtcatgtatttcctgatgtccagtaacattcgcaaaataatgtgccaacttctttttagacgatttcaaggtgaaccaagtaggagtgaaagcacttcagaatttaaaccaggatactccctgcatgatacatctgtggcagtgaaaatacagtctagttctaaaagtacttgaggtaaacatactaaaatgaattatataatgcagcctcttaattctttgaagaactaaaaaattaggaaacaaagttctagcatttacaaaactcagatctcaaagctctgcttgtatttgtgatatttcatttgcttaactgtaaaccatttcaaggtactaacttttaaatctgtatgtaaaatcttttcaaaatacatttttaagctaatactcttaacatagattatgaagttaagtgaaatttatggctctaacagcaaaataattaaagtgccatagtttctcaagtgactaaagtagttattaaaatcaagcacttgatactaatttgaagtgtgtttaaaagtaaatgatttgggaactgacaatgtgtcagaaaatatatgttcatttatcattttaaaatcttgtataatttgccactgtattcatttatgcctaaatctctataacagatgaaaagataattaataaaatcctaattaaaaaat

SEQ ID NO: 8789 - DNA, 1282 bp, Homo sapiens
  source 1..1282: mol_type = unassigned DNA; mol_type = unassigned DNA
ggttctgctccttttacttcaggcgaacctgaactcagttaatgcaattttgaagcatgccctgaatagattcagtcattatcaagtcaaactaaaaacggtgaaaggttgcgactattaccaaataggaaaaatctgaagacataagaactacacatgaggaatatgtcatttagcactttcactttttgatctccacagaagacaatgagaagtcataccataacaatgacgacaacttcagtcagcagcaacaccaaatgttactacctgtcccatggatgaaaaattgctatctactgtgttaaccacatcctactctgttattttcatcgtgggactggttgggaacataatcgccctctatgtatttctgggtattcaccgtaaaagaaattccattcaaatttatctacttaacgtagccattgcagacctcctactcatcttctgcctccctttccgaataatgtatcatattaaccaaaacaagtggacactaggtgtgattctgtgcaaggttgtgggaacactgttttatatgaacatgtacattagcattattttgcttggattcatcagtttggatcgctatataaaaattaatcggtctatacagcaacggaaggcaataacaaccaaacaaagtatttatgtctgttgtatagtatggatgcttgctcttggtggattcctaactatgattattttaacacttaagaaaggagggcataattccacaatgtgtttccattacagagataagcataacgcaaaaggagaagccatttttaacttcattcttgtggtaatgttctggctaattttcttactaataatcctttcatatattaagattgggaagaatctattgaggatttctaaaaggaggtcaaaatttcctaattctggtaaatatgccactacagctcgtaactcctttattgtacttatcatttttactatatgttttgttccctatcatgcctttcgattcatctacatttcttcacagctaaatgtatcatcttgctactggaaagaaattgttcacaaaaccaatgagatcatgctggttctctcatctttcaatagttgcttagatccagtcatgtatttcctgatgtccagtaacattcgcaaaataatgtgccaacttctttttagacgatttcaaggtgaaccaagtaggagtgaaagcacttcagaatttaaaccaggatactccctgcatgatacatctgtggcagtgaaaatacagtctagttctaaaagtacttga

SEQ ID NO: 8790 - DNA, 3021 bp, Homo sapiens
  source 1..3021: mol_type = unassigned DNA; mol_type = unassigned DNA
ggggttggaatcccgcttctcctcggcagcagtaggctcgcaagtcgctggggttaggtggggcaagagtttcgccggcgcatcagcgctgcttcggactgtttgcaacgtgtttccagcgagctgggagcggggttgtgactgcgagtcgtctgggggagggggacttgtttttcttttcctctagagacctcggcttgcaactggatcaaacgctgtcgaaaggatgtaaataggcagagcaactgttaccaagaaggccaccacccccacccaaaggcagtgaggagtgtggggcttcgtctgggctcccccgagtctcaacagtaatcaacagtcaggtgttgattgcaacttttcaaggtcagccaccgggagtagcctattccctctaggaaccttggagggcataccttgctgggactcaacttggctgagaaatgcacaagatgccaaaggaggaaggattatagggggcgtgtgtgtgacccccaagaccgatcttccgctatcaccctaatctccggttccccgctacccgggcgggggtgagtatgtgacatgtgcctaactctcagcagcaacttcggcagcaggtgtcgatcctaactaagcaggagctgcggctgccgggtgtgccctcaccaagccatgcgagccccgggcgcgcttctcgcccgcatgtcgcggctactgcttctgctactgctcaaggtgtctgcctcttctgccctcggggtcgcccctgcgtccagaaacgaaacttgtctgggggagagctgtgcacctacagtgatccagcgccgcggcagggacgcctggggaccgggaaattctgcaagagacgttctgcgagcccgagcacccagggaggagcagggggcagcgtttcttgcgggaccctcctgggacctgccggcggccccgggccgtgacccggctgcaggcagaggggcggaggcgtcggcagccggacccccgggacctccaaccaggccacctggcccctggaggtggaaaggtgctcggggtcaggagccttctgaaactttggggagagggaaccccacggccctccagctcttccttcagatctcagaggaggaagagaagggtcccagaggcgctggcatttccgggcgtagccaggagcagagtgtgaagacagtccccggagccagcgatcttttttactggccaaggagagccgggaaactccagggttcccaccacaagcccctgtccaagacggccaatggactggcggggcacgaagggtggacaattgcactcccgggccgggcgctggcccagaatggatccttgggtgaaggaatccatgagcctgggggtccccgccggggaaacagcacgaaccggcgtgtgagactgaagaaccccttctacccgctgacccaggagtcctatggagcctacgcggtcatgtgtctgtccgtggtgatcttcgggaccggcatcattggcaacctggcggtgatgtgcatcgtgtgccacaactactacatgcggagcatctccaactccctcttggccaacctggccttctgggactttctcatcatcttcttctgccttccgctggtcatcttccacgagctgaccaagaagtggctgctggaggacttctcctgcaagatcgtgccctatatagaggtcgcttctctgggagtcaccactttcaccttatgtgctctgtgcatagaccgcttccgtgctgccaccaacgtacagatgtactacgaaatgatcgaaaactgttcctcaacaactgccaaacttgctgttatatgggtgggagctctattgttagcacttccagaagttgttctccgccagctgagcaaggaggatttggggtttagtggccgagctccggcagaaaggtgcattattaagatctctcctgatttaccagacaccatctatgttctagccctcacctacgacagtgcgagactgtggtggtattttggctgttacttttgtttgcccacgcttttcaccatcacctgctctctagtgactgcgaggaaaatccgcaaagcagagaaagcctgtacccgagggaataaacggcagattcaactagagagtcagatgaactgtacagtagtggcactgaccattttatatggattttgcattattcctgaaaatatctgcaacattgttactgcctacatggctacaggggtttcacagcagacaatggacctccttaatatcatcagccagttccttttgttctttaagtcctgtgtcaccccagtcctccttttctgtctctgcaaacccttcagtcgggccttcatggagtgctgctgctgttgctgtgaggaatgcattcagaagtcttcaacggtgaccagtgatgacaatgacaacgagtacaccacggaactcgaactctcgcctttcagtaccatacgccgtgaaatgtccacttttgcttctgtcggaactcattgctgaaggacagtacttggttgggtcagatttatttgtttgattttcatatcccgtgaaagtttttaattcatatttttccttatagggaaaaatgcaaaaaagaaacaataaagaaagaaatattaactactgtagaactgattttacaaattaatatttgtgctttgaaaaaaagtttctatttagttatttaagaagaatgagaaggccaatagttttagattattttatctggtatggtgctaatattttatttgaaaaaagttactgcaacttaacttaaaattgctaacgttttttcttcttttaaaaatacaattattgtatattgattatagcaatgtgattttgtaggttattttatatttgagttgtgattgaaagtatgttgtatatggtattgtgagatgatttgtacttggaagcattcacaaagtagcaccaaataaattacactttattctttaatgtcattgtcaatctacttttaaccaatattcaataaatcttctaattgccttaaagatacaa

SEQ ID NO: 8791 - DNA, 6588 bp, Homo sapiens
  source 1..6588: mol_type = unassigned DNA; mol_type = unassigned DNA
gactggaggcggatccagccggccagctgcctctctggagcccagctcttgggccccctgcactcacctgctcttcctgggctggctgtctcctgctcatccagccatgcggtggctgtggcccctggctgtctctcttgctgtgattttggctgtggggctaagcagggtctctgggggtgcccccctgcacctgggcaggcacagagccgagacccaggagcagcagagccgatccaagaggggcaccgaggatgaggaggccaagggcgtgcagcagtatgtgcctgaggagtgggcggagtacccccggcccattcaccctgctggcctgcagccaaccaagcccttggtggccaccagccctaaccccggcaaggatgggggcaccccagacagtgggcaggaactgaggggcaatctgacaggagcaccagggcagaggctacagatccagaaccccctgtatccggtgaccgagagctcctacagtgcctatgccatcatgcttctggcgctggtggtgtttgcggtgggcattgtgggcaacctgtcggtcatgtgcatcgtgtggcacagctactacctgaagagtgcctggaactccatccttgccagcctggccctctgggattttctggtcctctttttctgcctccctattgtcatcttcaacgagatcaccaagcagaggctactgggtgacgtttcttgtcgtgccgtgcccttcatggaggtctcctctctgggagtcacgactttcagcctctgtgccctgggcattgaccgcttccacgtggccaccagcaccctgcccaaggtgaggcccatcgagcggtgccaatccatcctggccaagttggctgtcatctgggtgggctccatgacgctggctgtgcctgagctcctgctgtggcagctggcacaggagcctgcccccaccatgggcaccctggactcatgcatcatgaaaccctcagccagcctgcccgagtccctgtattcactggtgatgacctaccagaacgcccgcatgtggtggtactttggctgctacttctgcctgcccatcctcttcacagtcacctgccagctggtgacatggcgggtgcgaggccctccagggaggaagtcagagtgcagggccagcaagcacgagcagtgtgagagccagctcaacagcaccgtggtgggcctgaccgtggtctacgccttctgcaccctcccagagaacgtctgcaacatcgtggtggcctacctctccaccgagctgacccgccagaccctggacctcctgggcctcatcaaccagttctccaccttcttcaagggcgccatcaccccagtgctgctcctttgcatctgcaggccgctgggccaggccttcctggactgctgctgctgctgctgctgtgaggagtgcggcggggcttcggaggcctctgctgccaatgggtcggacaacaagctcaagaccgaggtgtcctcttccatctacttccacaagcccagggagtcacccccactcctgcccctgggcacaccttgctgaggccccagtaggggtggggagggagggagaggccgccacccccgccggtgtctgctgttctttccccataggtcttgctttgttgcctgtcttgctgtctagggatggacttggttcctcttgtcaaggtttgggaatgtcaaagccccctccccacacagggcctttcctgtcccttgtggggccttccaaccctgtcctttccactggtgggcggtgatgcttctaggtccttagaactgcccagaaactctgagtcccagcagctgggagccagaactttgcctgccctcccttggttccagtctctcttctctctctctgccttggaacctgaccatactttagttgtgcccttcccaggcatcatcctcctaccaccaacctggggccccatcttggaatgggggctccttggggccagcccagtgtggctcaccacactcttctttttttttttttttttttttgagatggagtcttgctctgttgcccaggctggagtacatttgcctgatgtcagctccctgcaacctccgcctcctgggttcaagcgattctcctgcctcagcctcctgagtagctgggattacaggtgtgcaccaacacacccggctaatttttgtatttgtagaagaggcggggtttcaccatgttggccaggctggtgttgaactcctgacctcaagtgatctgcctgccttggcctcccaaagtgctgggattacaggtgtgagctgccacgcccagccccagtacactcttctctggaccagatctgtcccagtcctggatgcctcctcctactggtgccttcttttcttccagaggatttctctctccttcctcctcctttctttgggatccctgggttgccctgtcccaacctccttgttaggtgctttcccataggaggcccttcttgagaaacaataaactaggtagaactacccctatgcccatccactttcttgtgccacattctggcagggcccagatgcagctgggccttcctggcctggcagtgcctaggagaatttctcctgacctggcctggcctgtggctgatgttcagaacagccttgtggccgatgttcagaacagccttgtggccctggcgactccaagggttttatggcttttgagggacagagaggatggagggcttggggagccggaggacctaagtcctcatcctggcctaaaccccatgctccttgggaagtcaaaagcctggaaaatatctcctctggagccttcatctctgctatgccctctctccacaaagccccccttggagggagtccagtggtctttcctctgtgagccccagggcttcccagcctttgtcactctgagagctgctcttgttcagtttcttagaatggactgttttgcctgtagacggcccagctgcctgccctggcctgcccccacccagcccccactgcaccacccttcccgccagagctcccactgcccccggcagacccttcatgcagcttctcctgtggggtcttgcccttgaagtgccacttcccccagccccacctctggtcccttccagagggcacccttagccttgtaggtccctgggaagctggcacagcatcaaccagaagtgatgcctcagccaggccaccagtcgctccccgcctgggagctcagctttcctcagaaccaccccccctgtctgaagctctgtcctgggtcccaccagacttctgcccaccaggcctacctacagcatccacatggggcctcaggaagggccccgggggcccagggatgggcaggggcagggtttccaagcgcctggggctccattctcctctgtccacccacccacaccccttggcctcagcctgccctgtacccaagcttccctccccctctcctggggatcttaacggccttgttctctctccctggcacccacccccagggcgggtgatgccgccaagagagagggaggccgttgctaggtgatggcgccgccatgcacacaccctttgtgctggggagtgacacccacccgtttctcagcagacctgttgccacggtgactgaagcccccagctctgtctgtagaaacttcagatgggtgggggagcaggttggagaggggaccaaaggcaggcctgtcgtgctgaagctcttggggaccgtttcctcggcatttccccaactccttctccacccccctgccaggcccggaagtaccaccagcttcctaagggatgcaggaaggggccgggtgaactgaggtgaagtccagggcaggggagtcagacccctcaacatcctgtttaggggtcctcctccacaaagggtgccctccacctctccctcctgctggttggccggctcagagatgaagggggagagatggtggctccaaggctctgccaccgccacctcccaagcctgccaacgtgaatggcttgcagaatcagtcagcaggccagcggccttgggaaagagccactgtcctcgcagcctgggccagctgggggaacaatgtagggtttgttgcttaggggtcccaggcttgcgggggggttggcacatggtgggcagtggacttgagctgggatggtctgagggggcactgacacgctcacccgagggcagacttcagaccagccctcagatcctgatgccaggttacagggctgaggggagcctgaaatccactgggtctccctgctccacttgggagtcaccttctcatcacctatcctggaactgaatgcaattacttaaactcagtctcagcttcctcatctgtaaaatgggaataatctgtccttcacagaggattatggtcatttaatgagacaagatacataaagcactttgcatggtgccccgaaccttttattccttcctctcctttgggaattcaattctctagtgttaggagcaggcttggcccagggattcttaaatgcatccaggttttggcatcaaagggccccaaacatgacaatttacctatactcatggtctgttcccattcaactttaataggttatgtgtgttttttttttcttaagagctgggtgggggggtctcactatgttgcccaggctggctttgaactcctgggctcaagcagtcctcctgtctcagcctcctgagtagctgggactacaagtgtgtaccaccatgcctggctgaacacttttttttttttgagacaagatcccactcagtcactcaagctgagtgctgtggtgtgatcacagctcattgcagcctccacttcctgggctcaagcgattctcctgcctcagcttcctgagtagctgggactacaggtgcgcactaccacgcctgtctaatttttgattatttgtagagatagggtctcactattttgcccaggctggtctcaaactcccagactcaagtcattctcctacctcgggctcccaaagtactgggattacaggcatgagcacctggcccctgaacaaattctttaagtcatattagcacctgctgcacgccggcactgtggaaggaggatgcttgcttgcttcctggtaaccagctctcttatctcaaacctcaatcctcagtgaggatcacaggatctgagaaaggcaccttggcctggaaacagccccagatgagtgagattgctggtcctctcccgggatcccaggcccaggaaaacctagccatgcttgcagtcaggagagggcaggggatagagccctggctcccattcaacctccttagccaggaggacatgtcccattttgcttaggagttgggaggtaccctagaatcacttagcttcagatgccaaattccatccacattctttcctccaactctctggcagtggggaactgcctctccaggcagggaactgctctgacaggtctgatgactgcctccaggaggaagccctgggcaccaatgaaggtgaggggctggagggcccaggacggggagtcaaggtccccactcccaggactaagggacagtttggctcctttttcctgcagtgggaggggtgagaagggctggggtgttctgcaagggcctgctccattttccagggtgaaggagaggccgagggaggtggagcgggaggaggtggggcttactgtgaaactgggtcaagatggcctcggatttgagcaggcagggtcaccaggctctgaggcagcagctgtgagcagtgccgagggaggaccagctctgacggtgaggtcgggtgggggactagaatccagcagaggagcgagggcagggctcctaccaggaaacccatagcattgacactaactgagaggcagcaaaggcggtgacactcccccaggctctgtgggcccagccctacccctgaagcacagttaactggttctggggtaggaactgggggccggagggacagggttctggttctggctcaaccttggctgctggtgagatccagggcctgggaaagaggggctgaggcctgaactgggcctaaggagagtgcagctcagttcgcacacaacagcacccagccctgtccccttgctgcctctacccagccctgggcagttccctcaacagagctctgcagccccaagtggcagctgctggctcaaagctgggactacatgaaagtctgaaaagagaatgagaaggaggtggcgcaagagcctggacgcacgtgtgggaggccgttttgtgcagcgccattgtgctccccgggcgggcatgtgctcgcgctccgtggctctgttggtgcccagcgtgcgggggtgtgctggtggccctgtgggcctgtagggcaacccatgccaactgcggaaaagtaaccagcaccatacaccccccccaacacaaaactggtcatttattttttttgttgtcattgttattaggaagcaaaaaaatgtacagttacaagaatcattttccaaacagaggttaaatatgagctgaaaagtgtaaaaaaggaagaggaacatcactttacaaatcattaaattaaacaaataaacaaacagaacccaaagaaccaa

SEQ ID NO: 8792 - DNA, 5952 bp, Homo sapiens
  source 1..5952: mol_type = unassigned DNA; mol_type = unassigned DNA
ctcccgccaccgccgcctgtatcgccgccgccgccaccacctcctcttcgttgtcctccttcctcctccgcctggcagcgttgttctctgcagcggaggagagaagtgctatgtcaggaaagttccgggagggactacatggagccatgctccctgggctcttccgcgggcgcccgcgcgctgcccttcgcttgaggcaaaaggactcttgtggaagatggaactcattgtccattttccagaatgtatttccaagcccatcaatgggacctgatactgctgttctgtgttgaaatgcttgaagaactcctgcatctctgcttgcatcttccatcctactgaaaccatggtcttctcggcagtgttgactgcgttccataccgggacatccaacacaacatttgtcgtgtatgaaaacacctacatgaatattacactccctccaccattccagcatcctgacctcagtccattgcttagatatagttttgaaaccatggctcccactggtttgagttccttgaccgtgaatagtacagctgtgcccacaacaccagcagcatttaagagcctaaacttgcctcttcagatcaccctttctgctataatgatattcattctgtttgtgtcttttcttgggaacttggttgtttgcctcatggtttaccaaaaagctgccatgaggtctgcaattaacatcctccttgccagcctagcttttgcagacatgttgcttgcagtgctgaacatgccctttgccctggtaactattcttactacccgatggatttttgggaaattcttctgtagggtatctgctatgtttttctggttatttgtgatagaaggagtagccatcctgctcatcattagcatagataggttccttattatagtccagaggcaggataagctaaacccatatagagctaaggttctgattgcagtttcttgggcaacttccttttgtgtagcttttcctttagccgtaggaaaccccgacctgcagataccttcccgagctccccagtgtgtgtttgggtacacaaccaatccaggctaccaggcttatgtgattttgatttctctcatttctttcttcatacccttcctggtaatactgtactcatttatgggcatactcaacacccttcggcacaatgccttgaggatccatagctaccctgaaggtatatgcctcagccaggccagcaaactgggtctcatgagtctgcagagacctttccagatgagcattgacatgggctttaaaacacgtgccttcaccactattttgattctctttgctgtcttcattgtctgctgggccccattcaccacttacagccttgtggcaacattcagtaagcacttttactatcagcacaacttttttgagattagcacctggctactgtggctctgctacctcaagtctgcattgaatccgctgatctactactggaggattaagaaattccatgatgcttgcctggacatgatgcctaagtccttcaagtttttgccgcagctccctggtcacacaaagcgacggatacgtcctagtgctgtctatgtgtgtggggaacatcggacggtggtgtgaatattggaactggctgacattttgggtgatgcttgttctttattgacattgaattctctttctcatagcctctccactttatttttttttatagggtttgtgtatgtatgtgtgtgagcagtgtaaagaaagaatggtaattatagttctgttaccaagaataaataataggaaagtgattacaaatattacctccagggttcaatagaaatcctcaatttagggtgaggagacttttttttggttttggggtttttccttgattgattttgttttcatagtgggaatcaggattgtgctttattgagcctgcagttacattgaattgtaggtgtttcgtgtgctgctaaggtatgcttatttgagtttatcaagactttttttttctggaagacactgctgcttttaccatcacattggagccaaacatctcaatcaatatatatttagttttattttaaaaactaacccaggaaggttagcgacattttaagggtcattactatttactttggtgcactttaagagataatgtacaaattaattcagtcttatttttcagaattgtttttatacatgatatgtgctttaggaaatgtgcattatcatttatgggaagatagttttaagaaatgttttatctgcatgtacagttgtaaaagagaacataaaatgtagatacttttctaagcacaatagcaactcttcaagcaatagcgcaaaatctaggagacaggatccttgcaaatttaaaaggtgaatgtagtgagggggatggcaagtggctggtacaggctgtggtgattccttttactcaagggtttttgtggagtatagggagaaggggttgatatttatggacacctatgtgtcaggcactgtgcatcattttatccttacaggatgttgtgaggtaggtattattgttttcatttttacaggtgaagaaagcaggtctcagagggactaaaatcctgcccaaggttagtggtagagctgggatccaaaaatctgtcagaatcctgagactgcgctgttccactgtgccacgcagacagttcattcagtttagatgtcacatagtcaagagggaactctatgcatcctttaattttttagactatgatattctttttaaaaattagcctttattttctaactaccaaaagaaatatgaaagcattacagaaacactggaaaatagaaaagaaaaaataaaatcacttacaaccactttttgttttttggagtctcgctttgccacccaggctggagtgcagtggtgtgatcatggctcattgtagcctcaacctcccaggctcaggtaatcctcctgtctcagcctcctgaatagctggaaccacacacacacacgcacacacaggtgtgtgccaccacacccagctatttttttgtattttcttttgtaaagacaaggtttcaccatgttgcccaggctggtctcagagtcctgagctcaaacgatctgcctgccttggcctcccaaaatgttgggattacaggcatgagccaccacatctgacctacaaccactttttaatgtgagacttaaaaatcttagataaataaggctgtgaagcaaaaccagtgatttttttttttgtttttgatttgcaaaacaagtgactgacaattattgagaaattaaagatagctatgtgtaggtcttgcccctgcgggtttggaggtttccagttgtccatctgtgttagttgtaagtgttctgggcagaatagtattgttgccccaatgcttgccctagcagagctggagtttgtgaacgtgctcagatgtgtgtctcctacaaagaagggaaaatgaaccctcgtctgagcctagaacaagttttaatagggcatgtctgacatttcaaattgtttttctcttgctgacagtctgcccccaggtgcatctagggccttggtcagcttctctgttaccagtggctcactttataaaacagcccacagggataagggctgaaaatatagccacttggctacatcattgactaattaagtaagttaactgtggatttatagcatcttttcaggatgttagtgttttgtgagccagtggaaaaaataagcttctatttcttcatttgtaaaaccagagagttggattagatgaatctctaacgtcctgtccagctcaaatgtgctttcctctatactagggtatagatttttgaagagcctagctgacttcagcatcacctcaccctttggtctccagtattacttctttacattttacttcattagctatttcttaatattaaatgtctgaagagtgtggcactgtatcaggagttggggcattgaaaggttgaagacatcatgaaatatctgggaaactctgctcttaaggaaattgcaccgatgttggaactcattgtccagttaaagagctctttggggactcaagcatattattcaacatgttgttttgggattatcttcaaatgatagtcacctacctctttcatttctaatttttattcacaggtaaaattgtttttgtccatagggattttataggacataagcactgtagtagatactagtagcattttgaagtgtattatgctctccattttccatataaactagatttcaagcagatattgataaggacattttttattagacttttctctgaggaaagtcagcatgatctgtattcatcttacatattgataggtcatgaagactcctttttggctggaggtgaaactgagctttgttttctttgttcctgttttatgggcagtctttaggtactttcatgctgcttaataggcagtgcctcatttggtgagagctctggagtgcctgccgagacgctccctgtttgtgaacaaagattatgaaggggtctttgtgagaattcagcagcaacactgaacagcagttctttttacactggattatcttgatctgatgagagtttacaaatcattttgaacatttttattatgtatacattgtgaaagctttaaaaataagtactatggagcacctttgagaaacgtaggtgcaaaatcatatgttgcctattcccccatattttcttgaggcagggaaagataccactactaattctcactgcttacaggcataatcagaaatggttttttgtttgcctgtttttccttctggctagtaagaagcgtaaaagagataatgaaatatttgtggtcaaaagaaagatgcaagggaaattccaaatagtatggagtaacattatttaaactttaatacatgtttaagcatccccaagggagcttgttaacagtacagattcctgggcctccagagggtctgtggttgagcccaggaatgtgcatttttattttattgagcactctgcctgactctggctcaggtagtccctgggaaactcttcaggaaacattcctgtagaaaatatatctatttaaatatcatctgttttatcccacaatgtttgtttcgtgttgcaagccattatcttctaggcatgggtaatccacattgagaggaaaatccacacaacattgtgcctgatttgctgccacctgtgtttgtgctggatcttgccagtgttagctttattttctttcaactggcaaaattctgataaagcatatagcttcacagtagagcaaaatgggtgacttaattgaaagtcatgactttcagcagtctaattatgctcatattttattttcttatagagagctgtctttattgtgtgtaattcccggaagaatgtaaagatttatctaattcctattgctctgccagttgtgttcaatgcaagcattgaagtaaaataaaaataacctttttaatatgtgtatttctgttgcccacaaagatatttaatttttttcttgatctttgtttttgtttatgtgaaaatatttacatatgtatcatttctgtatatatcacagaaaagttttcacttgcttgacattttattctacaatgatttttagtttaagtttaaagaatggctacattcagatttattttcacaactatagtcctgctaaactgccttcattgaaaactcagtttttatgataaaaaatatcaaagcacaagtttgttattggaggtaaattatacatttcttagatatctattggtactagacctttgtaattaaaattaatttattttacaatagtaactgacctgtatggaaaaaaaaacaaccttgaattatgggttctaatatttaaatatcgaaaaatatggttatttgtgcatattcttattacaaccaagaaaagaactcctgataagaaaataaataaatatttaacattt

SEQ ID NO: 8793 - DNA, 1497 bp, Homo sapiens
  source 1..1497: mol_type = unassigned DNA; mol_type = unassigned DNA
taactgtccaccagaaaggactgctctttgggtgagttgaacttcttccattatagaaagaattgaaggctgagaaactcagcctctatcatgtggaacagctctgacgccaacttctcctgctaccatgagtctgtgctgggctatcgttatgttgcagttagctggggggtggtggtggctgtgacaggcaccgtgggcaatgtgctcaccctactggccttggccatccagcccaagctccgtacccgattcaacctgctcatagccaacctcacactggctgatctcctctactgcacgctccttcagcccttctctgtggacacctacctccacctgcactggcgcaccggtgccaccttctgcagggtatttgggctcctcctttttgcctccaattctgtctccatcctgaccctctgcctcatcgcactgggacgctacctcctcattgcccaccctaagctttttccccaagttttcagtgccaaggggatagtgctggcactggtgagcacctgggttgtgggcgtggccagctttgctcccctctggcctatttatatcctggtacctgtagtctgcacctgcagctttgaccgcatccgaggccggccttacaccaccatcctcatgggcatctactttgtgcttgggctcagcagtgttggcatcttctattgcctcatccaccgccaggtcaaacgagcagcacaggcactggaccaatacaagttgcgacaggcaagcatccactccaaccatgtggccaggactgatgaggccatgcctggtcgtttccaggagctggacagcaggttagcatcaggaggacccagtgaggggatttcatctgagccagtcagtgctgccaccacccagaccctggaaggggactcatcagaagtgggagaccagatcaacagcaagagagctaagcagatggcagagaaaagccctccagaagcatctgccaaagcccagccaattaaaggagccagaagagctccggattcttcatcggaatttgggaaggtgactcgaatgtgttttgctgtgttcctctgctttgccctgagctacatccccttcttgctgctcaacattctggatgccagagtccaggctccccgggtggtccacatgcttgctgccaacctcacctggctcaatggttgcatcaaccctgtgctctatgcagccatgaaccgccaattccgccaagcatatggctccattttaaaaagagggccccggagtttccataggctccattagaactgtgaccctagtcaccagaattcaggactgtctcctccaggaccaaagtggccaggtaataggagaataggtgaaataacacatgtgggcattttcacaacaatctctccccagcctcccaaatcaagtctctccatcacttgatcaatgtttcagccctagactgcccaaggagtattattaattattaataaatgaattctgtgcttttaa

SEQ ID NO: 8794 - DNA, 2041 bp, Homo sapiens
  source 1..2041: mol_type = unassigned DNA; mol_type = unassigned DNA
cctgcttgaagcctaactgtccaccagaaaggactgctctttgggtgagttgaacttcttccattatagaaagaattgaaggctgagaaactcaggtaagcacttttgttgtgggtatacttttaccttcttggtctcctcatctcccaggtggtaacaaacagaaatgactaaagcctatatgtgtgtgtagtggaaaggagcagagggaactgaatacagagaggatcctgaatacacgatgctgaatagagagaggggactcctgggggtctttggggatggggaaggaattaaaaaagttggagggcactgggtttactgagagcagcgggatggatatagaagaggactgaggtttggagcagaataagactaagatatttaggcaagagatatttagataaaaacttggggaaatatttgagaatgggaaaggactaagagaacctaaggagagagttagggatcttgagatgaagaggcctgggaatggttcaggaggatactgaattaaggtgaggtccaggaacagtttagatgtccagggtcccagaactgttcaagagatctaagttgaatgctaggttctgattccctcttcctcttccaccctctgcctctttagcctctatcatgtggaacagctctgacgccaacttctcctgctaccatgagtctgtgctgggctatcgttatgttgcagttagctggggggtggtggtggctgtgacaggcaccgtgggcaatgtgctcaccctactggccttggccatccagcccaagctccgtacccgattcaacctgctcatagccaacctcacactggctgatctcctctactgcacgctccttcagcccttctctgtggacacctacctccacctgcactggcgcaccggtgccaccttctgcagggtatttgggctcctcctttttgcctccaattctgtctccatcctgaccctctgcctcatcgcactgggacgctacctcctcattgcccaccctaagctttttccccaagttttcagtgccaaggggatagtgctggcactggtgagcacctgggttgtgggcgtggccagctttgctcccctctggcctatttatatcctggtacctgtagtctgcacctgcagctttgaccgcatccgaggccggccttacaccaccatcctcatgggcatctactttgtgcttgggctcagcagtgttggcatcttctattgcctcatccaccgccaggtcaaacgagcagcacaggcactggaccaatacaagttgcgacaggcaagcatccactccaaccatgtggccaggactgatgaggccatgcctggtcgtttccaggagctggacagcaggttagcatcaggaggacccagtgaggggatttcatctgagccagtcagtgctgccaccacccagaccctggaaggggactcatcagaagtgggagaccagatcaacagcaagagagctaagcagatggcagagaaaagccctccagaagcatctgccaaagcccagccaattaaaggagccagaagagctccggattcttcatcggaatttgggaaggtgactcgaatgtgttttgctgtgttcctctgctttgccctgagctacatccccttcttgctgctcaacattctggatgccagagtccaggctccccgggtggtccacatgcttgctgccaacctcacctggctcaatggttgcatcaaccctgtgctctatgcagccatgaaccgccaattccgccaagcatatggctccattttaaaaagagggccccggagtttccataggctccattagaactgtgaccctagtcaccagaattcaggactgtctcctccaggaccaaagtggccaggtaataggagaataggtgaaataacacatgtgggcattttcacaacaatctctccccagcctcccaaatcaagtctctccatcacttgatcaatgtttcagccctagactgcccaaggagtattattaattattaataaatgaattctgtgctttt

SEQ ID NO: 8795 - DNA, 3720 bp, Homo sapiens
  source 1..3720: mol_type = unassigned DNA; mol_type = unassigned DNA
agcagcgacagaaatatggtagtggtcgccacgttagggtccgtgggggcctcctgaggcagcctggtgccaacccgcacgcccaggctggggctcatcctggccctgcccacctcggggtcggaactacggtgggcctgggatgggggcgtcaagcactttcgcgccgtatccctccgccccccttcccgacaccctcgcggcgagcggttcttgccgcatcctgcgcagcccctgcctactttggtgcagaggcgtggggggcgggacgcgtctttcccgttcggatcgcggggaaagcagtggctccaagtgagccagaggagagctgaggagaggagggggaggccgacgacctgggccctgggcctctgaaggcctactttaaggctggccaattctgcaagaaaggcaaggaggaggagactggctcacagctctggaggacccccttctgtcagctgtggggcttgacaccacttgaacaagaaaaggagggggaaactgcaccacatcagtgaagatccacctccagtggctgctctgctggtggtggagttgctgctgacaaccaccctcaacgggtctgcacccatccaggaaatatctgtcttcctttagcttggttgtacctgttctcactctatctgtattattgaattattgactgagactgtgtttgggaaggaggctgagtgactactggactggatattgactctaactcttattcccaagcttatatccttaatcacctaaagatcagagtgtgaagaaacaaacctgtgacagatctgtggttgaggtttagactacgggaggagtatattacctgactttctttgtaacttgtaccatgactggggcagagattgagcctagtgcccaggccaagcctgaaaagaaggctggggaagaggttatcgctgggcctgagagagagaatgatgtccctctggtggtcagacccaaggttaggacccaggcaactactggggcaaggcccaaaactgagaccaagtctgtgcctgcggcaaggcccaaaactgaggcccaagcaatgtctggggcaaggcccaaaactgaggtccaagtaatgggtggtgcaagacccaaaacggaggctcaaggaatcacaggggccaggcccaaaaccgatgccagggcagtaggtggcgctcgttctaaaactgatgccaaggcaatccctggagcaaggcccaaggatgaggcccaggcatgggcccagagtgaatttgggactgaagcagtgtcacaggcagaaggagtgtcccagactaatgccgttgcttggccactggccactgctgagtctggatcagttactaaatctaagggcctgtctatggatagagaactagtcaatgtggatgctgaaacctttcctggcacccagggtcagaaaggaatccagccctggtttggaccaggggaggagactaatatggggtcttggtgctattccaggcccagggccagagaggaggcctctaatgagtctgggttctggtcagcagatgagacctctacagcgtcttctttctggactggagaagagacaagtgtcagatcatggcccagggaagagtccaataccaggtccaggcacagggctaaacatcagactaatcccaggtccaggcccagatccaagcaagaagcctatgttgattcctggtctggatctgaggatgaggccagcaacccattctccttctgggttggagaaaataccaataacttgttcaggcccagagtcagggaggaggcaaatatcaggtccaagctcaggacaaatagagaagattgttttgaatctgagtctgaagatgagttctataagcagtcctgggttttgcctggagaagaggccaatagtagattcaggcacagagacaaagaagatcctaatactgccttgaaactcagggcccagaaagatgttgacagtgatagggtcaaacaagaacccaggtttgaggaggaagtcattattgggtcctggttctgggcagaaaaagaggccagtttggagggtggagcttcagcaatctgtgaatctgagccaggaactgaggagggggccattggcggatccgcgtactgggctgaggaaaagtccagtttgggggctgtggccagagaagaggccaagccggagtctgaagaagaggccatatttgggtcctggttctgggacagagatgaggcctgctttgacctaaatccctgtcctgtgtacaaggtcagtgataggttcagagatgcagctgaggagcttaatgcatcctccaggccccaaacctgggacgaggtcactgttgaattcaaacctggtctttttcatggggttggcttccgatccacaagcccctttggaattcccgaagaggcttctgaaatgcttgaggcaaagcccaagaacctggaacttagcccagaaggagaagagcaggaatctttgcttcagcctgatcagcctagtcctgagttcacatttcagtatgatccttcctaccggtcagtccgggaaattcgagagcatcttagggccagggagagtgcagagtctgagagttggtcctgcagctgcatacaatgtgagctgaaaattggttctgaagagtttgaagaattccttttattaatggacaaaattcgggatccttttattcatgaaatatctaaaattgcaatgggtatgagaagtgcttctcaatttacccgagatttcattcgagattcaggtgttgtctcacttattgaaaccttgcttaattatccatcctctagagttaggacaagttttttggaaaatatgattcacatggctccaccttatccaaatctaaacatgattgagacattcatatgtcaagtgtgtgaggaaacccttgcacatagtgtggattcccttgagcagctgactggaataaggatgcttagacacctcactatgactattgactatcacacactgattgccaactatatgtccgggtttctctccttattaaccacagccaatgcgagaacgaagtttcacgttctgaaaatgctattgaatttgtctgaaaatcctgctgtggcaaaaaaactattcagtgccaaagctctttcaatatttgtgggtctctttaacatagaagagacaaatgataatattcaaattgttattaaaatgtttcagaatatcagtaacattataaaaagtggaaagatgtccttaattgatgatgatttcagtcttgagccgcttatttctgcatttcgtgaatttgaggagttagctaagcaactacaagcccaaatagacaaccaaaatgatcctgaggtgggacaacaaagttaatatgattaaccacctgccgctgatcagccttatgttcccaaagagccctgagtagtgctttggtgttcacagtctgtttttttgttgtaacttatattttttaatgctgatgttaactttgtcaaactcttgttttgagctggatcattttgtggatgccaaatgaatatcaaaactgaaaacacatttgttgatatttgtcttgctgtccagattgcggtatttttcagtattaagttttcaatgaactgtgtcacctaagtaagctaccctgctattcgttgtttaaatatatggttctctatttgagtctgtgttttcaataaagttctatgttaaaattggca

SEQ ID NO: 8796 - DNA, 581 bp, Homo sapiens
  source 1..581: mol_type = unassigned DNA; mol_type = unassigned DNA
tgccgcatcctgcgcagcccctgcctactttggtgcagaggcgtggggggcgggacgcgtctttcccgttcggatcgcggggaaagcagtggctccaagtgagccagaggagagctgaggagaggagggggaggccgacgacctgggccctgggcctctgaaggtctggcgtattctgacaggacacagtgagcgtctgtagaggagaggcttgaaataaaggagcacgaatattgcctggatttctggaggcctactttaaggctggccaattctgcaagaaaggcaaggaggaggagactggctcacagctctggaggacccccttctgtcagctgtggggcttgacaccacttgaacaagaaaaggagggggaaactgcaccacatcagtgaagatccacctccagtggctgctctgctggtggtggagttgctgctgacaaccaccctcaacgggtctgcacccatccaggaaatatctgtcttcctttagcttggttgtacctgttctcactctatctgtattattgaattattgactgagactgtgtttgggaaggaggctgagtgactactgga

SEQ ID NO: 8797 - DNA, 659 bp, Homo sapiens
  source 1..659: mol_type = unassigned DNA; mol_type = unassigned DNA
cgcgtctttcccgttcggatcgcggggaaagcagtggctccaagtgagccagaggagagctgaggagaggagggggaggccgacgacctgggccctgggcctctgaaggctccaggttgatgtcaaagtcttgtgtctgtgcggtaggtctggcgtattctgacaggacacagtgagcgtctgtagaggagaggcttgaaataaaggagcacgaatattgcctggatttctggaggcctactttaaggctggccaattctgcaagaaaggcaaggaggaggagactggctcacagctctggaggacccccttctgtcagctgtggggcttgacaccacttgaacaagaaaaggagggggaaactgcaccacatcagtgaagatccacctccagtggctgctctgctggtggtggagttgctgctgacaaccaccctcaacgggtctgcacccatccaggaaatatctgtcttcctttagcttggttgtacctgttctcactctatctgtattattgaattattgactgagactgtgtttgggaaggaggctgagtgactactggactggatattgactctaactcttattcccaagcttatatccttaatcacctaaagatcagagtgtgaagaaacaaacctgtgacagatctgtggt

SEQ ID NO: 8798 - DNA, 3935 bp, Homo sapiens
  source 1..3935: mol_type = unassigned DNA; mol_type = unassigned DNA
agcagcgacagaaatatggtagtggtcgccacgttagggtccgtgggggcctcctgaggcagcctggtgccaacccgcacgcccaggctggggctcatcctggccctgcccacctcggggtcggaactacggtgggcctgggatgggggcgtcaagcactttcgcgccgtatccctccgccccccttcccgacaccctcgcggcgagcggttcttgccgcatcctgcgcagcccctgcctactttggtgcagaggcgtggggggcgggacgcgtctttcccgttcggatcgcggggaaagcagtggctccaagtgagccagaggagagctgaggagaggagggggaggccgacgacctgggccctgggcctctgaaggtctggcgtattctgacaggacacagtgagcgtctgtagaggagaggcttgaaataaaggagcacgaatattgcctggatttctggaggcctactttaaggctggccaattctgcaagaaaggcaaggaggaggagactggctcacagctctggaggacccccttctgtcagctgtggggcttgacaccacttgaacaagaaaaggagggggaaactgcaccacatcagtgaaggaggcagccggtccagagagactttctcaaagcccagctgtcccacctagcattcaacatcagtcgcactgcatacgtctcatacaattggaagagactcaaagcctcatttcattctctctccctagatccacctccagtggctgctctgctggtggtggagttgctgctgacaaccaccctcaacgggtctgcacccatccaggaaatatctgtcttcctttagcttggttgtacctgttctcactctatctgtattattgaattattgactgagactgtgtttgggaaggaggctgagtgactactggactggatattgactctaactcttattcccaagcttatatccttaatcacctaaagatcagagtgtgaagaaacaaacctgtgacagatctgtggttgaggtttagactacgggaggagtatattacctgactttctttgtaacttgtaccatgactggggcagagattgagcctagtgcccaggccaagcctgaaaagaaggctggggaagaggttatcgctgggcctgagagagagaatgatgtccctctggtggtcagacccaaggttaggacccaggcaactactggggcaaggcccaaaactgagaccaagtctgtgcctgcggcaaggcccaaaactgaggcccaagcaatgtctggggcaaggcccaaaactgaggtccaagtaatgggtggtgcaagacccaaaacggaggctcaaggaatcacaggggccaggcccaaaaccgatgccagggcagtaggtggcgctcgttctaaaactgatgccaaggcaatccctggagcaaggcccaaggatgaggcccaggcatgggcccagagtgaatttgggactgaagcagtgtcacaggcagaaggagtgtcccagactaatgccgttgcttggccactggccactgctgagtctggatcagttactaaatctaagggcctgtctatggatagagaactagtcaatgtggatgctgaaacctttcctggcacccagggtcagaaaggaatccagccctggtttggaccaggggaggagactaatatggggtcttggtgctattccaggcccagggccagagaggaggcctctaatgagtctgggttctggtcagcagatgagacctctacagcgtcttctttctggactggagaagagacaagtgtcagatcatggcccagggaagagtccaataccaggtccaggcacagggctaaacatcagactaatcccaggtccaggcccagatccaagcaagaagcctatgttgattcctggtctggatctgaggatgaggccagcaacccattctccttctgggttggagaaaataccaataacttgttcaggcccagagtcagggaggaggcaaatatcaggtccaagctcaggacaaatagagaagattgttttgaatctgagtctgaagatgagttctataagcagtcctgggttttgcctggagaagaggccaatagtagattcaggcacagagacaaagaagatcctaatactgccttgaaactcagggcccagaaagatgttgacagtgatagggtcaaacaagaacccaggtttgaggaggaagtcattattgggtcctggttctgggcagaaaaagaggccagtttggagggtggagcttcagcaatctgtgaatctgagccaggaactgaggagggggccattggcggatccgcgtactgggctgaggaaaagtccagtttgggggctgtggccagagaagaggccaagccggagtctgaagaagaggccatatttgggtcctggttctgggacagagatgaggcctgctttgacctaaatccctgtcctgtgtacaaggtcagtgataggttcagagatgcagctgaggagcttaatgcatcctccaggccccaaacctgggacgaggtcactgttgaattcaaacctggtctttttcatggggttggcttccgatccacaagcccctttggaattcccgaagaggcttctgaaatgcttgaggcaaagcccaagaacctggaacttagcccagaaggagaagagcaggaatctttgcttcagcctgatcagcctagtcctgagttcacatttcagtatgatccttcctaccggtcagtccgggaaattcgagagcatcttagggccagggagagtgcagagtctgagagttggtcctgcagctgcatacaatgtgagctgaaaattggttctgaagagtttgaagaattccttttattaatggacaaaattcgggatccttttattcatgaaatatctaaaattgcaatgggtatgagaagtgcttctcaatttacccgagatttcattcgagattcaggtgttgtctcacttattgaaaccttgcttaattatccatcctctagagttaggacaagttttttggaaaatatgattcacatggctccaccttatccaaatctaaacatgattgagacattcatatgtcaagtgtgtgaggaaacccttgcacatagtgtggattcccttgagcagctgactggaataaggatgcttagacacctcactatgactattgactatcacacactgattgccaactatatgtccgggtttctctccttattaaccacagccaatgcgagaacgaagtttcacgttctgaaaatgctattgaatttgtctgaaaatcctgctgtggcaaaaaaactattcagtgccaaagctctttcaatatttgtgggtctctttaacatagaagagacaaatgataatattcaaattgttattaaaatgtttcagaatatcagtaacattataaaaagtggaaagatgtccttaattgatgatgatttcagtcttgagccgcttatttctgcatttcgtgaatttgaggagttagctaagcaactacaagcccaaatagacaaccaaaatgatcctgaggtgggacaacaaagttaatatgattaaccacctgccgctgatcagccttatgttcccaaagagccctgagtagtgctttggtgttcacagtctgtttttttgttgtaacttatattttttaatgctgatgttaactttgtcaaactcttgttttgagctggatcattttgtggatgccaaatgaatatcaaaactgaaaacacatttgttgatatttgtcttgctgtccagattgcggtatttttcagtattaagttttcaatgaactgtgtcacctaagtaagctaccctgctattcgttgtttaaatatatggttctctatttgagtctgtgttttcaataaagttctatgttaaaattggc

SEQ ID NO: 8799 - DNA, 3847 bp, Homo sapiens
  source 1..3847: mol_type = unassigned DNA; mol_type = unassigned DNA
agcagcgacagaaatatggtagtggtcgccacgttagggtccgtgggggcctcctgaggcagcctggtgccaacccgcacgcccaggctggggctcatcctggccctgcccacctcggggtcggaactacggtgggcctgggatgggggcgtcaagcactttcgcgccgtatccctccgccccccttcccgacaccctcgcggcgagcggttcttgccgcatcctgcgcagcccctgcctactttggtgcagaggcgtggggggcgggacgcgtctttcccgttcggatcgcggggaaagcagtggctccaagtgagccagaggagagctgaggagaggagggggaggccgacgacctgggccctgggcctctgaaggcctactttaaggctggccaattctgcaagaaaggcaaggaggaggagactggctcacagctctggaggacccccttctgtcagctgtggggcttgacaccacttgaacaagaaaaggagggggaaactgcaccacatcagtgaaggaggcagccggtccagagagactttctcaaagcccagctgtcccacctagcattcaacatcagtcgcactgcatacgtctcatacaattggaagagactcaaagcctcatttcattctctctccctagatccacctccagtggctgctctgctggtggtggagttgctgctgacaaccaccctcaacgggtctgcacccatccaggaaatatctgtcttcctttagcttggttgtacctgttctcactctatctgtattattgaattattgactgagactgtgtttgggaaggaggctgagtgactactggactggatattgactctaactcttattcccaagcttatatccttaatcacctaaagatcagagtgtgaagaaacaaacctgtgacagatctgtggttgaggtttagactacgggaggagtatattacctgactttctttgtaacttgtaccatgactggggcagagattgagcctagtgcccaggccaagcctgaaaagaaggctggggaagaggttatcgctgggcctgagagagagaatgatgtccctctggtggtcagacccaaggttaggacccaggcaactactggggcaaggcccaaaactgagaccaagtctgtgcctgcggcaaggcccaaaactgaggcccaagcaatgtctggggcaaggcccaaaactgaggtccaagtaatgggtggtgcaagacccaaaacggaggctcaaggaatcacaggggccaggcccaaaaccgatgccagggcagtaggtggcgctcgttctaaaactgatgccaaggcaatccctggagcaaggcccaaggatgaggcccaggcatgggcccagagtgaatttgggactgaagcagtgtcacaggcagaaggagtgtcccagactaatgccgttgcttggccactggccactgctgagtctggatcagttactaaatctaagggcctgtctatggatagagaactagtcaatgtggatgctgaaacctttcctggcacccagggtcagaaaggaatccagccctggtttggaccaggggaggagactaatatggggtcttggtgctattccaggcccagggccagagaggaggcctctaatgagtctgggttctggtcagcagatgagacctctacagcgtcttctttctggactggagaagagacaagtgtcagatcatggcccagggaagagtccaataccaggtccaggcacagggctaaacatcagactaatcccaggtccaggcccagatccaagcaagaagcctatgttgattcctggtctggatctgaggatgaggccagcaacccattctccttctgggttggagaaaataccaataacttgttcaggcccagagtcagggaggaggcaaatatcaggtccaagctcaggacaaatagagaagattgttttgaatctgagtctgaagatgagttctataagcagtcctgggttttgcctggagaagaggccaatagtagattcaggcacagagacaaagaagatcctaatactgccttgaaactcagggcccagaaagatgttgacagtgatagggtcaaacaagaacccaggtttgaggaggaagtcattattgggtcctggttctgggcagaaaaagaggccagtttggagggtggagcttcagcaatctgtgaatctgagccaggaactgaggagggggccattggcggatccgcgtactgggctgaggaaaagtccagtttgggggctgtggccagagaagaggccaagccggagtctgaagaagaggccatatttgggtcctggttctgggacagagatgaggcctgctttgacctaaatccctgtcctgtgtacaaggtcagtgataggttcagagatgcagctgaggagcttaatgcatcctccaggccccaaacctgggacgaggtcactgttgaattcaaacctggtctttttcatggggttggcttccgatccacaagcccctttggaattcccgaagaggcttctgaaatgcttgaggcaaagcccaagaacctggaacttagcccagaaggagaagagcaggaatctttgcttcagcctgatcagcctagtcctgagttcacatttcagtatgatccttcctaccggtcagtccgggaaattcgagagcatcttagggccagggagagtgcagagtctgagagttggtcctgcagctgcatacaatgtgagctgaaaattggttctgaagagtttgaagaattccttttattaatggacaaaattcgggatccttttattcatgaaatatctaaaattgcaatgggtatgagaagtgcttctcaatttacccgagatttcattcgagattcaggtgttgtctcacttattgaaaccttgcttaattatccatcctctagagttaggacaagttttttggaaaatatgattcacatggctccaccttatccaaatctaaacatgattgagacattcatatgtcaagtgtgtgaggaaacccttgcacatagtgtggattcccttgagcagctgactggaataaggatgcttagacacctcactatgactattgactatcacacactgattgccaactatatgtccgggtttctctccttattaaccacagccaatgcgagaacgaagtttcacgttctgaaaatgctattgaatttgtctgaaaatcctgctgtggcaaaaaaactattcagtgccaaagctctttcaatatttgtgggtctctttaacatagaagagacaaatgataatattcaaattgttattaaaatgtttcagaatatcagtaacattataaaaagtggaaagatgtccttaattgatgatgatttcagtcttgagccgcttatttctgcatttcgtgaatttgaggagttagctaagcaactacaagcccaaatagacaaccaaaatgatcctgaggtgggacaacaaagttaatatgattaaccacctgccgctgatcagccttatgttcccaaagagccctgagtagtgctttggtgttcacagtctgtttttttgttgtaacttatattttttaatgctgatgttaactttgtcaaactcttgttttgagctggatcattttgtggatgccaaatgaatatcaaaactgaaaacacatttgttgatatttgtcttgctgtccagattgcggtatttttcagtattaagttttcaatgaactgtgtcacctaagtaagctaccctgctattcgttgtttaaatatatggttctctatttgagtctgtgttttcaataaagttctatgttaaaattggc

SEQ ID NO: 8800 - DNA, 2317 bp, Homo sapiens
  source 1..2317: mol_type = unassigned DNA; mol_type = unassigned DNA
agacgtccgctgtgccgtcctcacagcaaggcctgctccgaggccccggggtgcgtcagcagccctcctcaaacaccctgggagtgcccagcagggcggaacacaccgggaaaccaacaccccaaaggcacaaggaagtatccctggagctaaaaatagttctggaaacttgccagggggccacaggctgggacgtgcgttaaggctccctggccaggctctgggttggtgtagtggggaaggggcgcccaggtcggccctgggaggacatgaacaggcttaggccgagggctctcagatgtatttacctctgtgcctggcagctggcccgtggtgacaggcagagctggaggctggccatcttggaaggcggccgaaggcccatgtgtcctcttggcctctggccccggagggcggatggggatgtggaagttgctgacagagcattttctgagctgttgggtcaggggctggggtgtctacagtgcagggaagctcagcagtgttgttcactcccatgcatctgtacaaaggggtgctaggcttgggagggggcccccgtgttcacaacctcacccccaagttggccactcctgggttagagactatgccagggttggcctgccccctttacctcttccctgcccccagagagccttgcttggtttgtgggaggtggggaagggagctgagagccctgggatcttcaaactgttcctgcttttccttgtagctaagaggccggtgtcaccatacagcgggtacaatgggcagctgctgaccagtgtgtaccagcccactgagatggccctgatgcacaaagttccgtccgaaggagcttacgacatcatcctcccacgggccaccgccaacagccaggtgatgggcagtgccaactcgaccctgcgggctgaagacatgtactcggcccagagccaccaggcggccacaccgccgaaagacggcaagaactctcaggtaagcgaactgacccagagaggccaggccaacaccaaccaggttttcctaagactctgacgtccagcagcctctctccgtggcccaccctgggctcagtccccacaaagtaaaacgagatggtagaagccctcttcccgggactgcacggcatcctgatcctcattcctctgtacccaggctggaccgggcccagcacctttcccatccttgtcattggagctgggaggggccggaggccaccaacctgaagcagtggaccgagtgggcccccgtgaagccctgagtgtgtgactggagcgcctagggccacctccctttcctgcccagcccatcttcctggtccccaggtggctgcagctacaaggagctgtccgcgggcccccaggctgcctccaactcccctcttgacacgcccccctccccccaaatcatagtccctgtgtccccaagctgtggttcagattgccttcttcccctctgtgaacaacaggcctcagtgccccgtcttgactctggaccttcctggccctgccatcttggtgtctggcactggcttgtcccaccctctgcctagatggatctcctccatgagtctttggagccaagccagggcagaagttggcccttgcccttctcaccagggcctcctgccaccacctggactgtggaaggccactgagatgggggcagagctcagcccgaggcttgggcacactgcttctctccacggcctgtgggtcctggatctgagcccttggggtgtttcactcaagagccactgagccgtccccatcttccacaaagcagtttccacaagcaagccagggccagccctgcctgcactctgcccgcagtgcccctcaacgtctgggatgaggatgagcctgctgagatgagggcagctctctccatccagcagtacctcatggagtgctcactaaggagttaggaatggcaggccacgctggcatctggggttcaaggtggctcctgtggcaggaacaggtgtccatgaccctgattacctggatctcacaggttctgggaatgcaataggggcctgctgtggctattccaacatctctggtcagggcctggaagtaccttaggacacatggggttggggtcaggactgcattctcagggaccagtggagagccctggaccagatgaactggagtctaggcctctctcgtgactgggacttgtgggacgtgggaggcctgtgagatccaggactaaagattatgctgtttcctaatgggcagatatgtaagtaggtaagtgggatcctcaggtaagcgggatccagaactaaagactgtgctatttcctg

SEQ ID NO: 8801 - DNA, 393 bp, Homo sapiens
  source 1..393: mol_type = unassigned DNA; mol_type = unassigned DNA
ccggagccagacgtccgctgtgccgtcctcacagcaaggcctgctccgaggccccgggctaagaggccggtgtcaccatacagcgggtacaatgggcagctgctgaccagtgtgtaccagcccactgagatggccctgatgcacaaagttccgtccgaaggagcttacgacatcatcctcccacgggccaccgccaacagccaggtgatgggcagtgccaactcgaccctgcgggctgaagacatgtactcggcccagagccaccaggcggccacaccgccgaaagacggcaagaactctcaggtctttagaaacccctacgtgtgggactgagtcagcggtggcgaggagaggcgggcggatttggggagggccctgaggacctggccccgg

SEQ ID NO: 8802 - DNA, 1273 bp, Homo sapiens
  source 1..1273: mol_type = unassigned DNA; mol_type = unassigned DNA
agagccaacgtgtcccggagcgcagaggcccagggggtcgcgctaaacactgtacctcggggaacaaaaccgtgaaggctaattaggacaagtcggagcagggaacggggacgccgggaggggagagcgcgctccgagttgggcagaacctggaacggtcacaggaaacccgggcgcggggtagtcgggccgagggggacctttgcccacggtccagagtggtctggactcggcccacgcgtgagaggagcgcttggtgacgatcccacgtacgcttggtgactggtggaggtcccagagaaggaccgtgcgtgcaaaaggcgaacctcggtgtgcggtgtgtccacgtgtgcaagctggggaggggagggggcgcagaaggcgtgacaaagacggactctgtcttgagtgtgcgcctcgctccggcccgctcccagcgaactgtgcctgaagtgaccaagtccagcccagagcaaagctaccagggggacatgtaccccacccggggcgtgggctatgagaccatcctgaaagagcagaagggtcagagcatgttcgtggagaacaaggccttttccatggatgagccggttgcagctaagaggccggtgtcaccatacagcgggtacaatgggcagctgctgaccagtgtgtaccagcccactgagatggccctgatgcacaaagttccgtccgaaggagcttacgacatcatcctcccacgggccaccgccaacagccaggtgatgggcagtgccaactcgaccctgcgggctgaagacatgtactcggcccagagccaccaggcggccacaccgccgaaagacggcaagaactctcaggtctttagaaacccctacgtgtgggactgagtcagcggtggcgaggagaggcgggcggatttggggagggccctgaggacctggccccgggcaagggactctccaggctcctcctccccctggcaggcccagcaacatgtgccccagatctggaagggcctccctctctgccagtgtttgggtgggtgtcatgggtgtccccacccactcctcagtgtttgtggagtcgaggagccaaccccagcctcctgccaggatcacctcggcggtcacactccagccaaatagtgttctcggggtggtggctgggcagcgcctatgtttctctggagattcctgcaacctcaagagacttcccaggcgctcaggcctggatcttgctcctctgtgaggaacaagggtgcctaataaatacatttctgctttattaa

SEQ ID NO: 8803 - DNA, 1592 bp, Homo sapiens
  source 1..1592: mol_type = unassigned DNA; mol_type = unassigned DNA
agaacctggaacggtcacaggaaacccgggcgcggggtagtcgggccgagggggacctttgcccacggtccagagtggtctggactcggcccacgcgtgagaggagcgcttggtgacgatcccacgtacgcttggtgactggtggaggtcccagagaaggaccgtgcgtgcaaaaggcgaacctcggtgtgcggtgtgtccacgtgtgcaagctggggaggggagggggcgcagaaggcgtgacaaagacggactctgtcttgagtgtgcgcctcgctccggcccgctcccagcgaactgtgcctgaagtgtgtctcacgggagggccaggacgaaggtgacaaaggctaggtgtcccccacggagacgcgccaaggtagccccgcgcgtgtccgtaggcgcgctctctggaagacgcggtggggggtgcgcagggctgcaccctcacaccaattgccccggcgaaggccgagcccagaaagtgagtgcgcgtgagtgtgcgcgcgcccgcatgcgggggcgtggcagtcaacagcaacaacccacacgccggcagggccagaaactcccatctccctcaccagccggaaagtacgagtcggctcagcctggagggacccaaccagagcctggcctgggagccaggatggccatccacaaagccttggtgatgtgcctgggactgcctctcttcctgttcccaggggcctgggcccagggccatgtcccacccggctgcagccaaggcctcaaccccctgtactacaacctgtgtgaccgctctggggcgtggggcatcgtcctggaggccgtggctggggcgggcattgtcaccacgtttgtgctcaccatcatcctggtggccagcctcccctttgtgcaggacaccaagaaacggagcctgctggggacccagctaagaggccggtgtcaccatacagcgggtacaatgggcagctgctgaccagtgtgtaccagcccactgagatggccctgatgcacaaagttccgtccgaaggagcttacgacatcatcctcccacgggccaccgccaacagccaggtgatgggcagtgccaactcgaccctgcgggctgaagacatgtactcggcccagagccaccaggcggccacaccgccgaaagacggcaagaactctcaggtctttagaaacccctacgtgtgggactgagtcagcggtggcgaggagaggcgggcggatttggggagggccctgaggacctggccccgggcaagggactctccaggctcctcctccccctggcaggcccagcaacatgtgccccagatctggaagggcctccctctctgccagtgtttgggtgggtgtcatgggtgtccccacccactcctcagtgtttgtggagtcgaggagccaaccccagcctcctgccaggatcacctcggcggtcacactccagccaaatagtgttctcggggtggtggctgggcagcgcctatgtttctctggagattcctgcaacctcaagagacttcccaggcgctcaggcctggatcttgctcctctgtgaggaacaagggtgcctaataaatacatttctgctttattaa

SEQ ID NO: 8804 - DNA, 550 bp, Homo sapiens
  source 1..550: mol_type = unassigned DNA; mol_type = unassigned DNA
ctgccggggacagctgggactggacaccacccagaagccagctggctggccctgccctgccctgctggaggcaccatctctgggacccaaccagagcctggcctgggagccaggatggccatccacaaagccttggtgatgtgcctgggactgcctctcttcctgttcccaggggcctgggcccagggccatgtcccacccggctgcagccaaggcctcaaccccctgtactacaacctgtgtgaccgctctggggcgtggggcatcgtcctggaggccgtggctggggcgggcattgtcaccacgtttgtgctcaccatcatcctggtggccagcctcccctttgtgcaggacaccaagaaacggagcctgctggggacccaggtattcttccttctggggaccctgggcctcttctgcctcgtgtttgcctgtgtggtgaagcccgacttctccacctgtgcctctcggcgcttcctctttggggttctgttcgccatctgcttctcttgtctggcggctcacgtctttgccctcaacttcctggccc

SEQ ID NO: 8805 - DNA, 584 bp, Homo sapiens
  source 1..584: mol_type = unassigned DNA; mol_type = unassigned DNA
agcctggaggtgagtcggggcggggagggccgggcaggctttgttcctgtgtaaacggagcgcacgtacctggagcgcggcgggcgcccgattagcgccctgaatggaggtgatgtaacggtgatgcaggctccagcccaccctcgccgaaagcaaggagccctgcctggggacaggcccgcgcgagagcgagcaacccagcgcgcctggctcagcctcggtcccagggagaggcaggccctgcgtcccggcccgggccccgccatcccagccaggaccgggcctggcccagcgccccgcgccgcgtccctcccacccccgcccgccccccgcctggggctggagttggccccaaacgctgcgctggagcggggccggcggcgagtcccagggacccaaccagagcctggcctgggagccaggatggccatccacaaagccttggtgatgtgcctgggactgcctctcttcctgttcccaggggcctgggcccagggccatgtcccacccggctgcagccaaggcctcaaccccctgtactacaacctgtgtgaccgctctggggcgtggggcatcgtcctgga

SEQ ID NO: 8806 - DNA, 2224 bp, Homo sapiens
  source 1..2224: mol_type = unassigned DNA; mol_type = unassigned DNA
tgtaccactgcactccagcctggacaacagagtgagactctgtctccaaaaataaataaataagaaaaaaaaaaaaaagtgcagatggggcggggccagagctgggatggagctgactgttagcatccgttcagggcgtcggcaccatgggggcactatccagcgcagatctgcaagcccagcattcagcactccctcccccagccccagctgttgccagctgcatggggccagctgtgttgggtggggactgtgtagggtccagctatgagttggtggagtctgcgtggggactgtgtagggtccagctatgagttggtgaggcttaacaagcagtgcaggtgattccaatgcacactcatctgtggttttggaccacagatgtagatgttccagggaccacatggacaggggccattgcagacaggcctgaggacctcctgggcctgattgacttgaaggctagtttggggtctgggagctacagagatttggtggcagctctttcccatagggctaagacagatggggccaggaatacacctttcctccagcataggagccggaacaggtacctcaggaccctcttcaccccacagctggtgtctctcacccacatgggagcaagacccagcgccaggcagagaattcaggtttcaagactccaaatcagggctggttgcagtggctcatgcctttaatcccagtgctctgggagactgacatgggagaactgcttgaggccgagggttcgagagcagccctggcaacgtagtgagaccccccccccccgcccaccatctctacaaaaaaaaaaaaaagactccaaatcagaccggccagactagatgcctagagagatgtgtgggcacacccagagccatgtcctccgccagggaagccagcaactgtgatgctgggggtatggtagtgacaggcggtcgactcggggtaatattcttggaggagccgggcatggtggctcacacctataatcccggcactttgggaagccgaggcgggtggatcacgaggtcaggagattgagaccatcctggctaacatgatgaaacaccgtctctaataaaaatacaaaaaattagccgggcacggtggcgggctcctgtagtcccagctactcgggaggctgaggcaggagaatggcgtgaacccgggaggcagagtttgcagttggccgagatcacgccactgcactccagcctgggcgacagagcgagactccgtctcaaaaaaaaaaaaaaagattcttggaggaagggggcctgggagctatgtcagacaggtagtagcagctctgtgtggctgactctccactggccctagcatttccctaaacaattggaagtaggagggtcttgagaaggggatccccctctgtgaagccccagcaccatccaaggtcagcaggggcctcgttcccatgcccagaggcagggtgagataaggggctcaggtctggctgtcccaggctgctcctggggcccagccagagggggcagaggagccgaggggggagttgggggggatctggcagtcccagccctgcaggaagtgtttgtgcatccgccccggcggaacctggctcccaatccccgactgtgagaccgcctgttcttccttccagtccgaaggagcttacgacatcatcctcccacgggccaccgccaacagccaggtgatgggcagtgccaactcgaccctgcgggctgaagacatgtactcggcccagagccaccaggcggccacaccgccgaaagacggcaagaactctcaggtctttagaaacccctacgtgtgggactgagtcagcggtggcgaggagaggcgggcggatttggggagggccctgaggacctggccccgggcaagggactctccaggctcctcctccccctggcaggcccagcaacatgtgccccagatctggaagggcctccctctctgccagtgtttgggtgggtgtcatgggtgtccccacccactcctcagtgtttgtggagtcgaggagccaaccccagcctcctgccaggatcacctcggcggtcacactccagccaaatagtgttctcggggtggtggctgggcagcgcctatgtttctctggagattcctgcaacctcaagagacttcccaggcgctcaggcctggatcttgctcctctgtgaggaacaagggtgcctaataaatacatttctgctttatt

SEQ ID NO: 8807 - DNA, 1554 bp, Homo sapiens
  source 1..1554: mol_type = unassigned DNA; mol_type = unassigned DNA
caacctgtgtgaccgctctggggcgtggggcatcgtcctggaggccgtggctggggcgggcattgtcaccacgtttgtgctcaccatcatcctggtggccagcctcccctttgtgcaggacaccaagaaacggagcctgctggggacccaggtattcttccttctggggaccctgggcctcttctgcctcgtgtttgcctgtgtggtgaagcccgacttctccacctgtgcctctcggcgcttcctctttggggttctgttcgccatctgcttctcttgtctggcggctcacgtctttgccctcaacttcctggcccggaagaaccacgggccccggggctgggtgatcttcactgtggctctgctgctgaccctggtagaggtcatcatcaatacagagtggctgatcatcaccctggttcggggcagtggcgagggcggccctcagggcaacagcagcgcaggctgggccgtggcctccccctgtgccatcgccaacatggactttgtcatggcactcatctacgtcatgctgctgctgctgggtgccttcctgggggcctggcccgccctgtgtggccgctacaagcgctggcgtaagcatggggtctttgtgctcctcaccacagccacctccgttgccatatgggtggtgtggatcgtcatgtatacttacggcaacaagcagcacaacagtcccacctgggatgaccccacgctggccatcgccctcgccgccaatgcctgggccttcgtcctcttctacgtcatccccgaggtctcccaggatgacgaccagagcagctctctggagaggtgccctgtagtcagtcccacagctctctggtgctacccccgtccccagcagcctgtgcctttgtcactggcatacttttccagagctaaattgggcgagcaatccctgcagagtaggattgcagctctgactgtggcccccgacctctctgtgttgcctgtcgaagtccatgaacagaatgttatttccctccagtggaagggaagcagggagctctgtggacctcacgctgcccttggtctagcttagcggccccaagatcccttagtgaatcaaggcgctgtgttgctttcctatgtgataatttcaaaggagtccccggcagggcctgatacccagaggctgcagtctccagtggacgtgggtgtgtgtatagcctgagtcctctgggggtctgcgcgtgaggctcagggagggatgggatcctaaaagatgcaggcctgcctgtattcaggagtacccactggccctgcttactcccgcccgggccaagtggagaagaagttagatgagttcttaggaggagagaggcagcttctttgaggtggtcgagtggcatcacaaacaagcgttgaatggaaaaagactagaagaggcagagcctgtcacaggttcaccatcatccagccaacactatgggaaatctcacacccaccactgtcaaaccgaggactttggacttaataactgctcagaattaaacgaccttaccttccatgggtgagggcttactgcca

SEQ ID NO: 8808 - DNA, 1419 bp, Homo sapiens
  source 1..1419: mol_type = unassigned DNA; mol_type = unassigned DNA
ggggaacctccctgaagagtgccctggtcacagcacccttgaagacagccattggccatggggacccaaccagagcctggcctgggagccaggatggccatccacaaagccttggtgatgtgcctgggactgcctctcttcctgttcccaggggcctgggcccagggccatgtcccacccggctgcagccaaggcctcaaccccctgtactacaacctgtgtgaccgctctggggcgtggggcatcgtcctggaggccgtggctggggcgggcattgtcaccacgtttgtgctcaccatcatcctggtggccagcctcccctttgtgcaggacaccaagaaacggagcctgctggggacccaggtattcttccttctggggaccctgggcctcttctgcctcgtgtttgcctgtgtggtgaagcccgacttctccacctgtgcctctcggcgcttcctctttggggttctgttcgccatctgcttctcttgtctggcggctcacgtctttgccctcaacttcctggcccggaagaaccacgggccccggggctgggtgatcttcactgtggctctgctgctgaccctggtagaggtcatcatcaatacagagtggctgatcatcaccctggttcggggcagtggcgagggcggccctcagggcaacagcagcgcaggctgggccgtggcctccccctgtgccatcgccaacatggactttgtcatggcactcatctacgtcatgctgctgctgctgggtgccttcctgggggcctggcccgccctgtgtggccgctacaagcgctggcgtaagcatggggtctttgtgctcctcaccacagccacctccgttgccatatgggtggtgtggatcgtcatgtatacttacggcaacaagcagcacaacagtcccacctgggatgaccccacgctggccatcgccctcgccgccaatgcctgggccttcgtcctcttctacgtcatccccgaggtctcccaggtgaccaagtccagcccagagcaaagctaccagggggacatgtaccccacccggggcgtgggctatgagaccatcctgaaagagcagaagggtcagagcatgttcgtggagaacaaggccttttccatggatgagccggttgcagctaagaggccggtgtcaccatacagcgggtacaatgggcagctgctgaccagtgtgtaccagcccactgagatggccctgatgcacaaagttccgtccgaaggagcttacgacatcatcctcccacgggccaccgccaacagccaggtgatgggcagtgccaactcgaccctgcgggctgaagacatgtactcggcccagagccaccaggcggccacaccgccgaaagacggcaagaactctcaggtctttagaaacccctacgtgtgggactga

SEQ ID NO: 8809 - DNA, 1529 bp, Homo sapiens
  source 1..1529: mol_type = unassigned DNA; mol_type = unassigned DNA
aaagtacgagtcggctcagcctggagggacccaaccagagcctggcctgggagccaggatggccatccacaaagccttggtgatgtgcctgggactgcctctcttcctgttcccaggggcctgggcccagggccatgtcccacccggctgcagccaaggcctcaaccccctgtactacaacctgtgtgaccgctctggggcgtggggcatcgtcctggaggccgtggctggggcgggcattgtcaccacgtttgtgctcaccatcatcctggtggccagcctcccctttgtgcaggacaccaagaaacggagcctgctggggacccaggtattcttccttctggggaccctgggcctcttctgcctcgtgtttgcctgtgtggtgaagcccgacttctccacctgtgcctctcggcgcttcctctttggggttctgttcgccatctgcttctcttgtctggcggctcacgtctttgccctcaacttcctggcccggaagaaccacgggccccggggctgggtgatcttcactgtggctctgctgctgaccctggtagaggtcatcatcaatacagagtggctgatcatcaccctggttcggggcagtggcgagggcggccctcagggcaacagcagcgcaggctgggccgtggcctccccctgtgccatcgccaacatggactttgtcatggcactcatctacgtcatgctgctgctgctgggtgccttcctgggggcctggcccgccctgtgtggccgctacaagcgctggcgtaagcatggggtctttgtgctcctcaccacagccacctccgttgccatatgggtggtgtggatcgtcatgtatacttacggcaacaagcagcacaacagtcccacctgggatgaccccacgctggccatcgccctcgccgccaatgcctgggccttcgtcctcttctacgtcatccccgaggtctcccaggtgaccaagtccagcccagagcaaagctaccagggggacatgtaccccacccggggcgtgggctatgagaccatcctgaaagagcagaagggtcagagcatgttcgtggagaacaaggccttttccatggatgagccggttgcagctaagaggccggtgtcaccatacagcgggtacaatgggcagctgctgaccagtgtgtaccagcccactgagatggccctgatgcacaaagttccgtccgaaggagcttacgacatcatcctcccacgggccaccgccaacagccaggtgatgggcagtgccaactcgaccctgcgggctgaagacatgtactcggcccagagccaccaggcggccacaccgccgaaagacggcaagaactctcaggctcagtccccacaaagtaaaacgagatggtagaagccctcttcccgggactgcacggcatcctgatcctcattcctctgtacccaggctggaccgggcccagcacctttcccatccttgtcattggagctgggaggggccggaggccaccaacctgaagcagtggaccgagtgg

SEQ ID NO: 8810 - DNA, 2988 bp, Homo sapiens
  source 1..2988: mol_type = unassigned DNA; mol_type = unassigned DNA
aaacactccgggccgcccgccccgccaccagctggctccgaccggcgcaccgctggcgatcccccaggcaattcggcgtcatgagaaccggcaccccgagactcggcgccctgccctccctccgcgtctccagggccctggccaggcccaacaacctctccctcctctgtgcgcctcagcccctacgggcctctggcgcgggctaactaggcctcgctgcgggcccccaggactgcgcaccccaccccccgcgaggccagcagccccgggggaaggcggccggaaaatctcttgtttatcgggctggataagtaccagcctggattcgcttcccaatttctgcggtccagcttcagcagattcctggggccggaggggaaagggtggcaacccacagatccaccccggaacagggagtggggggtggggctggtgggaacctgacctcctggaaaggacggactcggagtcagagccaacgtgtcccggagcgcagaggcccagggggtcgcgctaaacactgtacctcggggaacaaaaccgtgaaggctaattaggacaagtcggagcagggaacggggacgccgggaggggagagcgcgctccgagttgggcagaacctggaacggtcacaggaaacccgggcgcggggtagtcgggccgagggggacctttgcccacggtccagagtggtctggactcggcccacgcgtgagaggagcgcttggtgacgatcccacgtacgcttggtgactggtggaggtcccagagaaggaccgtgcgtgcaaaaggcgaacctcggtgtgcggtgtgtccacgtgtgcaagctggggaggggagggggcgcagaaggcgtgacaaagacggactctgtcttgagtgtgcgcctcgctccggcccgctcccagcgaactgtgcctgaagtgtgtctcacgggagggccaggacgaaggtgacaaaggctaggtgtcccccacggagacgcgccaaggtagccccgcgcgtgtccgtaggcgcgctctctggaagacgcggtggggggtgcgcagggctgcaccctcacaccaattgccccggcgaaggccgagcccagaaagtgagtgcgcgtgagtgtgcgcgcgcccgcatgcgggggcgtggcagtcaacagcaacaacccacacgccggcagggccagaaactcccatctccctcaccagccggaaagtacgagtcggctcagcctggagggacccaaccagagcctggcctgggagccaggatggccatccacaaagccttggtgatgtgcctgggactgcctctcttcctgttcccaggggcctgggcccagggccatgtcccacccggctgcagccaaggcctcaaccccctgtactacaacctgtgtgaccgctctggggcgtggggcatcgtcctggaggccgtggctggggcgggcattgtcaccacgtttgtgctcaccatcatcctggtggccagcctcccctttgtgcaggacaccaagaaacggagcctgctggggacccaggtattcttccttctggggaccctgggcctcttctgcctcgtgtttgcctgtgtggtgaagcccgacttctccacctgtgcctctcggcgcttcctctttggggttctgttcgccatctgcttctcttgtctggcggctcacgtctttgccctcaacttcctggcccggaagaaccacgggccccggggctgggtgatcttcactgtggctctgctgctgaccctggtagaggtcatcatcaatacagagtggctgatcatcaccctggttcggggcagtggcgagggcggccctcagggcaacagcagcgcaggctgggccgtggcctccccctgtgccatcgccaacatggactttgtcatggcactcatctacgtcatgctgctgctgctgggtgccttcctgggggcctggcccgccctgtgtggccgctacaagcgctggcgtaagcatggggtctttgtgctcctcaccacagccacctccgttgccatatgggtggtgtggatcgtcatgtatacttacggcaacaagcagcacaacagtcccacctgggatgaccccacgctggccatcgccctcgccgccaatgcctgggccttcgtcctcttctacgtcatccccgaggtctcccaggtgaccaagtccagcccagagcaaagctaccagggggacatgtaccccacccggggcgtgggctatgagaccatcctgaaagagcagaagggtcagagcatgttcgtggagaacaaggccttttccatggatgagccggttgcagctaagaggccggtgtcaccatacagcgggtacaatgggcagctgctgaccagtgtgtaccagcccactgagatggccctgatgcacaaagttccgtccgaaggagcttacgacatcatcctcccacgggccaccgccaacagccaggtgatgggcagtgccaactcgaccctgcgggctgaagacatgtactcggcccagagccaccaggcggccacaccgccgaaagacggcaagaactctcaggtctttagaaacccctacgtgtgggactgagtcagcggtggcgaggagaggcgggcggatttggggagggccctgaggacctggccccgggcaagggactctccaggctcctcctccccctggcaggcccagcaacatgtgccccagatctggaagggcctccctctctgccagtgtttgggtgggtgtcatgggtgtccccacccactcctcagtgtttgtggagtcgaggagccaaccccagcctcctgccaggatcacctcggcggtcacactccagccaaatagtgttctcggggtggtggctgggcagcgcctatgtttctctggagattcctgcaacctcaagagacttcccaggcgctcaggcctggatcttgctcctctgtgaggaacaagggtgcctaataaatacatttctgctttattaa

SEQ ID NO: 8811 - DNA, 7433 bp, Homo sapiens
  source 1..7433: mol_type = unassigned DNA; mol_type = unassigned DNA
aaagaagataactcattcaaggtcaatcagcaatgtctgaagaagaaagaagaggacaggaaagaaacttcagtctgagggttgaggacacgtcccggagcagaggaggaccaagctcccaagccccctgtcaccttgacacgcagacggttccccaggactgcgaagaggggggcaaccagcgccccgccccgccccgctgcgccgcccgccattggccggtccgaaagacgcggggcgttgtcggtttgaatgagagcgcctggagccggggcgcaggcgcagaggagggcggtgttgagaccggcggagcggcgggacccctaggtggcggagggacgctccgggaaagcgaggggcgctacgagctctggcccacgtgacctgccgggggcgggagcagggggcgcgccggcctcctgcggtgcccctgccttggggaggggccgtgaccacccgtctgtcgcccgaggcggccgccgctgcaccttcaccgcgtacccgggacccgcccgcccgcgggagaaatgttgctgaagtgctgctgaaagggccagagatgcaaggatttgggatacattttgaacctttaagctgtctgacattgacctcctttcattattaataaagaagaatcaggagcttaggatgtattaacaccaactcattaatatactaaccggacaatgttctacaaacaattctacattgtaaaggactggattggcacaaaataaaataattttattttattcagcttataatatgactcgatggaggaaaatttgataagcatgagagaagaccattcttttcatgttcgttacagaatggaagcttcttgcctagagctggccttggaaggggaacgtctatgtaaatcaggagactgccgcgctggcgtgtcattctttgaagctgcagttcaagttggaactgaagacctaaaaacacttagcgctatttacagccagttgggcaatgcttatttctatttgcatgattatgccaaagcattagaatatcaccatcatgatttaacccttgcaaggactattggagaccagctgggggaagcgaaagctagtggtaatctgggaaacaccttaaaagttcttgggaattttgacgaagccatagtttgttgtcagcgacacctagatatttccagagagcttaatgacaaggtgggagaagcaagagcactttacaatcttgggaatgtgtatcatgccaaagggaaaagttttggttgccctggtccccaggatgtaggagaatttccagaagaagtgagagatgctctgcaggcagccgtggatttttatgaggaaaacctatcattagtgactgctttgggtgaccgagcggcacaaggacgtgcctttggaaatcttggaaacacacattacctccttggcaacttcagggatgcagttatagctcatgagcagcgtctccttattgcaaaagaatttggagataaagcagctgaaagaagagcatatagcaaccttggaaatgcatatatatttcttggtgaatttgaaactgcctcggaatactacaagaagacactactgttggcccgacagcttaaagaccgagctgtagaagcacagtcttgttacagtcttggaaatacatatactttacttcaagactatgaaaaggccattgattatcatctgaagcacttagcaattgctcaagagctgaatgatagaattggtgaaggaagagcatgttggagcttaggaaatgcatacacagcactaggaaatcatgatcaagcaatgcattttgctgaaaagcacttggaaatttcaagagaggttggggataaaagtggtgaactaacagcacgacttaatctctcagaccttcaaatggttcttggtctgagctacagcacaaataactccataatgtctgaaaatactgaaattgatagcagtttgaatggtgtacgccccaagttgggacgccggcatagtatggaaaatatggaacttatgaagttaacaccagaaaaggtacagaactggaacagtgaaattcttgctaagcaaaaacctcttattgccaaaccttctgcaaagctactctttgtcaacagactgaaggggaaaaaatacaaaacgaattcctccactaaagttctccaagatgccagtaattctattgaccaccgaattccaaattctcagaggaaaatcagtgcagatactattggagatgaagggttctttgacttattaagccgatttcaaagcaataggatggatgatcagagatgttgcttacaagaaaagaactgccatacagcttcaacaacaacttcttccactccccctaaaatgatgctaaaaacatcatctgttcctgtggtatcccccaacacggatgagtttttagatcttcttgccagctcacagagtcgccgtctggatgaccagagggctagtttcagtaatttgccagggcttcgtctaacacaaaacagccagtcggtacttagccacctgatgactaatgacaacaaagaggctgatgaagatttctttgacatccttgtaaaatgtcaaggatccagattagatgatcaaagatgtgctccaccacctgctaccacaaagggtccgacagtaccagatgaagactttttcagccttattttacggtcccagggaaagagaatggatgaacagagagttcttttacaaagagatcaaaacagagacactgactttgggctaaaggactttttgcaaaataatgctttgttggagtttaaaaattcagggaaaaaatcggcagaccattagttactatggatttattttttttcctttcaaacacggtaaggaaacaatctattacttttttccttaaaaggagaatttatagcactgtaatacagcttaaaatatttttagaatgatgtaaatagttaaccttcagtagtctattaaggcattaatacttctctggacatgcgcgtttgagggtggaggggtcctgtaaggtgcttcatcgtctgtgattactgcttgggatgtgttctttggcagcttgtgagattactttacctagtgtttataaagtaggaagttaagtgaatcatagattagaatttaatactcttatggaaataattttttaacatcttaattgacaatggcgtttttttatacataaccatggatgtagtgggaaacaatgttgtttggtaaaaataatgtacttgatcaatgtaaaaaagtatataaaatagtcttactaaaaatctaggtttttttttcctccatgaaaatctgtttttttaggccaaagtcagtataaaagaaactctacttcttgggctgggcatggtggctcattcctgtaatcccagcacattgggaggctgaggcaggaggatcgcttgaggctaggagttcaagaccaacctgggcaacatagacccccgtgtctatgaaaaataaatcagcagccaggcgcagtggctcacacctgtaatcccagcactttgggaggccgaagcgggcggatcacttgaggtcgggagtttgagaccagcctggccaacatagtgaaaccctgtctctactaaaaatacaaaaattagctgggcatggtggcatgcgcctgtagtttcagctacttgggaggctgaggcaggagaatcacttgaacccctgggaggcagagattgcagtgagctgagaccaagccactggactccagcctgagtgacagagcaagactctgtctcaaaaaaaaaaaaaacagcaagcatgctggcacacacctgtagtcccaactgcttaagaggctgaggcaggaggaccacttgagcccaggaggtggaggctgcactgagctatgatcgtgccactgcactccagcctgggtgacagagcaagaccctgtctctagaaaacaagtatcttttgtgtgttttgggctgtttaaaaaaattatttaaaatggtctcttctgttccataatactgctgtaaaacaaacttttctaagttctaatataaaaacaaaaaacaaaacccatgtggttaggtcaagaacctaggacacataaacaaacagaaaacagatgaaaactcacaaaaattaaatatgaaagaaagatgtcagctagaaccttagttgtcattaagctttgtcttccttatcccagatattgaaggcagtttacaaggggatgataacaaagtaactaactaactgtagcaaaagacaagtatgggacagactgggacctggagtaacactggatcacagactgcaaaggcccacgcttggaacaagttgccaacttgtttcactctgcttgcttcagactgtgcacagctgggatgggatctggggatgtggacccctattctttcaaaaagtcattcaggtgatttggatgggcaaatagaactatttctctaatggccaatgttttttaagagtcataacctggaattaattacattaagtgctcagctaaaaaaaaaaaaaaagttctaaattacaacctggattacattatgtttcatgtatactataaggtatgatgtcctggatagcattttaaaaactcaggtaagtttcatggggttcttataagaaaattcagttaagacaatataccaaaccacaacgtaaaaagtttgtgtatacaaactttttgtattatttgtacacaaagtacaaatttgtatttgtacacaaagtacaaactttgtgtattattttgtgtatacaatagttcttacagcctgtaaacattcaacattattccatttaaacattgtttttaacagctgtctaccctgttctgattttcctaaaagcttcacactatataggctgggcacaatggctcatgcctgtaatcccagcactttgggaggccgacaagggcgggtcacttgaggtcaggagttcgagaccagcctgaccaacatggtgaaaccccatctctactaaaaaatacaaaaattagccaggcatggtgatgcacatctgtaatcctagctactcgggagactgaggcaggagaatctcttgaacctgggaggtggaggttgcagtgagccgagattgtaccacctcactccagcctgggtgacagagcaaaactctcaaaaaaaagtaaaatttcaaaaaagcttcacaatataaaccttaattttaatgacatattggctagtcaataaacaagtcttatctcatctcatctcttttctgataacaaacacccgatgtgttcaatttgctttcatatttaagtctttcctgaattgctgtcatcattcaacaacagttgcatgtcgccttgctagctgtcaaagtagacttcatccccaaatggatatctgtaatgaaagaatacaaaggtgaaattttatttaaaaattttttaaaagaatttggttttggattaaaaggcatgcaagcagcattaattccactcacagttacagtctatcacctggggcattcactacttttcagagtcagatcacagttcaaaagacagctctcaccttgggggcatattccccaagtcagtgtgaacatgtcttgtcccaagaggacactttatacgcatggatgttcacaaatttattctaaactgcaggtgtctgtcaggattcatttgttaaacatgtcctctgtgttaaaaatcctaaaatccttttgcatttcttagaaaaaatcacgtttctgatgaaattctaaagatgtttgcaatattaaactagaatatattaacatgtataattttgagacaaggtcttgctctgtcacccaggctggagtacagtggctcgatcataactcactgccacctcacgatcctcttgcctcagccctccaagtagctgggactacaggcgtgtaccaccatgcctggctagttttatttttagtacatagccttgaacaactgagcttaagcgatcatcctccctcaaccttccaaagtgctaggactgtaggcatgagccactgcacctggcctaaaattacattgttacaggcacgtaagtaacacttcctggatccaaaaatgtgtattctgcatttcaacaactgaacttaagcgatcatcctccctcaaccttccaaagtgctaggactgtaggcatgagccactgcacctggcctaaaattacattgttacaggcacgtaagtaacacttcctggatccaaaaatgtgtattctgcatttcaacaactgaacttaagcgatcatcctccctcaaccttccaaagtgctaggactgtaggcatgagccactgcacctggcctaaaattacattgttacaggcacgtaagtaacacttcctggatccaaaaatgtgtattctgcatttcatattaaaataaaaaagcaagtgcttgggatacaaatatctgcatgaaaatttaaagactttattcctgactggtatcacttttagtaagcagttgaacataacttgtagtgtgaatatggttaaaacaaaggacacctgatgtctgtgaagtctgctaaggacaggtacaaaatttatgcattgctttttaaaaagtttaaaatgaggaatgcttttgataatcagaaagactaatgtaaagtgctgactgatgtcctgtctgcagttaaggaagacacccaactctcttcttcctcatcatggtattctctatgtatagatctctaaaaatgcaaacttcctatggacaagacaatatgatttgctataatatgaattaagatatggtaatatctaatagtctccactgctaggattctgagtaacacaaaaaataggttttataaaaagcccatgcacttcaattggtgggggaaaagaataaagtcattttcagtcgactgactctgtaaaacagattaccaatataacaagctatgttatctaaattgccctggcagtcttcagttttctctaagtaaacaaagtaaaaggaacaataaggatgcaggcgtagtaatagctgtggaaaagatgaaactacagccacagtgacctgtgggcagcctgcgtagagataagctgaggtgtcagtcagactgatcctggtaacgatactccatggctgcatgaagatgctggaggcatcaagtgggtggccttaactctagtggattcactaggcaatgtaaattggttagtgggttcccgtaagtgcctgtaacaataaaatttctttttcaatgtccccaattcaaactggcctccttaactatccagaatcagtgatgcctgtcatctgttcatcttaaaataaacacttcttactttatgggatgtaaatatcaaagagaagatgaaatgaaaagcttttacatatataacgtgtttgttaattctaattgtcagtaaaaatgtgaatgttgaagttgaaa

SEQ ID NO: 8812 - DNA, 904 bp, Homo sapiens
  source 1..904: mol_type = unassigned DNA; mol_type = unassigned DNA
aggcgcagaggagggcggtgttgagaccggcggagcggcgggacccctaggtggcggagggacgctccgggaaagcgaggggcgctacgagctctggcccacgtgacctgccgggggcgggagcagggggcgcgccggcctcctgcggtgcccctgccttggggaggggccgtgaccacccgtctgtcgcccgaggcggccgccgctgcaccttcaccgcgtacccgggacccgcccgcccgcgggagcttataatatgactcgatggaggaaaatttgataagcatgagagaagaccattcttttcatgttcgttacagaatggaagcttcttgcctagagctggccttggaaggggaacgtctatgtaaatcaggagactgccgcgctggcgtgtcattctttgaagctgcagttcaagttggaactgaagacctaaaaacacttagcgctatttacagccagttgggcaatgcttatttctatttgcatgattatgccaaagcattagaatatcaccatcatgatttaacccttgcaaggactattggagaccagctgggggaagcgaaagctagtggtaatctgggaaacaccttaaaagttcttgggaattttgacgaagccatagtttgttgtcagcgacacctagatatttccagagagcttaatgacaaggtgggagaagcaagagcactttacaatcttgggaatgtgtatcatgccaaagggaaaagttttggttgccctggtccccaggatgtaggagaatttccagaagaagtgagagatgctctgcaggcagccgtggatttttatgaggaaaacctatcattagtgactgctttgggtgaccgagcggcacaaggacgtgcctttggaaatcttggaaacacacattacc

SEQ ID NO: 8813 - DNA, 992 bp, Homo sapiens
  source 1..992: mol_type = unassigned DNA; mol_type = unassigned DNA
aggcgtttgaggggctctcggagggaggtgacagggaggggtgcgtgtgcgtgcgtgtggggcttctgtgtccagaggtctgggggtgacgtcctttgttttgggcaggaggcgggctgggggcttgcgggacctgtgggcgctgcggggacgcggcgtcgatgctcaagaaaccagaaactcggcttgaggagttgctgcttttttgtcggaaggtcttcaaatgagagtaaagcgttaagagcctcactcctgagtctttttttttttttaagataaaaactatactagagtccagcgacttcttaccactctgaatgtgagtaacaaattgtgaatcaaagcccgaatccccgtggaattcattccgaggctgattgcaatcacttggagtcgggcgcgtcctacctaaaccaggcagtttatggcaaatacctgccttgaccgtgcttaaattagtgaacttttgggcaccaactggtcgatttaccatagaaattggtagttgctgcaaaaagaaaatgttgctgaagtgctgctgaaagggccagagatgcaaggatttgggatacattttgaacctttaagctgtctgacattgacctcctttcattattaataaagaagaatcaggagcttaggatgtattaacaccaactcattaatatactaaccggacaatgttctacaaacaattctacattgtaaaggactggattggcacaaaataaaataattttattttattcagcttataatatgactcgatggaggaaaatttgataagcatgagagaagaccattcttttcatgttcgttacagaatggaagcttcttgcctagagctggccttggaaggggaacgtctatgtaaatcaggagactgccgcgctggcgtgtcattctttgaagctgcagttcaagttggaactgaagacctaaaaacacttagcgctatttacagccagttgggcaatgcttatttctatttg

SEQ ID NO: 8814 - DNA, 571 bp, Homo sapiens
  source 1..571: mol_type = unassigned DNA; mol_type = unassigned DNA
gcggcgtcgatgctcaagaaaccagaaactcggcttgaggagttgctgcttttttgtcggaaggtcttcaaatgagagtaaagcgttaagagcctcactcctgagtctttttttttttttaagataaaaactatactagagtccagcgacttcttaccactctgaataaatgttgctgaagtgctgctgaaagggccagagatgcaaggatttgggatacattttgaacctttaagctgtctgacattgacctcctttcattattaataaagaagaatcaggagcttaggatgtattaacaccaactcattaatatactaaccggacaatgttctacaaacaattctacattgtaaaggactggattggcacaaaataaaataattttattttattcagcttataatatgactcgatggaggaaaatttgataagcatgagagaagaccattcttttcatgttcgttacagaatggaagcttcttgcctagagctggccttggaaggggaacgtctatgtaaatcaggagactgccgcgctggcgtgtcattctttgaagctgcagttcaa

SEQ ID NO: 8815 - DNA, 731 bp, Homo sapiens
  source 1..731: mol_type = unassigned DNA; mol_type = unassigned DNA
atatggaacttatgaagttaacaccagaaaaggtacagaactggaacagtgaaattcttgctaagcaaaaacctcttattgccaaaccttctgcaaagctactctttgtcaacagactgaaggggaaaaaatacaaaacgaattcctccactaaagttctccaagatgccagtaattctattgaccaccgaattccaaattctcagaggaaaatcagtgcagatactattggagatgaagggttctttgacttattaagccgatttcaaagcaataggatggatgatcagagatgttgcttacaagaaaagaactgccatacagcttcaacaacaacttcttccactccccctaaaatgatgctaaaaacatcatctgttcctgtggtatcccccaacacggatgagtttttagatcttcttgccagctcacagagtcgccgtctggatgaccagagggctagtttcagtaatttgccagggcttcgtctaacacaaaacagccagtcggtacttagccacctgatgactaatgacaacaaagaggctgatgaagatttctttgacatccttgtaaaatgtcaagtatgtctgtatatttttttcgttctgcatacagctcagataccactgaaaacattggtagtgttataattctcattcaggaagggcttattttgtattagagagttattattgtccatcattcagtaaaaaattattgaacaccga

SEQ ID NO: 8816 - DNA, 3032 bp, Homo sapiens
  source 1..3032: mol_type = unassigned DNA; mol_type = unassigned DNA
aggcgcagaggagggcggtgttgagaccggcggagcggcgggacccctaggtggcggagggacgctccgggaaagcgaggggcgctacgagctctggcccacgtgacctgccgggggcgggagcagggggcgcgccggcctcctgcggtgcccctgccttggggaggggccgtgaccacccgtctgtcgcccgaggcggccgccgctgcaccttcaccgcgtacccgggacccgcccgcccgcgggagaaatgttgctgaagtgctgctgaaagggccagagatgcaaggatttgggatacattttgaacctttaagctgtctgacattgacctcctttcattattaataaagaagaatcaggagcttaggatgtattaacaccaactcattaatatactaaccggacaatgttctacaaacaattctacattgtaaaggactggattggcacaaaataaaataattttattttattcagcttataatatgactcgatggaggaaaatttgataagcatgagagaagaccattcttttcatgttcgttacagaatggaagcttcttgcctagagctggccttggaaggggaacgtctatgtaaatcaggagactgccgcgctggcgtgtcattctttgaagctgcagttcaagttggaactgaagacctaaaaacacttagcgctatttacagccagttgggcaatgcttatttctatttgcatgattatgccaaagcattagaatatcaccatcatgatttaacccttgcaaggactattggagaccagctgggggaagcgaaagctagtggtaatctgggaaacaccttaaaagttcttgggaattttgacgaagccatagtttgttgtcagcgacacctagatatttccagagagcttaatgacaaggtgggagaagcaagagcactttacaatcttgggaatgtgtatcatgccaaagggaaaagttttggttgccctggtccccaggatgtaggagaatttccagaagaagtgagagatgctctgcaggcagccgtggatttttatgaggaaaacctatcattagtgactgctttgggtgaccgagcggcacaaggacgtgcctttggaaatcttggaaacacacattacctccttggcaacttcagggatgcagttatagctcatgagcagcgtctccttattgcaaaagaatttggagataaagcagctgaaagaagagcatatagcaaccttggaaatgcatatatatttcttggtgaatttgaaactgcctcggaatactacaagaagacactactgttggcccgacagcttaaagaccgagctgtagaagcacagtcttgttacagtcttggaaatacatatactttacttcaagactatgaaaaggccattgattatcatctgaagcacttagcaattgctcaagagctgaatgatagaattggtgaaggaagagcatgttggagcttaggaaatgcatacacagcactaggaaatcatgatcaagcaatgcattttgctgaaaagcacttggaaatttcaagagaggttggggataaaagtggtgaactaacagcacgacttaatctctcagaccttcaaatggttcttggtctgagctacagcacaaataactccataatgtctgaaaatactgaaattgatagcagtttgaatggtgtacgccccaagttgggacgccggcatagtatggaaaatatggaacttatgaagttaacaccagaaaaggtacagaactggaacagtgaaattcttgctaagcaaaaacctcttattgccaaaccttctgcaaagctactctttgtcaacagactgaaggggaaaaaatacaaaacgaattcctccactaaagttctccaagatgccagtaattctattgaccaccgaattccaaattctcagaggaaaatcagtgcagatactattggagatgaagggttctttgacttattaagccgatttcaaagcaataggatggatgatcagagatgttgcttacaagaaaagaactgccatacagcttcaacaacaacttcttccactccccctaaaatgatgctaaaaacatcatctgttcctgtggtatcccccaacacggatgagtttttagatcttcttgccagctcacagagtcgccgtctggatgaccagagggctagtttcagtaatttgccagggcttcgtctaacacaaaacagccagtcggtacttagccacctgatgactaatgacaacaaagaggctgatgaagatttctttgacatccttgtaaaatgtcaaggatccagattagatgatcaaagatgtgctccaccacctgctaccacaaagggtccgacagtaccagatgaagactttttcagccttattttacggtcccagggaaagagaatggatgaacagagagttcttttacaaagagatcaaaacagagacactgactttgggctaaaggactttttgcaaaataatgctttgttggagtttaaaaattcagggaaaaaatcggcagaccattagttactatggatttattttttttcctttcaaacacggtaaggaaacaatctattacttttttccttaaaaggagaatttatagcactgtaatacagcttaaaatatttttagaatgatgtaaatagttaaccttcagtagtctattaaggcattaatacttctctggacatgcgcgtttgagggtggaggggtcctgtaaggtgcttcatcgtctgtgattactgcttgggatgtgttctttggcagcttgtgagattactttacctagtgtttataaagtaggaagttaagtgaatcatagattagaatttaatactcttatggaaataattttttaacatcttaattgacaatggcgtttttttatacataaccatggatgtagtgggaaacaatgttgtttggtaaaaataatgtacttgatcaatgtaaaaaagtatataaaatagtcttactaaaaatctaggtttttttttcctcc

SEQ ID NO: 8817 - DNA, 1134 bp, Homo sapiens
  source 1..1134: mol_type = unassigned DNA; mol_type = unassigned DNA
gctcactctgcgcttcaccatggctttcattgccaagtccttctatgacctcagtgccatcagcctggatggggagaaggtagatttcaatacgttccggggcagggccgtgctgattgagaatgtggcttcgctctgaggcacaaccacccgggacttcacccagctcaacgagctgcaatgccgctttcccaggcgcctggtggtccttggcttcccttgcaaccaatttggacatcagaactgctcagggtagactggagacaaaagcaacagctcagaagtgctaaatcttgaagagcagccaaagcatgggcaacaaagtgagaccccatctctacaaaaaaaaaaaaaaattagccgggcatggtggcctgtgtctgtagtctcagctactaaagaggctgaagcaggaggaatgcttgagcccagaagttcaaggctgcagagaactgtcagaatgaggagatcctgaacagtctcaagtatgtccgtcctgggggtggataccagcccaccttcacccttgtccaaaaatgtgaggtgaatgggcagaacgagcatcctgtcttcgcctacctgaaggacaagctcccctacccttatgatgacccattttccctcatgaccgatcccaagctcatcatttggagccctgtgcgccgctcagatgtggcctggaactttgagaagttcctcatagggccggagggagagcccttccgacgctacagccgcaccttcccaaccatcaacattgagcctgacatcaagcgcctccttaaagttgccatatagatgtgaactgctcaacacacagatctcctactccatccagtcctgaggagccttaggatgcagcatgccttcaggagacactgctggacctcagcattcccttgatatcagtccccttcactgcagagccttgcctttcccctctgcctgtttccttttcctctcccaaccctctggttggtgattcaacttgggctccaagacttgggtaagctctgggccttcacagaatgatggcaccttcctaaaccctcatgggtggtgtctgagaggcgtgaagggcctggagccactctgctagaagagaccaataaagggcaggtgtggaaacggcca

SEQ ID NO: 8818 - DNA, 990 bp, Homo sapiens
  source 1..990: mol_type = unassigned DNA; mol_type = unassigned DNA
cttcctggctcctccttcctccccacccctctaataggctcataagtgggctcaggcctctctgcggggctcactctgcgcttcaccatggctttcattgccaagtccttctatgacctcagtgccatcagcctggatggggagaaggtagatttcaatacgttccggggcagggccgtgctgattgagaatgtggcttcgctctgaggcacaaccacccgggacttcacccagctcaacgagctgcaatgccgctttcccaggcgcctggtggtccttggcttcccttgcaaccaatttggacatcaggagaactgtcagaatgaggagatcctgaacagtctcaagtatgtccgtcctgggggtggataccagcccaccttcacccttgtccaaaaatgtgaggtgaatgggcagaacgagcatcctgtcttcgcctacctgaaggacaagctcccctacccttatgatgacccattttccctcatgaccgatcccaagctcatcatttggagccctgtgcgccgctcagatgtggcctggaactttgagaagttcctcatagggccggagggagagcccttccgacgctacagccgcaccttcccaaccatcaacattgagcctgacatcaagcgcctccttaaagttgccatatagatgtgaactgctcaacacacagatctcctactccatccagtcctgaggagccttaggatgcagcatgccttcaggagacactgctggacctcagcattcccttgatatcagtccccttcactgcagagccttgcctttcccctctgcctgtttccttttcctctcccaaccctctggttggtgattcaacttgggctccaagacttgggtaagctctgggccttcacagaatgatggcaccttcctaaaccctcatgggtggtgtctgagaggcgtgaagggcctggagccactctgctagaagagaccaataaagggcaggtgtggaaa

SEQ ID NO: 8819 - DNA, 476 bp, Homo sapiens
  source 1..476: mol_type = unassigned DNA; mol_type = unassigned DNA
ttcattgccaagtccttctatgacctcagtgccatcagcctggatggggagaaggagaactgtcagaatgaggagatcctgaacagtctcaagtatgtccgtcctgggggtggataccagcccaccttcacccttgtccaaaaatgtgaggtgaatgggcagaacgagcatcctgtcttcgcctacctgaaggacaagctcccctacccttatgatgacccattttccctcatgaccgatcccaagctcatcatttggagccctgtgcgccgctcagatgtggcctggaactttgagaagttcctcatagggccggagggagagcccttccgacgctacagccgcaccttcccaaccatcaacattgagcctgacatcaagcgcctccttaaagttgccatatagatgtgaactgctcaacacacagatctcctactccatccagtcctgaggagccttaggatgcagcatgcctt

SEQ ID NO: 8820 - DNA, 778 bp, Homo sapiens
  source 1..778: mol_type = unassigned DNA; mol_type = unassigned DNA
ggctcactctgcgcttcaccatggctttcattgccaagtccttctatgacctcagtgccatcagcctggatggggagaaggtagatttcaatacgttccggggcagggccgtgctgattgagaatgtggcttcgctctgaggcacaaccacccgggacttcacccagctcaacgagctgcaatgccgctttcccaggcgcctggtggtccttggcttcccttgcaaccaatttggacatcaggagagacagaagtagcaaaccctctttcgagatgtccctccagccccagaagtacctccagcctcacaccatctcttcagcctagcaagttgctggagggagtctataacctaccaggagccagccagccatttgtatcaagaaatagaaatctgccagggtacagtggctcacacctataatcccagcgctttgggaggctaaggagaactgtcagaatgaggagatcctgaacagtctcaagtatgtccgtcctgggggtggataccagcccaccttcacccttgtccaaaaatgtgaggtgaatgggcagaacgagcatcctgtcttcgcctacctgaaggacaagctcccctacccttatgatgacccattttccctcatgaccgatcccaagctcatcatttggagccctgtgcgccgctcagatgtggcctggaactttgagaagttcctcatagggccggagggagagcccttccgacgctacagccgcaccttcccaaccatcaacattgagcctgacatcaagcgcc

SEQ ID NO: 8821 - DNA, 1084 bp, Homo sapiens
  source 1..1084: mol_type = unassigned DNA; mol_type = unassigned DNA
cttgttcaaacagcacttacaggtggggacctgtttttgctaagtcatcctggggatgctcaaagctccattgttagatcctttctgtcctccttcctggctcctccttcctccccacccctctaataggctcataagtgggctcaggcctctctgcggggctcactctgcgcttcaccatggctttcattgccaagtccttctatgacctcagtgccatcagcctggatggggagaaggtagatttcaatacgttccggggcagggccgtgctgattgagaatgtggcttcgctcggcacaaccacccgggacttcacccagctcaacgagctgcaatgccgctttcccaggcgcctggtggtccttggcttcccttgcaaccaatttggacatcaggagaactgtcagaatgaggagatcctgaacagtctcaagtatgtccgtcctgggggtggataccagcccaccttcacccttgtccaaaaatgtgaggtgaatgggcagaacgagcatcctgtcttcgcctacctgaaggacaagctcccctacccttatgatgacccattttccctcatgaccgatcccaagctcatcatttggagccctgtgcgccgctcagatgtggcctggaactttgagaagttcctcatagggccggagggagagcccttccgacgctacagccgcaccttcccaaccatcaacattgagcctgacatcaagcgcctccttaaagttgccatatagatgtgaactgctcaacacacagatctcctactccatccagtcctgaggagccttaggatgcagcatgccttcaggagacactgctggacctcagcattcccttgatatcagtccccttcactgcagagccttgcctttcccctctgcctgtttccttttcctctcccaaccctctggttggtgattcaacttgggctccaagacttgggtaagctctgggccttcacagaatgatggcaccttcctaaaccctcatgggtggtgtctgagaggcgtgaagggcctggagccactctgctagaagagaccaataaagggcaggtgtggaaacggcc

SEQ ID NO: 8822 - DNA, 2196 bp, Homo sapiens
  source 1..2196: mol_type = unassigned DNA; mol_type = unassigned DNA
tctcacacatgtgggtttcaagtgcggctggtgccatccctctgagcagacgctgaaagagaaaacttctgagatagcacttgtgagcgaaaagcacaccaactggctcaaagagctgtggttgggcagatctggtgtaaatacaaagttccttcccgacatttcccagagtttcttgaagatcacctggcctctagaagatgacaaggagacagcaagtcctacaagcaaaaaggagcattcagcaaacattccaagcacagcttatgccctggaagagtatgttccacgggagagaagtgaagccagtgggtccggacctggaactctcagaggctgagaatggtgtggaggagaaaaagaaagcctgcaggtcgccaacagcccaatcccctaccccatctgtggaggcggactccccagaccagaagaaaatcattagcctatggtcaaaatccagttttgatggtgcctctttagcaagtgataagaacgactgtaaaacagaaagcaaaaatgaccctaagactgaaagaaaaaagtcttcatcttccagccagtacaaggccaatatgcactttcacaagttgtttcttagtgtcccaacggaggaaccactgaagcaaagctttacctgtgctctacagaaagaaatactataccaaggaaagctctttgtatcagaaaactggatttgttttcattccaaagtctttggaaaagacacaaagatctctattccagctttctcggtaaccctaataaagaaaaccaaaactgctcttctagtgccaaacgccctgatcatagcaacagtcacagacaggtacatatttgtctccttactctccagagattcaacttacaaactactaaaatctgtgtgtggacacttagaaaatacaagtgttggtaacagtcccaatccatcttctgctgaaaacagtttccgagcagaccgcccttcatctctgcctctggatttcaatgatgaattctcagatctggatggagtggttcaacaaagaaggcaagacatggaaggatatagcagttctggttctcaaactcctgaatctgagaactctcgagatttccatgcgacagaatcccaaacagttctgaatgtctccaagggagaagcaaagccaactcgggcagatgcccatgtgaacagagtacctgaaggaaaagccaagagtctccctgtacagggtctgtcagaaactgttggaatcttacataaagtcaagtctcagaaatgtccgatgcttcaccatattcttatattctatgcaattgttgtctgtgcactaatcatctcgaccttctacatgagatacagaattaatactctggaggagcagctggggttactaacctccattgtggacacccataatactgaacaggcagcaccatctggcctgaggtcacaagtacaattcaatgtggaggttctctgtcaagagcttacagctaacatagtgaaattagaaaagatacaaaataacttacagaagttgcttgagaatggtgactgatcgaccagattgcttgggccatcggaatacctcatgtttccctttgaagaaggtgcttcctgaggcgttttgtttgagtgcaccctgctggtcagaggtgcaagcagatgagaatccagacattgcatgtggaggtctccagctcaggaaagtgaggagggaaataattttggttcttgtgcaataaaagttgaccttgactctctgaggaagattttgctgcttttgcctgaagaaaacagacccatctctggaggtctcaggaagggcccagcgaacacactctcttggataattaccacgatggcgtcagcaaacactccaccctgtgcctttttagtccttcccgccctcctgcctctcccttacacccctcttaacgactttcaaactaaaggatacatcatatactgacaaactcaatgtggtcctttcaagaattagccatgagtctcaaaaaggcaataaatggctctaagtggacaggtttgcttcaaacaagtaacatctacattttgtcttttttttttcagttctcctgttatgttctggttgaaatcacctgtgtgtcttaatttctcaattcctttttggcaagaatatcaagcaaggtgaatttaacattatgtttatgttttgttttgttgctgta

SEQ ID NO: 8823 - DNA, 994 bp, Homo sapiens
  source 1..994: mol_type = unassigned DNA; mol_type = unassigned DNA
acatgaagaaagagcttcctgcaattcaaggactgtacaaagctgaaacgcagagattttcatattatttgggagactcagaaatgagcttttaaggttgttccttgacttgcgggtcaataagcgcacaatggtgaagaaaaggctgccttctagtgacacggtgttccggtttgagactccgggcagcccaaggaaggccaacgtggaggcctcacgcagctccacagacagccccagctcggtgttcctcagctcagaggctgagaatggtgtggaggagaaaaagaaagcctgcaggtcgccaacagcccaatcccctaccccatctgtggaggcggactccccagaccagaagaaaatcattagcctatggtcaaaatccagttttgatggtgcctctttagcaagtgataagaacgactgtaaaacagaaagcaaaaatgaccctaagactgaaagaaaaaagtcttcatcttccagccagtacaaggccaatatgcactttcacaagttgtttcttagtgtcccaacggaggaaccactgaagcaaagctttacctgtgctctacagaaagaaatactataccaaggaaagctctttgtatcagaaaactggatttgttttcattccaaagtctttggaaaagacacaaagatctctattccagctttctcggtaaccctaataaagaaaaccaaaactgctcttctagtgccaaacgccctgatcatagcaacagtcacagacaggtacatatttgtctccttactctccagagattcaacttacaaactactaaaatctgtgtgtggacacttagaaaatacaagtgttggtaacagtcccaatccatcttctgctgaaaacagtttccgagcagaccgcccttcatctctgcctctggatttcaatgatgaattctcagatctggatggagtggttcaacaaagaaggcaagacatggaaggatatagcagttctggttctcaa

SEQ ID NO: 8824 - DNA, 3175 bp, Homo sapiens
  source 1..3175: mol_type = unassigned DNA; mol_type = unassigned DNA
atctagagccggctgccctctaaaaatccccctgttacagtcgggatagaaaacaaaaagcttaatttaccaggaggctaaacagattgtgccttcttaggcaaatgttccacctgcttggccaattagcttcctctcccgaaagactcgttcaacaggtttcctttttctcttctctgcctcctgggttggggaaagaggctgtcacttcgcttcgaccctccccttccctccctctcggcttttccacagtgggtcggaccaatcgcgcccgctccgacgtgtccaggtccgcggccccgggagcttggcgcggcccggcctggatgcgctgggcggagggtgcaggggagggcacggcgccgcttgcttggcctgcgcacccggacctagaagccgggacgagccggggcagagccaggcgcgcggaagtctgaaggtgccctccagacacggccccgatgactgaactacagcaagatgtggaagacacaaagcctgcgaaagtgctcgggaagagggagagcaaacttggctcagcccactcagaggctgagaatggtgtggaggagaaaaagaaagcctgcaggtcgccaacagcccaatcccctaccccatctgtggaggcggactccccagaccagaagaaaatcattagcctatggtcaaaatccagttttgatggtgcctctttagcaagtgataagaacgactgtaaaacagaaagcaaaaatgaccctaagactgaaagaaaaaagtcttcatcttccagccagtacaaggccaatatgcactttcacaagttgtttcttagtgtcccaacggaggaaccactgaagcaaagctttacctgtgctctacagaaagaaatactataccaaggaaagctctttgtatcagaaaactggatttgttttcattccaaagtctttggaaaagacacaaagatctctattccagctttctcggtaaccctaataaagaaaaccaaaactgctcttctagtgccaaacgccctgatcatagcaacagtcacagacaggtacatatttgtctccttactctccagagattcaacttacaaactactaaaatctgtgtgtggacacttagaaaatacaagtgttggtaacagtcccaatccatcttctgctgaaaacagtttccgagcagaccgcccttcatctctgcctctggatttcaatgatgaattctcagatctggatggagtggttcaacaaagaaggcaagacatggaaggatatagcagttctggttctcaaactcctgaatctgagaactctcgagatttccatgcgacagaatcccaaacagttctgaatgtctccaagggagaagcaaagccaactcgggcagatgcccatgtgaacagagtacctgaaggaaaagccaagagtctccctgtacagggtctgtcagaaactgttggaatcttacataaagtcaagtctcagaaatgtccgatgcttcaccatattcttatattctatgcaattgttgtctgtgcactaatcatctcgaccttctacatgagatacagaattaatactctggaggagcagctggggttactaacctccattgtggacacccataatactgaacaggcagcaccatctggcctgaggtcacaagtacaattcaatgtggaggttctctgtcaagagcttacagctaacatagtgaaattagaaaagatacaaaataacttacagaagttgcttgagaatggtgactgatcgaccagattgcttgggccatcggaatacctcatgtttccctttgaagaaggtgcttcctgaggcgttttgtttgagtgcaccctgctggtcagaggtgcaagcagatgagaatccagacattgcatgtggaggtctccagctcaggaaagtgaggagggaaataattttggttcttgtgcaataaaagttgaccttgactctctgaggaagattttgctgcttttgcctgaagaaaacagacccatctctggaggtctcaggaagggcccagcgaacacactctcttggataattaccacgatggcgtcagcaaacactccaccctgtgcctttttagtccttcccgccctcctgcctctcccttacacccctcttaacgactttcaaactaaaggatacatcatatactgacaaactcaatgtggtcctttcaagaattagccatgagtctcaaaaaggcaataaatggctctaagtggacaggtttgcttcaaacaagtaacatctacattttgtcttttttttttcagttctcctgttatgttctggttgaaatcacctgtgtgtcttaatttctcaattcctttttggcaagaatatcaagcaaggtgaatttaacattatgtttatgttttgttttgttgctgtaactaatagttaattggactgattcttacccagccctggtcaagaatctgtgaggcatgtgactgaagtactaaattaaacttattttgaaaccaaacctaatttttaagccaaaaggtgtaatagtgatttaatacaggatgaaaaacactgaatttttaagactgtaggtggactatgttagtagttttcaagcaggatgtctgtattcagcattcaataatgctaaaatccctttcagcatgaaatttgtatgtttttatcctttgctgactaaaataaaataactggtggtttgctaactatttaccatatgggttggctggtttttattaataattgtttagggtatcataagatctgtaagtacaaaggatattctgtttctatctgcaatgcatttgataatcatttctatgaaatgtattttatttaatcagataagctaataagcgaattggttacatcgtttgtatctgttggcctagtggacagctgtgcctggtgcacctctggcttttaataaatactcattggttgaaacaccctgctaacactgtgttttgtcagttcgtaaattcctttaaccaagacttaactatgctttttaactctttttccacctgccatctactactaccaactcacttatacttccttcctcccaagtaatcatttcaaaactaaaaaaggatttaagttcttgggttacaacggtttaaaggaaagaaaatgaactttgaagtcaaaaaaaaaagaaaaaa

SEQ ID NO: 8825 - DNA, 3109 bp, Homo sapiens
  source 1..3109: mol_type = unassigned DNA; mol_type = unassigned DNA
atctagagccggctgccctctaaaaatccccctgttacagtcgggatagaaaacaaaaagcttaatttaccaggaggctaaacagattgtgccttcttaggcaaatgttccacctgcttggccaattagcttcctctcccgaaagactcgttcaacaggtttcctttttctcttctctgcctcctgggttggggaaagaggctgtcacttcgcttcgaccctccccttccctccctctcggcttttccacagtgggtcggaccaatcgcgcccgctccgacgtgtccaggtccgcggccccgggagcttggcgcggcccggcctggatgcgctgggcggagggtgcaggggagggcacggcgccgcttgcttggcctgcgcacccggacctagaagccgggacgagccggggcagagccaggcgcgcggaagtctgaaggtgccctccagacacggccccgatgactgaactacagcaagatgtggaagacacaaagcctgcgaaagtgctcgggaagagggagagcaaacttggctcagcccactcagaggctgagaatggtgtggaggagaaaaagaaagcctgcaggtcgccaacagcccaatcccctaccccatctgtggaggcggactccccagaccagaagaaaatcattagcctatgcccatatcttctctccaaatctatgcttcattcaggaccaagatacaaggccaatatgcactttcacaagttgtttcttagtgtcccaacggaggaaccactgaagcaaagctttacctgtgctctacagaaagaaatactataccaaggaaagctctttgtatcagaaaactggatttgttttcattccaaagtctttggaaaagacacaaagatctctattccagctttctcggtaaccctaataaagaaaaccaaaactgctcttctagtgccaaacgccctgatcatagcaacagtcacagacaggtacatatttgtctccttactctccagagattcaacttacaaactactaaaatctgtgtgtggacacttagaaaatacaagtgttggtaacagtcccaatccatcttctgctgaaaacagtttccgagcagaccgcccttcatctctgcctctggatttcaatgatgaattctcagatctggatggagtggttcaacaaagaaggcaagacatggaaggatatagcagttctggttctcaaactcctgaatctgagaactctcgagtagatttccatgcgacagaatcccaaacagttctgaatgtctccaagggagaagcaaagccaactcgggcagatgcccatgtgaacagagtacctgaaggaaaagccaagagtctccctgtacagggtctgtcagaaactgttggaatcttacataaagtcaagtctcagaaatgtccgatgcttcaccatattcttatattctatgcaattgttgtctgtgcactaatcatctcgaccttctacatgagatacagaattaatactctggaggagcagctggggttactaacctccattgtggacacccataatactgaacaggcagcaccatctggcctgaggtcacaagtacaattcaatgtggaggttctctgtcaagagcttacagctaacatagtgaaattagaaaagatacaaaataacttacagaagttgcttgagaatggtgactgatcgaccagattgcttgggccatcggaatacctcatgtttccctttgaagaaggtgcttcctgaggcgttttgtttgagtgcaccctgctggtcagaggtgcaagcagatgagaatccagacattgcatgtggaggtctccagctcaggaaagtgaggagggaaataattttggttcttgtgcaataaaagttgaccttgactctctgaggaagattttgctgcttttgcctgaagaaaacagacccatctctggaggtctcaggaagggcccagcgaacacactctcttggataattaccacgatggcgtcagcaaacactccaccctgtgcctttttagtccttcccgccctcctgcctctcccttacacccctcttaacgactttcaaactaaaggatacatcatatactgacaaactcaatgtggtcctttcaagaattagccatgagtctcaaaaaggcaataaatggctctaagtggacaggtttgcttcaaacaagtaacatctacattttgtcttttttttttcagttctcctgttatgttctggttgaaatcacctgtgtgtcttaatttctcaattcctttttggcaagaatatcaagcaaggtgaatttaacattatgtttatgttttgttttgttgctgtaactaatagttaattggactgattcttacccagccctggtcaagaatctgtgaggcatgtgactgaagtactaaattaaacttattttgaaaccaaacctaatttttaagccaaaaggtgtaatagtgatttaatacaggatgaaaaacactgaatttttaagactgtaggtggactatgttagtagttttcaagcaggatgtctgtattcagcattcaataatgctaaaatccctttcagcatgaaatttgtatgtttttatcctttgctgactaaaataaaataactggtggtttgctaactatttaccatatgggttggctggtttttattaataattgtttagggtatcataagatctgtaagtacaaaggatattctgtttctatctgcaatgcatttgataatcatttctatgaaatgtattttatttaatcagataagctaataagcgaattggttacatcgtttgtatctgttggcctagtggacagctgtgcctggtgcacctctggcttttaataaatactcattggttgaaacaccctgctaacactgtgttttgtcagttcgtaaattcctttaaccaagacttaactatgctttttaactctttttccacctgccatctactactaccaactcacttatacttccttcctcccaagtaatcatttcaaaactaaaaaaggatttaagttcttgggttacaacggtttaaaggaaagaaaatgaactttgaagtcaaaaaaaaaagaaaaaa

SEQ ID NO: 8826 - DNA, 632 bp, Homo sapiens
  source 1..632: mol_type = unassigned DNA; mol_type = unassigned DNA
accaatcgcgcccgctccgacgtgtccaggtccgcggccccgggagcttggcgcggcccggcctggatgcgctgggcggagggtgcaggggagggcacggcgccgcttgcttggcctgcgcacccggacctagaagccgggacgagccggggcagagccaggcgcgcggaagtctgaaggtgccctccagacacggccccgatgactgaactacagcaagatgtggaagacacaaagcctgcgaaagtgctcgggaagagggagagcaaacttggctcagcccactacctctctctgaatgtctaaagtgaagcggtttcctttcttcttcagctcagaggctgagaatggtgtggaggagaaaaagaaagcctgcaggtcgccaacagcccaatcccctaccccatctgtggaggcggactccccagaccagaagaaaatcattagcctatggtcaaaatccagttttgatggtgcctctttagcaagtgataagaacgactgtaaaacagaaagcaaaaatgaccctaagactgaaagaaaaaagtcttcatcttccagccagtacaaggccaatatgcactttcacaagttgtttcttagtgtcccaacggaggaaccactgaagcaaa

SEQ ID NO: 8827 - DNA, 586 bp, Homo sapiens
  source 1..586: mol_type = unassigned DNA; mol_type = unassigned DNA
aatcgcgcccgctccgacgtgtccaggtccgcggccccgggagcttggcgcggcccggcctggatgcgctgggcggagggtgcaggggagggcacggcgccgcttgcttggcctgcgcacccggacctagaagccgggacgagccggggcagagccaggcgcgcggaagtctgaaggtgccctccagacacggccccgatgactgaactacagcaagatgtggaagacacaaagcctgcgaaagtgctcgggaagagggagagcaaacttggctcagcccaacaatcttgagggccagcacagcctgaggacttgctgacacaaagtattgacgggccagaggaagtgggcagcctggatatcacatcaccccatgtctgctgctgctcaggtttctctcactgtctcttggctcagaggctgagaatggtgtggaggagaaaaagaaagcctgcaggtcgccaacagcccaatcccctaccccatctgtggaggcggactccccagaccagaagaaaatcattagcctatggtcaaaatccagttttgatggtgcctctttagcaagtgataagaacgactgtaa

SEQ ID NO: 8828 - DNA, 546 bp, Homo sapiens
  source 1..546: mol_type = unassigned DNA; mol_type = unassigned DNA
atgcgctgggcggagggtgcaggggagggcacggcgccgcttgcttggcctgcgcacccggacctagaagccgggacgagccggggcagagccaggcgcgcggaagtctgaaggtgccctccagacacggccccgatgactgaactacagcaagatgtggaagacacaaagcctgcgaaagtgctcgggaagagggagagcaaacttggctcagcccaacaatcttgagggccagcacagcctgaggacttgctgacacaaagtattgacgggccagaggaagtgggcagcctggatatcacatcaccccatgtctgctgctgctcagctacctctctctgaatgtctaaagtgaagcggtttcctttcttcttcagctcagaggctgagaatggtgtggaggagaaaaagaaagcctgcaggtcgccaacagcccaatcccctaccccatctgtggaggcggactccccagaccagaagaaaatcattagcctatggtcaaaatccagttttgatggtgcctctttagcaagtgataagaacgac

SEQ ID NO: 8829 - DNA, 1532 bp, Homo sapiens
  source 1..1532: mol_type = unassigned DNA; mol_type = unassigned DNA
atgcgctgggcggagggtgcaggggagggcacggcgccgcttgcttggcctgcgcacccggacctagaagccgggacgagccggggcagagccaggcgcgcggaagtctgaaggtgccctccagacacggccccgatgactgaactacagcaagatgtggaagacacaaagcctgcgaaagtgctcgggaagagggagagcaaacttggctcagcccactcagaggctgagaatggtgtggaggagaaaaagaaagcctgcaggtcgccaacagcccaatcccctaccccatctgtggaggcggactccccagaccagaagaaaatcattagcctatgtacaaggccaatatgcactttcacaagttgtttcttagtgtcccaacggaggaaccactgaagcaaagctttacctgtgctctacagaaagaaatactataccaaggaaagctctttgtatcagaaaactggatttgttttcattccaaagtctttggaaaagacacaaagatctctattccagctttctcggtaaccctaataaagaaaaccaaaactgctcttctagtgccaaacgccctgatcatagcaacagtcacagacaggtacatatttgtctccttactctccagagattcaacttacaaactactaaaatctgtgtgtggacacttagaaaatacaagtgttggtaacagtcccaatccatcttctgctgaaaacagtttccgagcagaccgcccttcatctctgcctctggatttcaatgatgaattctcagatctggatggagtggttcaacaaagaaggcaagacatggaaggatatagcagttctggttctcaaactcctgaatctgagaactctcgagatttccatgcgacagaatcccaaacagttctgaatgtctccaagggagaagcaaagccaactcgggcagatgcccatgtgaacagagtacctgaaggaaaagccaagagtctccctgtacagggtctgtcagaaactgttggaatcttacataaagtcaagtctcagaaatgtccgatgcttcaccatattcttatattctatgcaattgttgtctgtgcactaatcatctcgaccttctacatgagatacagaattaatactctggaggagcagctggggttactaacctccattgtggacacccataatactgaacaggcagcaccatctggcctgaggtcacaagtacaattcaatgtggaggttctctgtcaagagcttacagctaacatagtgaaattagaaaagatacaaaataacttacagaagttgcttgagaatggtgactgatcgaccagattgcttgggccatcggaatacctcatgtttccctttgaagaaggtgcttcctgaggcgttttgtttgagtgcaccctgctggtcagaggtgcaagcagatgagaatccagacattgcatgtggaggtctccagctcaggaaagtgaggagggaaataattttggttcttgtgcaataaaagttgaccttgactctctgagg

SEQ ID NO: 8830 - DNA, 1847 bp, Homo sapiens
  source 1..1847: mol_type = unassigned DNA; mol_type = unassigned DNA
atgcgctgggcggagggtgcaggggagggcacggcgccgcttgcttggcctgcgcacccggacctagaagccgggacgagccggggcagagccaggcgcgcggaagtctgaaggtgccctccagacacggccccgatgactgaactacagcaagatgtggaagacacaaagcctgcgaaagtgctcgggaagagggagagcaaacttggctcagcccactcagaggctgagaatggtgtggaggagaaaaagaaagcctgcaggtcgccaacagcccaatcccctaccccatctgtggaggcggactccccagaccagaagaaaatcattagcctatgcccatatcttctctccaaatctatgcttcattcaggaccaagagtcaaaatccagttttgatggtgcctctttagcaagtgataagaacgactgtaaaacagaaagcaaaaatgaccctaagactgaaagaaaaaagtcttcatcttccagccagtacaaggccaatatgcactttcacaagttgtttcttagtgtcccaacggaggaaccactgaagcaaagctttacctgtgctctacagaaagaaatactataccaaggaaagctctttgtatcagaaaactggatttgttttcattccaaagtctttggaaaagacacaaagatctctattccagctttctcggtaaccctaataaagaaaaccaaaactgctcttctagtgccaaacgccctgatcatagcaacagtcacagacaggtacatatttgtctccttactctccagagattcaacttacaaactactaaaatctgtgtgtggacacttagaaaatacaagtgttggtaacagtcccaatccatcttctgctgaaaacagtttccgagcagaccgcccttcatctctgcctctggatttcaatgatgaattctcagatctggatggagtggttcaacaaagaaggcaagacatggaaggatatagcagttctggttctcaaactcctgaatctgagaactctcgagatttccatgcgacagaatcccaaacagttctgaatgtctccaagggagaagcaaagccaactcgggcagatgcccatgtgaacagagtacctgaaggaaaagccaagagtctccctgtacagggtctgtcagaaactgttggaatcttacataaagtcaagtctcagaaatgtccgatgcttcaccatattcttatattctatgcaattgttgtctgtgcactaatcatctcgaccttctacatgagatacagaattaatactctggaggagcagctggggttactaacctccattgtggacacccataatactgaacaggcagcaccatctggcctgaggtcacaagtacaattcaatgtggaggttctctgtcaagagcttacagctaacatagtgaaattagaaaagatacaaaataacttacagaagttgcttgagaatggtgactgatcgaccagattgcttgggccatcggaatacctcatgtttccctttgaagaaggtgcttcctgaggcgttttgtttgagtgcaccctgctggtcagaggtgcaagcagatgagaatccagacattgcatgtggaggtctccagctcaggaaagtgaggagggaaataattttggttcttgtgcaataaaagttgaccttgactctctgaggaagattttgctgcttttgcctgaagaaaacagacccatctctggaggtctcaggaagggcccagcgaacacactctcttggataattaccacgatggcgtcagcaaacactccaccctgtgcctttttagtccttcccgccctcctgcctctcccttaca

SEQ ID NO: 8831 - DNA, 1363 bp, Homo sapiens
  source 1..1363: mol_type = unassigned DNA; mol_type = unassigned DNA
attccatttcccctcccacgctgctcactcaaacacacgctagcctctgctgcttgaattctacatagtttcagtctgctgctgacaagacctccaagctcagaggctgagaatggtgtggaggagaaaaagaaagcctgcaggtcgccaacagcccaatcccctaccccatctgtggaggcggactccccagaccagaagaaaatcattagcctatggtcaaaatccagttttgatggtgcctctttagcaagtgataagaacgactgtaaaacagaaagcaaaaatgaccctaagactgaaagaaaaaagtcttcatcttccagccagtacaaggccaatatgcactttcacaagttgtttcttagtgtcccaacggaggaaccactgaagcaaagctttacctgtgctctacagaaagaaatactataccaaggaaagctctttgtatcagaaaactggatttgttttcattccaaagtctttggaaaagacacaaagatctctattccagctttctcggtaaccctaataaagaaaaccaaaactgctcttctagtgccaaacgccctgatcatagcaacagtcacagacaggtacatatttgtctccttactctccagagattcaacttacaaactactaaaatctgtgtgtggacacttagaaaatacaagtgttggtaacagtcccaatccatcttctgctgaaaacagtttccgagcagaccgcccttcatctctgcctctggatttcaatgatgaattctcagatctggatggagtggttcaacaaagaaggcaagacatggaaggatatagcagttctggttctcaaactcctgaatctgagaactctcgagatttccatgcgacagaatcccaaacagttctgaatgtctccaagggagaagcaaagccaactcgggcagatgcccatgtgaacagagtacctgaaggaaaagccaagagtctccctgtacagggtctgtcagaaactgttggaatcttacataaagtcaagtctcagaaatgtccgatgcttcaccatattcttatattctatgcaattgttgtctgtgcactaatcatctcgaccttctacatgagatacagaattaatactctggaggagcagctggggttactaacctccattgtggacacccataatactgaacaggcagcaccatctggcctgaggtcacaagtacaattcaatgtggaggttctctgtcaagagcttacagctaacatagtgaaattagaaaagatacaaaataacttacagaagttgcttgagaatggtgactgatcgaccagattgcttgggccatcggaatacctcatgtttccctttgaag

SEQ ID NO: 8832 - DNA, 570 bp, Homo sapiens
  source 1..570: mol_type = unassigned DNA; mol_type = unassigned DNA
atgcagagcagagctgggcagcacagacctgggagccagcaagtccacacagtctggcatttacaagtgaaacagctcagaggctgagaatggtgtggaggagaaaaagaaagcctgcaggtcgccaacagcccaatcccctaccccatctgtggaggcggactccccagaccagaagaaaatcattagcctatggtcaaaatccagttttgatggtgcctctttagcaagtgataagaacgactgtaaaacagaaagcaaaaatgaccctaagactgaaagaaaaaagtcttcatcttccagccagtacaaggccaatatgcactttcacaagttgtttcttagtgtcccaacggaggaaccactgaagcaaagctttacctgtgctctacagaaagaaatactataccaaggaaagctctttgtatcagaaaactggatttgttttcattccaaagtctttggaaaagacacaaagatctctattccagctttctcggtaaccctaataaagaaaaccaaaactgctcttctagtgccaaacgccctgatcatagcaacagtcacaga

SEQ ID NO: 8833 - DNA, 574 bp, Homo sapiens
  source 1..574: mol_type = unassigned DNA; mol_type = unassigned DNA
agcagagctgggcagcacagacctgggagccagcaagtccacacagtctggcatttacaagtgaaacaggtgcgacctgcagctactgccgttgggacaccaggcaaggggttagaatggagattgggaaagggcctcgctgtcaaagttaactagcctatcagtgaggaatgaaaatcattccattctctagaaaaccatgttacttcatcgttttccttccagctacctctctctgaatgtctaaagtgaagcggtttcctttcttcttcagctcagaggctgagaatggtgtggaggagaaaaagaaagcctgcaggtcgccaacagcccaatcccctaccccatctgtggaggcggactccccagaccagaagaaaatcattagcctatggtcaaaatccagttttgatggtgcctctttagcaagtgataagaacgactgtaaaacagaaagcaaaaatgaccctaagactgaaagaaaaaagtcttcatcttccagccagtacaaggccaatatgcactttcacaagttgtttcttagtgtcccaacggaggaaccactgaagcaaag

SEQ ID NO: 8834 - DNA, 1577 bp, Homo sapiens
  source 1..1577: mol_type = unassigned DNA; mol_type = unassigned DNA
agagctgggcagcacagacctgggagccagcaagtccacacagtctggcatttacaagtgaaacagctacctctctctgaatgtctaaagtgaagcggtttcctttcttcttcagctcagaggctgagaatggtgtggaggagaaaaagaaagcctgcaggtcgccaacagcccaatcccctaccccatctgtggaggcggactccccagaccagaagaaaatcattagcctatggtcaaaatccagttttgatggtgcctctttagcaagtgataagaacgactgtaaaacagaaagcaaaaatgaccctaagactgaaagaaaaaagtcttcatcttccagccagtacaaggccaatatgcactttcacaagttgtttcttagtgtcccaacggaggaaccactgaagcaaagctttacctgtgctctacagaaagaaatactataccaaggaaagctctttgtatcagaaaactggatttgttttcattccaaagtctttggaaaagacacaaagatctctattccagctttctcggtaaccctaataaagaaaaccaaaactgctcttctagtgccaaacgccctgatcatagcaacagtcacagacaggtacatatttgtctccttactctccagagattcaacttacaaactactaaaatctgtgtgtggacacttagaaaatacaagtgttggtaacagtcccaatccatcttctgctgaaaacagtttccgagcagaccgcccttcatctctgcctctggatttcaatgatgaattctcagatctggatggagtggttcaacaaagaaggcaagacatggaaggatatagcagttctggttctcaaactcctgaatctgagaactctcgagatttccatgcgacagaatcccaaacagttctgaatgtctccaagggagaagcaaagccaactcgggcagatgcccatgtgaacagagtacctgaaggaaaagccaagagtctccctgtacagggtctgtcagaaactgttggaatcttacataaagtcaagtctcagaaatgtccgatgcttcaccatattcttatattctatgcaattgttgtctgtgcactaatcatctcgaccttctacatgagatacagaattaatactctggaggagcagctggggttactaacctccattgtggacacccataatactgaacaggcagcaccatctggcctgaggtcacaagtacaattcaatgtggaggttctctgtcaagagcttacagctaacatagtgaaattagaaaagatacaaaataacttacagaagttgcttgagaatggtgactgatcgaccagattgcttgggccatcggaatacctcatgtttccctttgaagaaggtgcttcctgaggcgttttgtttgagtgcaccctgctggtcagaggtgcaagcagatgagaatccagacattgcatgtggaggtctccagctcaggaaagtgaggagggaaataattttggttcttgtgcaataaaagttgaccttgactctctgaggaagattttgctgcttttgcctgaagaaaacagaccc

SEQ ID NO: 8835 - DNA, 604 bp, Homo sapiens
  source 1..604: mol_type = unassigned DNA; mol_type = unassigned DNA
tacaaggccaatatgcactttcacaagttgtttcttagtgtcccaacggaggaaccactgaagcaaagctttacctgtgctctacagaaagaaatactataccaaggaaagctctttgtatcagaaaactggatttgttttcattccaaagtctttggaaaagacacaaagatctctattccagctttctcggtaaccctaataaagaaaaccaaaactgctcttctagtgccaaacgccctgatcatagcaacagtcacagacaggtacatatttgtctccttactctccagagattcaacttacaaactactaaaatctgtgtgtggacacttagaaaatacaagtgttggtaacagtcccaatccatcttctgctgaaaacagtttccgagcagaccgcccttcatctctgcctctggatttcaatgatgaattctcagatctggatggagtggttcaacaaagaaggcaagacatggaaggatatagcagttctggttctcaaactcctgaatctgagaactctcgaggtttgggaaattgttgtattttgactaaaatttaattcccctcaaaacatcctcaccccacccccttaaaaa

SEQ ID NO: 8836 - DNA, 679 bp, Homo sapiens
  source 1..679: mol_type = unassigned DNA; mol_type = unassigned DNA
agtggaaatctaggtcagagcagagaaggcggaccctcgggaattgttaaatacccttaaaaacaaaaacagagggagagagattttaaaggggatctagtgaatgtcaccagccttttcttaatgtccaggccttttcttctctgggcttgtttgaggcaccagtgacaggcttttggagccttcattttgccctacatgtatttattactcttaaattgggtttgaagattttgttgcttttatgggagaatgtttgctttattacaggaatggaataaaaatggaatgtttgagtgagaggaatgagaatatagatcaaagagaggtccatgttgtttgaaaatgcaaaagctgtatacagatacttttctgaactctcaactctcacttctcatccggcaatatctattcataattatcctgttttgtttttcagtacatatttgtctccttactctccagagattcaacttacaaactactaaaatctgtgtgtggacacttagaaaatacaagtgttggtaacagtcccaatccatcttctgctgaaaacagtttccgagcagaccgcccttcatctctgcctctggatttcaatgatgaattctcagatctggatggagtggttcaacaaagaaggcaagacatggaaggatatagcagttctggttctcaa

SEQ ID NO: 8837 - DNA, 578 bp, Homo sapiens
  source 1..578: mol_type = unassigned DNA; mol_type = unassigned DNA
gagagattttaaaggggatctagtgaatgtcaccagccttttcttaatgtccaggccttttcttctctgggcttgtttgaggcaccagtgacaggcttttggagccttcattttgccctacattacatatttgtctccttactctccagagattcaacttacaaactactaaaatctgtgtgtggacacttagaaaatacaagtgttggtaacagtcccaatccatcttctgctgaaaacagtttccgagcagaccgcccttcatctctgcctctggatttcaatgatgaattctcagatctggatggagtggttcaacaaagaaggcaagacatggaaggatatagcagttctggttctcaaactcctgaatctgagaactctcgagatttccatgcgacagaatcccaaacagttctgaatgtctccaagggagaagcaaagccaactcgggcagatgcccatgtgaacagagtacctgaaggaaaagccaagagtctccctgtacagggtctgtcagaaactgttggaatcttacataaagtcaagtctcagaaatgtccgatgcttcaccatat

SEQ ID NO: 8838 - DNA, 375 bp, Homo sapiens
  source 1..375: mol_type = unassigned DNA; mol_type = unassigned DNA
gcttgagaatggtgactgatcgaccagattgcttgggccatcggaatacctcatgtttccctttgaagaagttctcctgttatgttctggttgaaatcacctgtgtgtcttaatttctcaattcctttttggcaagaatatcaagcaagatagggtctcactctatcatcgcccaggctggagtacagtggcgcaatctcggctcactggaacctctacctcccaacctatcctctcgcctcagcctcccaagtagctgggactacaggtgcacaccaccacacccagctaattttttgtatttttagtagagacaggtttttccatgttgcccaggctggtgttgaactcctgggctcaaacaatccacctaca

SEQ ID NO: 8839 - DNA, 2977 bp, Homo sapiens
  source 1..2977: mol_type = unassigned DNA; mol_type = unassigned DNA
ctgttacagtcgggatagaaaacaaaaagcttaatttaccaggaggctaaacagattgtgccttcttaggcaaatgttccacctgcttggccaattagcttcctctcccgaaagactcgttcaacaggtttcctttttctcttctctgcctcctgggttggggaaagaggctgtcacttcgcttcgaccctccccttccctccctctcggcttttccacagtgggtcggaccaatcgcgcccgctccgacgtgtccaggtccgcggccccgggagcttggcgcggcccggcctggatgcgctgggcggagggtgcaggggagggcacggcgccgcttgcttggcctgcgcacccggacctagaagccgggacgagccggggcagagccaggcgcgcggaagtctgaaggtgccctccagacacggccccgatgactgaactacagcaagatgtggaagacacaaagcctgcgaaagtgctcgggaagagggagagcaaacttggctcagcccactcagaggctgagaatggtgtggaggagaaaaagaaagcctgcaggtcgccaacagcccaatcccctaccccatctgtggaggcggactccccagaccagaagaaaatcattagcctatgcccatatcttctctccaaatctatgcttcattcaggaccaagagtcaaaatccagttttgatggtgcctctttagcaagtgataagaacgactgtaaaacagaaagcaaaaatgaccctaagactgaaagaaaaaagtcttcatcttccagccagtacaaggccaatatgcactttcacaagttgtttcttagtgtcccaacggaggaaccactgaagcaaagctttacctgtgctctacagaaagaaatactataccaaggaaagctctttgtatcagaaaactggatttgttttcattccaaagtctttggaaaagacacaaagatctctattccagctttctcggtaaccctaataaagaaaaccaaaactgctcttctagtgccaaacgccctgatcatagcaacagtcacagacaggtacatatttgtctccttactctccagagattcaacttacaaactactaaaatctgtgtgtggacacttagaaaatacaagtgttggtaacagtcccaatccatcttctgctgaaaacagtttccgagcagaccgcccttcatctctgcctctggatttcaatgatgaattctcagatctggatggagtggttcaacaaagaaggcaagacatggaaggatatagcagttctggttctcaaactcctgaatctgagaactctcgagatttccatgcgacagaatcccaaacagttctgaatgtctccaagggagaagcaaagccaactcgggcagatgcccatgtgaacagagtacctgaaggaaaagccaagagtctccctgtacagggtctgtcagaaactgttggaatcttacataaagtcaagtctcagaaatgtccgatgcttcaccatattcttatattctatgcaattgttgtctgtgcactaatcatctcgaccttctacatgagatacagaattaatactctggaggagcagctggggttactaacctccattgtggacacccataatactgaacaggcagcaccatctggcctgaggtcacaagtacaattcaatgtggaggttctctgtcaagagcttacagctaacatagtgaaattagaaaagatacaaaataacttacagaagttgcttgagaatggtgactgatcgaccagattgcttgggccatcggaatacctcatgtttccctttgaagaaggtgcttcctgaggcgttttgtttgagtgcaccctgctggtcagaggtgcaagcagatgagaatccagacattgcatgtggaggtctccagctcaggaaagtgaggagggaaataattttggttcttgtgcaataaaagttgaccttgactctctgaggaagattttgctgcttttgcctgaagaaaacagacccatctctggaggtctcaggaagggcccagcgaacacactctcttggataattaccacgatggcgtcagcaaacactccaccctgtgcctttttagtccttcccgccctcctgcctctcccttacacccctcttaacgactttcaaactaaaggatacatcatatactgacaaactcaatgtggtcctttcaagaattagccatgagtctcaaaaaggcaataaatggctctaagtggacaggtttgcttcaaacaagtaacatctacattttgtcttttttttttcagttctcctgttatgttctggttgaaatcacctgtgtgtcttaatttctcaattcctttttggcaagaatatcaagcaaggtgaatttaacattatgtttatgttttgttttgttgctgtaactaatagttaattggactgattcttacccagccctggtcaagaatctgtgaggcatgtgactgaagtactaaattaaacttattttgaaaccaaacctaatttttaagccaaaaggtgtaatagtgatttaatacaggatgaaaaacactgaatttttaagactgtaggtggactatgttagtagttttcaagcaggatgtctgtattcagcattcaataatgctaaaatccctttcagcatgaaatttgtatgtttttatcctttgctgactaaaataaaataactggtggtttgctaactatttaccatatgggttggctggtttttattaataattgtttagggtatcataagatctgtaagtacaaaggatattctgtttctatctgcaatgcatttgataatcatttctatgaaatgtattttatttaatcagataagctaataagcgaattggttacatcgtttgtatctgttggcctagtggacagctgtgcctggtgcacctctggcttttaataaatactcattggttgaaacaccctgctaa

SEQ ID NO: 8840 - DNA, 2822 bp, Homo sapiens
  source 1..2822: mol_type = unassigned DNA; mol_type = unassigned DNA
ctgttacagtcgggatagaaaacaaaaagcttaatttaccaggaggctaaacagattgtgccttcttaggcaaatgttccacctgcttggccaattagcttcctctcccgaaagactcgttcaacaggtttcctttttctcttctctgcctcctgggttggggaaagaggctgtcacttcgcttcgaccctccccttccctccctctcggcttttccacagtgggtcggaccaatcgcgcccgctccgacgtgtccaggtccgcggccccgggagcttggcgcggcccggcctggatgcgctgggcggagggtgcaggggagggcacggcgccgcttgcttggcctgcgcacccggacctagaagccgggacgagccggggcagagccaggcgcgcggaagtctgaaggtgccctccagacacggccccgatgactgaactacagcaagatgtggaagacacaaagcctgcgaaagtgctcgggaagagggagagcaaacttggctcagcccactcagaggctgagaatggtgtggaggagaaaaagaaagcctgcaggtcgccaacagcccaatcccctaccccatctgtggaggcggactccccagaccagaagaaaatcattagcctatgtacaaggccaatatgcactttcacaagttgtttcttagtgtcccaacggaggaaccactgaagcaaagctttacctgtgctctacagaaagaaatactataccaaggaaagctctttgtatcagaaaactggatttgttttcattccaaagtctttggaaaagacacaaagatctctattccagctttctcggtaaccctaataaagaaaaccaaaactgctcttctagtgccaaacgccctgatcatagcaacagtcacagacaggtacatatttgtctccttactctccagagattcaacttacaaactactaaaatctgtgtgtggacacttagaaaatacaagtgttggtaacagtcccaatccatcttctgctgaaaacagtttccgagcagaccgcccttcatctctgcctctggatttcaatgatgaattctcagatctggatggagtggttcaacaaagaaggcaagacatggaaggatatagcagttctggttctcaaactcctgaatctgagaactctcgagatttccatgcgacagaatcccaaacagttctgaatgtctccaagggagaagcaaagccaactcgggcagatgcccatgtgaacagagtacctgaaggaaaagccaagagtctccctgtacagggtctgtcagaaactgttggaatcttacataaagtcaagtctcagaaatgtccgatgcttcaccatattcttatattctatgcaattgttgtctgtgcactaatcatctcgaccttctacatgagatacagaattaatactctggaggagcagctggggttactaacctccattgtggacacccataatactgaacaggcagcaccatctggcctgaggtcacaagtacaattcaatgtggaggttctctgtcaagagcttacagctaacatagtgaaattagaaaagatacaaaataacttacagaagttgcttgagaatggtgactgatcgaccagattgcttgggccatcggaatacctcatgtttccctttgaagaaggtgcttcctgaggcgttttgtttgagtgcaccctgctggtcagaggtgcaagcagatgagaatccagacattgcatgtggaggtctccagctcaggaaagtgaggagggaaataattttggttcttgtgcaataaaagttgaccttgactctctgaggaagattttgctgcttttgcctgaagaaaacagacccatctctggaggtctcaggaagggcccagcgaacacactctcttggataattaccacgatggcgtcagcaaacactccaccctgtgcctttttagtccttcccgccctcctgcctctcccttacacccctcttaacgactttcaaactaaaggatacatcatatactgacaaactcaatgtggtcctttcaagaattagccatgagtctcaaaaaggcaataaatggctctaagtggacaggtttgcttcaaacaagtaacatctacattttgtcttttttttttcagttctcctgttatgttctggttgaaatcacctgtgtgtcttaatttctcaattcctttttggcaagaatatcaagcaaggtgaatttaacattatgtttatgttttgttttgttgctgtaactaatagttaattggactgattcttacccagccctggtcaagaatctgtgaggcatgtgactgaagtactaaattaaacttattttgaaaccaaacctaatttttaagccaaaaggtgtaatagtgatttaatacaggatgaaaaacactgaatttttaagactgtaggtggactatgttagtagttttcaagcaggatgtctgtattcagcattcaataatgctaaaatccctttcagcatgaaatttgtatgtttttatcctttgctgactaaaataaaataactggtggtttgctaactatttaccatatgggttggctggtttttattaataattgtttagggtatcataagatctgtaagtacaaaggatattctgtttctatctgcaatgcatttgataatcatttctatgaaatgtattttatttaatcagataagctaataagcgaattggttacatcgtttgtatctgttggcctagtggacagctgtgcctggtgcacctctggcttttaataaatactcattggttgaaacaccctgctaa

SEQ ID NO: 8841 - DNA, 375 bp, Homo sapiens
  source 1..375: mol_type = unassigned DNA; mol_type = unassigned DNA
ggggagggcggatccaggtctggagtctttggattgaaaggttggagatgcctgtgggactcccaagggaacccgagcgtcatgttagggtgaagcagaggacctcagtgctgaacatgctaaggaggttggacaaaatcaggttcagaggtcacaagagagatgacttcctcgatctagcggagtctccaaatgcctcggacaccgaatgcagcgacgaaatccccctgaaggtaccgcggacctcgccccgggacagcgaggagctgagggaccctgctggtccagggaccctcatcatggccacaggagtccaggactttaaccggacagagtttgatcgactgaatgagatcaaaggtcacctggaaattg

SEQ ID NO: 8842 - DNA, 311 bp, Homo sapiens
  source 1..311: mol_type = unassigned DNA; mol_type = unassigned DNA
ccgccgcctccgcgctcgtggccgggacccgcggggccgcctcctcccggctccccggcgccgctgggctcccgggcgggcggcaggcgtagcgcggccgggcggccggcgaggggggcgccgcggcgggtggatgagagttggccccgatatccgctcaggggaacccgagcgtcatgttagggtgaagcagaggacctcagtgctgaacatgctaaggaggttggacaaaatcaggttcagaggtcacaagagagatgacttcctcgatctagcggagtctccaaatgcctcggacaccgaatgcagcg

SEQ ID NO: 8843 - DNA, 4484 bp, Homo sapiens
  source 1..4484: mol_type = unassigned DNA; mol_type = unassigned DNA
ctccaggctccagggcagcagacaccaccctctccgtgcctgctggtgttgggcggcttggaggctatggttcctgggtcctcgtagcacatcctggttctgggccaggacctgaaggagccacagtgaaagagtgtttctggatgtatctgagacagacggagggaacccgagcgtcatgttagggtgaagcagaggacctcagtgctgaacatgctaaggaggttggacaaaatcaggttcagaggtcacaagagagatgacttcctcgatctagcggagtctccaaatgcctcggacaccgaatgcagcgacgaaatccccctgaaggtaccgcggacctcgccccgggacagcgaggagctgagggaccctgctggtccagggaccctcatcatggccacaggagtccaggactttaaccggacagagtttgatcgactgaatgagatcaaaggtcacctggaaattgccttattggaaaaacatttcttacaggaggagctccggaagctgcgagaagaaaccaacgcggagatgctgcggcaggagctggaccgcgagcggcagcggcggatggagctggagcagaaggtgcaggaggtgctgaaggccagaaccgaggagcagatggctcagcagcccccaaaagggcaggcccaggccagcaatggagcagagcgccggagccaggggctgtcctcgcgcctgcagaagtggttctacgagcggtttggggagtacgtggaggacttccggttccagcccgaggagaacactgtggagacagaggaacccctgagcgcccgcaggttaactgaaaatatgagacggctcaagcgcggtgccaagccggtcactaactttgtgaagaacctctctgccttatccgactggtactccgtctacacgtctgccattgccttcaccgtgtacatgaatgccgtgtggcatggctgggccatcccattgttcttatttctagcaattctgaggttatccctcaattacctcatcgccagggggtggcggatacagtggagcatcgtgcccgaagtgtctgagcccgtggaacctccaaaggaagacctgactgtgtctgagaagttccagctggtgctggacgtcgcccagaaagcccagaaccttttcgggaagatggctgacatcctggagaagatcaagaacttgttcatgtgggtccagccggagatcacacagaagctgtatgtggcgctctgggctgccttcctggcctcctgcttcttcccctaccgcctggtggggcttgccgtgggactctatgctggtatcaagttcttcctcattgatttcatctttaaacgctgcccgaggctgcgcgccaagtacgacacgccctatatcatctggaggagtctccccaccgacccgcagctcaaggagcgctccagcgccgcagtctcacgcaggctgcagacgacctcgtcacggagctacgtacccagcgcaccggccggcctgggtaaagaggaggacgccggtcgcttccacagcaccaagaagggcaatttccacgagatcttcaatctgacagaaaacgagcgtccgctggcggtgtgcgagaatggctggcgctgctgcctcatcaacagggaccggaagatgcccacggactacatcaggaacggggtgctctacgtcacggagaattacttgtgcttcgaaagctccaaatctgggtcctcaaagaggaacaaagtcatcaagctagtggacatcacggacatccagaagtacaaggtcctgtctgtcctcccaggctcaggcatggggattgccgtgtcgacgccatccacccagaaaccgctcgtgtttggtgccatggtgcacagggatgaggccttcgagaccattctcagccagtacatcaagatcacctcagcggcagcgtctggcggggacagctagtattgacttgcccaggacgttgctggaattttctttttctttttctttttctttttttttttttacgatttggtagtggaaacaattggacatcctcatgagcttttgcaataattctcctggacctgtggttctattgtgttgacctctgcgttttatcgaccaagaaggggccagggctcacagggacgggggtgcccctctcccacagggcacgtcaggtgcctctgagggccacccgcagactgggggagggggcagaggccctcgggggcccgtggagaagacacacaggacccctggccctgcccttctccgttccagcctggacagagaaacctctccagccaccccaagaggttctcgcaaccttgtgtcccgctctccagaggccagaagctcgtccaccaccaaagccatagctgaagagtgcggggcccttcctcctggggacagaaagatgtcgtcaaggagggacatgggggcctttcaccaaccaccgagaaacgggcctggcggccctccttcctcttacatgagaccctcctgtggcatttgcccttggtgccgggctggggccgggcgcagtgaccctgcctgcgctccacactcgctccacgggaacagagagggtgagaagggcccacccctcgcctgccctcagtgtctttggtggcaccttccttgctggcctccagggcgctcagcaccgcgtctgtaagggcctgcctgctgctctcggcctgacacgccggccaggaggtctgtagctggggaccagtaagggcacaggatggtgcaggtaaaagcacatctttctcacactttgctctttggaaggcccaggagaacatccgcgaaggctgttggaggtgctccgagcactgtggcatgtctggcacatggcccccaggctgcggttgcctgggttggttgggggaggaagtggggaggagtgttccgggaccatggtggcccaggctgcagccgcctttgggccatccgagaggctctggcagcccctgtgctttagggagcaaccgtgagccgagcccagaggcctgggcctgcactgcctgcagccgacatgcgacagcgttccctcccccgcgtgcctagccggtgccggtccgggcacagacccccccagcccccgccctgccccagggaagcctgggcttcccgggaacaaggtggcatttgtggagggagcgcccgcaggcctggtctgctggggccgcctgcgctgggctgaagggagggaaaggcggcttgggcctcctggaaggaggtggccaccccgcgggcctgcgtgtctgctggggcggatcccgcagctccctcagcttgtcctgagtcccttgggtgtcgttgagattgttgttttttgaagaaacagaagattctattttttacagcgagcaagctggttttcttatttttgtatcctttttcagatgtaatttttatctttgctccgatcctcatttgctggtgtgggtgagggatccggcggcatgggctggtttcacccccttcacgaggggccgcagagtcacacgctggtgccgggggtgctttggggggagctgcgccgatcaccagattaagcacatgtcctatcccaggcggtggagcggagcccccgtggctctggactgcgcggacgttggcgtcaggatgaccacacggcggcctttcccgaatggggacagaacccgctctgagccgtgggtctggctcctgtaggggactggctctcttggtgcaccaggggagggggacatatcccagtgaaccccaccttggcgcctgaggcaacacagggtgggcactgacccacccccaggggcggctgcagaggcagtgcccgcagacaatggccacacctctctccccagggcccggcagtgcccaaggatgggtccggggcctcggggccaatgagcgcctcttcctaggtgctgggattcagtccccaaacacagcgggaggggtccctggggcagatggggctttaccagcgtcgggtggtttagttcgagtcccttttgtggagaaagggagatgaaaactgaccacgtgccaggtgtggccgaagcccccagggagggccacattcggggagcggggggtcgggggagggccaccgactggctctgctgccagcacaggcccctccctggaagtcctcgggagcggagcgcggatcggcacgggctctgggctccccgtggagagaagctgtagtttttaccaaattgtgtacatctgggcagatgtttaatttctgtgactaatcactgaactagacgaatgttaaattttttatgtctgaagcctgagtctattttggatctgtaaataatcattgccagtgtgacttttgttcaacaaaaggattgtactgtattaagaaccgatgaaaaaaattctcctgtaacatttttttaagaaaactttgtttgtttaaagaaaaagtattgtataaattataatttttatttaaataaacctaaaatgctttgtgctaa

SEQ ID NO: 8844 - DNA, 193 bp, Homo sapiens
  source 1..193: mol_type = unassigned DNA; mol_type = unassigned DNA
gagatgacttcctcgatctagcggagtctccaaatgcctcggacaccgaatgcagcgacgaaatccccctgaaggctggtccagggaccctcatcatggccacaggagtccaggactttaaccggacagagtttgatcgactgaatgagatcaaaggtcacctggaaattgccttattggaaaaacatttctt

SEQ ID NO: 8845 - DNA, 669 bp, Homo sapiens
  source 1..669: mol_type = unassigned DNA; mol_type = unassigned DNA
ggaggacttccggttccagcccgaggagaacactgtggagacagaggaacccctgagcgcccgcaggttaactgaaaatatgagacggctcaagcgcggtgccaagccggtcactaactttgtgaagaacctctctgccttatccgactggtactccgtctacacgtctgccattgccttcaccgtgtacatgaatgccgtgtggcatggctgggccatcccattgttcttatttctagcaattctgaggttatccctcaattacctcatcgccagggggtggcggatacagtggagcatcgtgcccgaagtgtctgagcccgtggaacctccaaaggaagacctgactgtgtctgagaagttccagctggtgctggacgtcgcccagaaagcccagaaccttttcgggaagatggctgacatcctggagaagatcaagaacttgttcatgtgggtccagccggagatcacacagaagctgtatgtggcgctctgggctgccttcctggcctcctgcttcttcccctaccgcctggtggggcttgccgtggtgctgacaagggacctcagcttagaggggcagaggctgcctgctccaagcaaggatggccccagctgggacttgggctctcttgagctgagctgtccctcctgggtcggccaccacgt

SEQ ID NO: 8846 - DNA, 2834 bp, Homo sapiens
  source 1..2834: mol_type = unassigned DNA; mol_type = unassigned DNA
gctgggtacttccagtggaaagtgtgacaggcgggccttctcccattagtgtgcgagaatggctggcgctgctgcctcatcaacagggaccggaagatgcccacggactacatcaggaacggggtgctctacgtcacggagaattacttgtgcttcgaaagctccaaatctgggtcctcaaagaggaacaaagtcatcaagctagtggacatcacggacatccagaagtacaaggtcctgtctgtcctcccaggctcaggcatggggattgccgtgtcgacgccatccacccagaaaccgctcgtgtttggtgccatggtgcacagggatgaggccttcgagaccattctcagccagtacatcaagatcacctcagcggcagcgtctggcggggacagctagtattgacttgcccaggacgttgctggaattttctttttctttttctttttctttttttttttttacgatttggtagtggaaacaattggacatcctcatgagcttttgcaataattctcctggacctgtggttctattgtgttgacctctgcgttttatcgaccaagaaggggccagggctcacagggacgggggtgcccctctcccacagggcacgtcaggtgcctctgagggccacccgcagactgggggagggggcagaggccctcgggggcccgtggagaagacacacaggacccctggccctgcccttctccgttccagcctggacagagaaacctctccagccaccccaagaggttctcgcaaccttgtgtcccgctctccagaggccagaagctcgtccaccaccaaagccatagctgaagagtgcggggcccttcctcctggggacagaaagatgtcgtcaaggagggacatgggggcctttcaccaaccaccgagaaacgggcctggcggccctccttcctcttacatgagaccctcctgtggcatttgcccttggtgccgggctggggccgggcgcagtgaccctgcctgcgctccacactcgctccacgggaacagagagggtgagaagggcccacccctcgcctgccctcagtgtctttggtggcaccttccttgctggcctccagggcgctcagcaccgcgtctgtaagggcctgcctgctgctctcggcctgacacgccggccaggaggtctgtagctggggaccagtaagggcacaggatggtgcaggtaaaagcacatctttctcacactttgctctttggaaggcccaggagaacatccgcgaaggctgttggaggtgctccgagcactgtggcatgtctggcacatggcccccaggctgcggttgcctgggttggttgggggaggaagtggggaggagtgttccgggaccatggtggcccaggctgcagccgcctttgggccatccgagaggctctggcagcccctgtgctttagggagcaaccgtgagccgagcccagaggcctgggcctgcactgcctgcagccgacatgcgacagcgttccctcccccgcgtgcctagccggtgccggtccgggcacagacccccccagcccccgccctgccccagggaagcctgggcttcccgggaacaaggtggcatttgtggagggagcgcccgcaggcctggtctgctggggccgcctgcgctgggctgaagggagggaaaggcggcttgggcctcctggaaggaggtggccaccccgcgggcctgcgtgtctgctggggcggatcccgcagctccctcagcttgtcctgagtcccttgggtgtcgttgagattgttgttttttgaagaaacagaagattctattttttacagcgagcaagctggttttcttatttttgtatcctttttcagatgtaatttttatctttgctccgatcctcatttgctggtgtgggtgagggatccggcggcatgggctggtttcacccccttcacgaggggccgcagagtcacacgctggtgccgggggtgctttggggggagctgcgccgatcaccagattaagcacatgtcctatcccaggcggtggagcggagcccccgtggctctggactgcgcggacgttggcgtcaggatgaccacacggcggcctttcccgaatggggacagaacccgctctgagccgtgggtctggctcctgtaggggactggctctcttggtgcaccaggggagggggacatatcccagtgaaccccaccttggcgcctgaggcaacacagggtgggcactgacccacccccaggggcggctgcagaggcagtgcccgcagacaatggccacacctctctccccagggcccggcagtgcccaaggatgggtccggggcctcggggccaatgagcgcctcttcctaggtgctgggattcagtccccaaacacagcgggaggggtccctggggcagatggggctttaccagcgtcgggtggtttagttcgagtcccttttgtggagaaagggagatgaaaactgaccacgtgccaggtgtggccgaagcccccagggagggccacattcggggagcggggggtcgggggagggccaccgactggctctgctgccagcacaggcccctccctggaagtcctcgggagcggagcgcggatcggcacgggctctgggctccccgtggagagaagctgtagtttttaccaaattgtgtacatctgggcagatgtttaatttctgtgactaatcactgaactagacgaatgttaaattttttatgtctgaagcctgagtctattttggatctgtaaataatcattgccagtgtgacttttgttcaacaaaaggattgtactgtattaagaaccgatgaaaaaaa

SEQ ID NO: 8847 - DNA, 4315 bp, Homo sapiens
  source 1..4315: mol_type = unassigned DNA; mol_type = unassigned DNA
cgtcatgttagggtgaagcagaggacctcagtgctgaacatgctaaggaggttggacaaaatcaggttcagaggtcacaagagagatgacttcctcgatctagcggagtctccaaatgcctcggacaccgaatgcagcgacgaaatccccctgaaggtaccgcggacctcgccccgggacagcgaggagctgagggaccctgctggtccagggaccctcatcatggccacaggagtccaggactttaaccggacagagtttgatcgactgaatgagatcaaaggtcacctggaaattgccttattggaaaaacatttcttacaggaggagctccggaagctgcgagaagaaaccaacgcggagatgctgcggcaggagctggaccgcgagcggcagcggcggatggagctggagcagaaggtgcaggaggtgctgaaggccagaaccgaggagcagatggctcagcagcccccaaaagggcaggcccaggccagcaatggagcagagcgccggagccaggggctgtcctcgcgcctgcagaagtggttctacgagcggtttggggagtacgtggaggacttccggttccagcccgaggagaacactgtggagacagaggaacccctgagcgcccgcaggttaactgaaaatatgagacggctcaagcgcggtgccaagccggtcactaactttgtgaagaacctctctgccttatccgactggtactccgtctacacgtctgccattgccttcaccgtgtacatgaatgccgtgtggcatggctgggccatcccattgttcttatttctagcaattctgaggttatccctcaattacctcatcgccagggggtggcggatacagtggagcatcgtgcccgaagtgtctgagcccgtggaacctccaaaggaagacctgactgtgtctgagaagttccagctggtgctggacgtcgcccagaaagcccagaaccttttcgggaagatggctgacatcctggagaagatcaagaacttgttcatgtgggtccagccggagatcacacagaagctgtatgtggcgctctgggctgccttcctggcctcctgcttcttcccctaccgcctggtggggcttgccgtgggactctatgctggtatcaagttcttcctcattgatttcatctttaaacgctgcccgaggctgcgcgccaagtacgacacgccctatatcatctggaggagtctccccaccgacccgcagctcaaggagcgctccagcgccgcagtctcacgcaggctgcagacgacctcgtcacggagctacgtacccagcgcaccggccggcctgggtaaagaggaggacgccggtcgcttccacagcaccaagaagggcaatttccacgagatcttcaatctgacagaaaacgagcgtccgctggcggtgtgcgagaatggctggcgctgctgcctcatcaacagggaccggaagatgcccacggactacatcaggaacggggtgctctacgtcacggagaattacttgtgcttcgaaagctccaaatctgggtcctcaaagaggaacaaagtcatcaagctagtggacatcacggacatccagaagtacaaggtcctgtctgtcctcccaggctcaggcatggggattgccgtgtcgacgccatccacccagaaaccgctcgtgtttggtgccatggtgcacagggatgaggccttcgagaccattctcagccagtacatcaagatcacctcagcggcagcgtctggcggggacagctagtattgacttgcccaggacgttgctggaattttctttttctttttctttttctttttttttttttacgatttggtagtggaaacaattggacatcctcatgagcttttgcaataattctcctggacctgtggttctattgtgttgacctctgcgttttatcgaccaagaaggggccagggctcacagggacgggggtgcccctctcccacagggcacgtcaggtgcctctgagggccacccgcagactgggggagggggcagaggccctcgggggcccgtggagaagacacacaggacccctggccctgcccttctccgttccagcctggacagagaaacctctccagccaccccaagaggttctcgcaaccttgtgtcccgctctccagaggccagaagctcgtccaccaccaaagccatagctgaagagtgcggggcccttcctcctggggacagaaagatgtcgtcaaggagggacatgggggcctttcaccaaccaccgagaaacgggcctggcggccctccttcctcttacatgagaccctcctgtggcatttgcccttggtgccgggctggggccgggcgcagtgaccctgcctgcgctccacactcgctccacgggaacagagagggtgagaagggcccacccctcgcctgccctcagtgtctttggtggcaccttccttgctggcctccagggcgctcagcaccgcgtctgtaagggcctgcctgctgctctcggcctgacacgccggccaggaggtctgtagctggggaccagtaagggcacaggatggtgcaggtaaaagcacatctttctcacactttgctctttggaaggcccaggagaacatccgcgaaggctgttggaggtgctccgagcactgtggcatgtctggcacatggcccccaggctgcggttgcctgggttggttgggggaggaagtggggaggagtgttccgggaccatggtggcccaggctgcagccgcctttgggccatccgagaggctctggcagcccctgtgctttagggagcaaccgtgagccgagcccagaggcctgggcctgcactgcctgcagccgacatgcgacagcgttccctcccccgcgtgcctagccggtgccggtccgggcacagacccccccagcccccgccctgccccagggaagcctgggcttcccgggaacaaggtggcatttgtggagggagcgcccgcaggcctggtctgctggggccgcctgcgctgggctgaagggagggaaaggcggcttgggcctcctggaaggaggtggccaccccgcgggcctgcgtgtctgctggggcggatcccgcagctccctcagcttgtcctgagtcccttgggtgtcgttgagattgttgttttttgaagaaacagaagattctattttttacagcgagcaagctggttttcttatttttgtatcctttttcagatgtaatttttatctttgctccgatcctcatttgctggtgtgggtgagggatccggcggcatgggctggtttcacccccttcacgaggggccgcagagtcacacgctggtgccgggggtgctttggggggagctgcgccgatcaccagattaagcacatgtcctatcccaggcggtggagcggagcccccgtggctctggactgcgcggacgttggcgtcaggatgaccacacggcggcctttcccgaatggggacagaacccgctctgagccgtgggtctggctcctgtaggggactggctctcttggtgcaccaggggagggggacatatcccagtgaaccccaccttggcgcctgaggcaacacagggtgggcactgacccacccccaggggcggctgcagaggcagtgcccgcagacaatggccacacctctctccccagggcccggcagtgcccaaggatgggtccggggcctcggggccaatgagcgcctcttcctaggtgctgggattcagtccccaaacacagcgggaggggtccctggggcagatggggctttaccagcgtcgggtggtttagttcgagtcccttttgtggagaaagggagatgaaaactgaccacgtgccaggtgtggccgaagcccccagggagggccacattcggggagcggggggtcgggggagggccaccgactggctctgctgccagcacaggcccctccctggaagtcctcgggagcggagcgcggatcggcacgggctctgggctccccgtggagagaagctgtagtttttaccaaattgtgtacatctgggcagatgtttaatttctgtgactaatcactgaactagacgaatgttaaattttttatgtctgaagcctgagtctattttggatctgtaaataatcattgccagtgtgacttttgttcaacaaaaggattgtactgtattaagaaccgatgaaaaaaattctcctgtaacatttttttaagaaaactttgtttgtttaaagaaaaagtattgtataaattataatttttatttaaataaacctaaaatgctttgtgctaaggctc

SEQ ID NO: 8848 - DNA, 4760 bp, Homo sapiens
  source 1..4760: mol_type = unassigned DNA; mol_type = unassigned DNA
accgactctgtgaattgggtaccttcatgatacccattttataaatgagaaaactgaggtttttactatatgctggtcatcatgctgaggactttacttggattttctctcctgccaatgctacgcggtggggaccttcatgttctcccctttgcagatgagattatcaaagcagaaaaagaccatctctcctactgagtaacagaggaaaccagggcttgcagatattgaggatgatgtggacctggaagccctggtgaacgatatgaatgcatccctggagagcctgtactcggcctgcagcatgcagtcagacacggtgcccctcctgcagaatggccagcatgcccgcagccagcctcgggcttcaggccctcctcggtccatccagccacaggtgtccccgaggcagagggtgcagcgctcccagcctgtgcacatcctcgctgtcaggcgccttcaggaggaagaccagcagtttagaacctcatctctgccggccatccccaatccttttcctgaactctgtggccctgggagcccccctgtgctcacgccgggttctttacctccgagccaggccgccgcaaagcaggatgttaaagtctttagtgaagatgggacaagcaaagtggtggagattctagcagacatgacagccagagacctgtgccaattgctggtttacaaaagtcactgtgtggatgacaacagctggacactagtggagcaccacccgcacctaggattagagaggtgcttggaagaccatgagctggtggtccaggtggagagtaccatggccagtgagagtaaatttctattcaggaagaattacgcaaaatacgagttctttaaaaatcccatgaatttcttcccagaacagatggttacttggtgccagcagtcaaatggcagtcaaacccagcttttgcagaattttctgaactccagtagttgtcctgaaattcaagggtttttgcatgtgaaagagctgggaaagaaatcatggaaaaagctgtatgtgtgtttgcggagatctggcctttattgctccaccaagggaacttcaaaggaacccagacacctgcagctgctggccgacctggaggacagcaacatcttctccctgatcgctggcaggaagcagtacaacgcccctacagaccacgggctctgcataaagccaaacaaagtcaggaatgaaactaaagagctgaggttgctctgtgcagaggacgagcaaaccaggacgtgctggatgacagcgttcagactcctcaagtatggaatgctcctttaccagaattaccgaatccctcagcagaggaaggccttgctgtccccgttctcgacgccagtgcgcagtgtctccgagaactccctcgtggcaatggatttttctgggcaaacaggacgcgtgatagagaatccggcagaggcccagagcgcagccctggaggagggccacgcctggaggaagcgaagcacacggatgaacatcctaggtagccaaagtcccctccacccttctaccctaagtacagtgattcacaggacacagcactggtttcacgggaggatctccagggaggaatcccacaggatcattaaacagcaagggctcgtggatgggctttttctcctccgtgacagccagagtaatccaaaggcatttgtactcacactgtgtcatcaccagaaaattaaaaatttccagatcttaccttgcgaggacgacgggcagacgttcttcagcctagatgacgggaacaccaaattctctgacctgatccagctggttgacttttaccagctgaacaaaggagtcctgccttgcaaactcaagcaccactgcatccgagtggccttatgaccgcagatgtcctctcggctgaagactggaggaagtgaacactggagtgaagaagcggtctgtgcgttggtgaagaacacacatcgattctgcacctggggacccagagcgagatgggtttgttcggtgccagccgaccaagattgactagtttgttggacttaaacgacgatttgctgctgtgaacccagcagggtcgcctccctctgcatcggccaaattggggagggcatggaagatccagcggaaagttgaaaataaactggaatgatcatcttggcttgggccgcttaggaacaagaaccggagagaagtgattggaaatgaactcttgccctggaataatcttgacaattaaaactgatatgtttactttttttgtattgatcacttttttgcactccttctttgttttcaatattgtattcagcctattgtaggagggggatgtggcgtttcaactcatataatacagaaagagttttgaatgggcagatttcaaactgaatatgggtccccaaatgttcccagagggtcctccacaccctctgccgactaccacggtgtggattcagctcccaaatgacaaacccagcccttcccagtatacttgaaaagctttcttgttaaaataaaaggtgtcactgtggtaggcatttggcatattttgtggactcagtcaagcaaccacagtctgttaatcatttctctatgctcagatgtcagatcctcttgttattagtgtgtcttgttctgcacagtgcaggagactttattcctttggaaaattcactgttccacaaacagcaggctgaatggcctcgcctctagattgacgtgggccagcctccttgagacacacctggcacccgtcatcggccagcggtggatgctgcataatccacctgggtacttcagccttgcgtttccacagccttcagcctgttctagaacgatcactgccttacccctgctgctgcagtggtgtgagtcgtttcacggctgatgtccctcgggggattaaaggatctaaagagaaaatggcacctggttgtcttcgtgctgtgtctcatgggtttccatagtgataaagacaaggaaacgctgcaggggccacaggcacaggctgatatttaaagatctttgcttgcagccctccgtcctgctgaaaacccccataagccagtgaacacagagcagctagaggctcctcctctgctggcttagggtcagaagtacctcacagtggttgtggacatggaagagttttgtcaacacaacactttgtccccgctccgggagatgagtcagatggtggcttgagttgtcacttggtcccctccgcccctcgggtggccccctttgccacgtccccttagcttagtgatcaggtgtgagagtggccatttccttacctttgatccctgtaaagcagaaaggactcctttgacaggcgacaaactactgtggtgagcagaatgatttcctttttcaagacaacacctgcctggcttctattaatgtgtgctggccatgatattgccccaaatccgccccactgaagtgttccctaaggaacagcatttctctgctcctcagtcaacccccgtagcctagagcagtgtcacaagcttcagtaaggccagtcagctggaagtcagtctaccgtatagtaacactgtatgtcagtctacagaccacactctagttgttttccatgaaaggtatacaaatgaagaattttctagcaaaacatgtttttaaccatcagtgctcaattgcattttcttcctttcgcagccagtcagtctttcaaactattgacagtaagataattctcacgttcacacctggtggcaggcttcactgtagggacggacattgcagttacaccacgattccttcctcttcactggctcgaggtaaacccttttcaaggaaaaacaactctaggatttcttttttctgtgtacgtagaccagtcccatcagtgtataatctctctctcacacgcctctctccaatagacagcttgtatttgcagtatttcatatttataaatatgcgtttatttaaaaggagaacaaaagcttgactctgattcacagttttgtatgtagctggtttgacgtagtcttttgtattttccctgccgaagtgaattgttggagaatgtaaaccgcctccacgtggcggcagacttcctaaggccccagctcgctggcctcgcgctgggcggctgggaattccacctgagaacaagtcccgcaaaccggggacggaaggacatttgacttttatttttgtatttaattgacatgaatgtaaaggggacagctcagggttgttttggagcctgttgactttgtatctctgcctgtgattttcttttctaaatgaaactccatgtagcaaccaggacgaagttgagaaggaaaacgccaaatgctttggttattagagtttaataggtaagctctgttacactaggtgttagagttccagaatgttcttttgtttgctaaaccttgaagaaacatgtgcctcagcctagatgttttgtcttctcttttctgcacttaatacctgacagtatgaccgatctctgcgcctttctgggggcgggcaagctggcggtagatttgtgatgtcacagtgcaaactgcagtgactgtaaattggcctggcgtgtataaacgttttcagggaatgcagaaggtattaatgaagagacaaaacctttattccatgtgctttgcttcattctgtacatagctctttggctcgtgaacctaattgtaaactttcaggtatttttgtacaaataagggactgatgttctgtttcttgtaattagaaataaacattaatacagtgttcttca

SEQ ID NO: 8849 - DNA, 5432 bp, Homo sapiens
  source 1..5432: mol_type = unassigned DNA; mol_type = unassigned DNA
ggcagccgggcgccccgcggggctctccgcgctgcgttcccgacccctggggggaggtgtggagtccaagcggtgcattcttgaaccatcttgtcagacgccggcggctcgcgggctgtggcgggggctgcggtcaaggccgcgctcctgggggccgccgcctgggagggtgggcgcccaggcgtccctgcagccccgggtgctccgactgcgcggcggggccgcggcgcgcgcgcccgggcgtccgggcgtccgggacagtggtgccagacactcccaaatcccgagccggcccagcctcgtacggaggaccttttttttggttctgttggtgacccgttagccgccgctggggcctaacaccaagttgagggctcgcggattagccgcccgccagccgtggaaatgtgataagagcggtaccgtttgcagaaggaaatttctgatgcaactcttcgcctttgctgattgcctctccaaacgcctgcctgacgactgccttggagcatgtgcgttatggaaattaggctttggcgctgaccacaatgctgagcaggaagcagcagctgcaggcccagtgactggtagctcagtgaccagcagcccagtgaccggcagccaggtcctcacctgggtcctctcagtgaagccagggtggccgccccagcagacagtgctacagagccaactcctgacaggttctgaaaatattgtgcacagggcaggctgaggacacagccacgtgatacccactgtagagagagggagagagagacctcctatgcaagctgccggccctctgttccgtagtaaggacaaggtggagcagacacctcgcagtcaacaagacccggcaggaccaggactccccgcacagtctgaccgacttgcgaatcaccaggaggatgatgtggacctggaagccctggtgaacgatatgaatgcatccctggagagcctgtactcggcctgcagcatgcagtcagacacggtgcccctcctgcagaatggccagcatgcccgcagccagcctcgggcttcaggccctcctcggtccatccagccacaggtgtccccgaggcagagggtgcagcgctcccagcctgtgcacatcctcgctgtcaggcgccttcaggaggaagaccagcagtttagaacctcatctctgccggccatccccaatccttttcctgaactctgtggccctgggagcccccctgtgctcacgccgggttctttacctccgagccaggccgccgcaaagcaggatgttaaagtctttagtgaagatgggacaagcaaagtggtggagattctagcagacatgacagccagagacctgtgccaattgctggtttacaaaagtcactgtgtggatgacaacagctggacactagtggagcaccacccgcacctaggattagagaggtgcttggaagaccatgagctggtggtccaggtggagagtaccatggccagtgagagtaaatttctattcaggaagaattacgcaaaatacgagttctttaaaaatcccatgaatttcttcccagaacagatggttacttggtgccagcagtcaaatggcagtcaaacccagcttttgcagaattttctgaactccagtagttgtcctgaaattcaagggtttttgcatgtgaaagagctgggaaagaaatcatggaaaaagctgtatgtgtgtttgcggagatctggcctttattgctccaccaagggaacttcaaaggaacccagacacctgcagctgctggccgacctggaggacagcaacatcttctccctgatcgctggcaggaagcagtacaacgcccctacagaccacgggctctgcataaagccaaacaaagtcaggaatgaaactaaagagctgaggttgctctgtgcagaggacgagcaaaccaggacgtgctggatgacagcgttcagactcctcaagtatggaatgctcctttaccagaattaccgaatccctcagcagaggaaggccttgctgtccccgttctcgacgccagtgcgcagtgtctccgagaactccctcgtggcaatggatttttctgggcaaacaggacgcgtgatagagaatccggcagaggcccagagcgcagccctggaggagggccacgcctggaggaagcgaagcacacggatgaacatcctaggtagccaaagtcccctccacccttctaccctaagtacagtgattcacaggacacagcactggtttcacgggaggatctccagggaggaatcccacaggatcattaaacagcaagggctcgtggatgggctttttctcctccgtgacagccagagtaatccaaaggcatttgtactcacactgtgtcatcaccagaaaattaaaaatttccagatcttaccttgcgaggacgacgggcagacgttcttcagcctagatgacgggaacaccaaattctctgacctgatccagctggttgacttttaccagctgaacaaaggagtcctgccttgcaaactcaagcaccactgcatccgagtggccttatgaccgcagatgtcctctcggctgaagactggaggaagtgaacactggagtgaagaagcggtctgtgcgttggtgaagaacacacatcgattctgcacctggggacccagagcgagatgggtttgttcggtgccagccgaccaagattgactagtttgttggacttaaacgacgatttgctgctgtgaacccagcagggtcgcctccctctgcatcggccaaattggggagggcatggaagatccagcggaaagttgaaaataaactggaatgatcatcttggcttgggccgcttaggaacaagaaccggagagaagtgattggaaatgaactcttgccctggaataatcttgacaattaaaactgatatgtttactttttttgtattgatcacttttttgcactccttctttgttttcaatattgtattcagcctattgtaggagggggatgtggcgtttcaactcatataatacagaaagagttttgaatgggcagatttcaaactgaatatgggtccccaaatgttcccagagggtcctccacaccctctgccgactaccacggtgtggattcagctcccaaatgacaaacccagcccttcccagtatacttgaaaagctttcttgttaaaataaaaggtgtcactgtggtaggcatttggcatattttgtggactcagtcaagcaaccacagtctgttaatcatttctctatgctcagatgtcagatcctcttgttattagtgtgtcttgttctgcacagtgcaggagactttattcctttggaaaattcactgttccacaaacagcaggctgaatggcctcgcctctagattgacgtgggccagcctccttgagacacacctggcacccgtcatcggccagcggtggatgctgcataatccacctgggtacttcagccttgcgtttccacagccttcagcctgttctagaacgatcactgccttacccctgctgctgcagtggtgtgagtcgtttcacggctgatgtccctcgggggattaaaggatctaaagagaaaatggcacctggttgtcttcgtgctgtgtctcatgggtttccatagtgataaagacaaggaaacgctgcaggggccacaggcacaggctgatatttaaagatctttgcttgcagccctccgtcctgctgaaaacccccataagccagtgaacacagagcagctagaggctcctcctctgctggcttagggtcagaagtacctcacagtggttgtggacatggaagagttttgtcaacacaacactttgtccccgctccgggagatgagtcagatggtggcttgagttgtcacttggtcccctccgcccctcgggtggccccctttgccacgtccccttagcttagtgatcaggtgtgagagtggccatttccttacctttgatccctgtaaagcagaaaggactcctttgacaggcgacaaactactgtggtgagcagaatgatttcctttttcaagacaacacctgcctggcttctattaatgtgtgctggccatgatattgccccaaatccgccccactgaagtgttccctaaggaacagcatttctctgctcctcagtcaacccccgtagcctagagcagtgtcacaagcttcagtaaggccagtcagctggaagtcagtctaccgtatagtaacactgtatgtcagtctacagaccacactctagttgttttccatgaaaggtatacaaatgaagaattttctagcaaaacatgtttttaaccatcagtgctcaattgcattttcttcctttcgcagccagtcagtctttcaaactattgacagtaagataattctcacgttcacacctggtggcaggcttcactgtagggacggacattgcagttacaccacgattccttcctcttcactggctcgaggtaaacccttttcaaggaaaaacaactctaggatttcttttttctgtgtacgtagaccagtcccatcagtgtataatctctctctcacacgcctctctccaatagacagcttgtatttgcagtatttcatatttataaatatgcgtttatttaaaaggagaacaaaagcttgactctgattcacagttttgtatgtagctggtttgacgtagtcttttgtattttccctgccgaagtgaattgttggagaatgtaaaccgcctccacgtggcggcagacttcctaaggccccagctcgctggcctcgcgctgggcggctgggaattccacctgagaacaagtcccgcaaaccggggacggaaggacatttgacttttatttttgtatttaattgacatgaatgtaaaggggacagctcagggttgttttggagcctgttgactttgtatctctgcctgtgattttcttttctaaatgaaactccatgtagcaaccaggacgaagttgagaaggaaaacgccaaatgctttggttattagagtttaataggtaagctctgttacactaggtgttagagttccagaatgttcttttgtttgctaaaccttgaagaaacatgtgcctcagcctagatgttttgtcttctcttttctgcacttaatacctgacagtatgaccgatctctgcgcctttctgggggcgggcaagctggcggtagatttgtgatgtcacagtgcaaactgcagtgactgtaaattggcctggcgtgtataaacgttttcagggaatgcagaaggtattaatgaagagacaaaacctttattccatgtgctttgcttcattctgtacatagctctttggctcgtgaacctaattgtaaactttcaggtatttttgtacaaataagggactgatgttctgtttcttgtaattagaaataaacattaatacagtgttcttca

SEQ ID NO: 8850 - DNA, 2700 bp, Homo sapiens
  source 1..2700: mol_type = unassigned DNA; mol_type = unassigned DNA
ctttccagctttggcgctgaccacaatgctgagcaggaagcagcagctgcaggcccagtgactggtagctcagtgaccagcagcccagtgaccggcagccaggtcctcacctgggtcctctcagtgaagccagggtggccgccccagcagacagtgctacagagccaactcctgacagatattctggaggaaggtgtgaacgcaactttgcctcccagggaacaaacatcctccttctaagtggtagatgtgggtgagctgaccctgctggagtctgtcccctgggctaccctctgcttccccccattgtgagtggtccgtgaagcacagcgttgaccagacctaaacctgtttgctcccaggacaaggtggagcagacacctcgcagtcaacaagacccggcaggaccaggactccccgcacagtctgaccgacttgcgaatcaccaggaggatgatgtggacctggaagccctggtgaacgatatgaatgcatccctggagagcctgtactcggcctgcagcatgcagtcagacacggtgcccctcctgcagaatggccagcatgcccgcagccagcctcgggcttcaggccctcctcggtccatccagccacaggtgtccccgaggcagagggtgcagcgctcccagcctgtgcacatcctcgctgtcaggcgccttcaggaggaagaccagcagtttagaacctcatctctgccggccatccccaatccttttcctgaactctgtggccctgggagcccccctgtgctcacgccgggttctttacctccgagccaggccgccgcaaagcaggatgttaaagtctttagtgaagatgggacaagcaaagtggtggagattctagcagacatgacagccagagacctgtgccaattgctggtttacaaaagtcactgtgtggatgacaacagctggacactagtggagcaccacccgcacctaggattagagaggtgcttggaagaccatgagctggtggtccaggtggagagtaccatggccagtgagagtaaatttctattcaggaagaattacgcaaaatacgagttctttaaaaatcccatgaatttcttcccagaacagatggttacttggtgccagcagtcaaatggcagtcaaacccagcttttgcagaattttctgaactccagtagttgtcctgaaattcaagggtttttgcatgtgaaagagctgggaaagaaatcatggaaaaagctgtatgtgtgtttgcggagatctggcctttattgctccaccaagggaacttcaaaggaacccagacacctgcagctgctggccgacctggaggacagcaacatcttctccctgatcgctggcaggaagcagtacaacgcccctacagaccacgggctctgcataaagccaaacaaagtcaggaatgaaactaaagagctgaggttgctctgtgcagaggacgagcaaaccaggacgtgctggatgacagcgttcagactcctcaagtatggaatgctcctttaccagaattaccgaatccctcagcagaggaaggccttgctgtccccgttctcgacgccagtgcgcagtgtctccgagaactccctcgtggcaatggatttttctgggcaaacaggacgcgtgatagagaatccggcagaggcccagagcgcagccctggaggagggccacgcctggaggaagcgaagcacacggatgaacatcctaggtagccaaagtcccctccacccttctaccctaagtacagtgattcacaggacacagcactggtttcacgggaggatctccagggaggaatcccacaggatcattaaacagcaagggctcgtggatgggctttttctcctccgtgacagccagagtaatccaaaggcatttgtactcacactgtgtcatcaccagaaaattaaaaatttccagatcttaccttgcgaggacgacgggcagacgttcttcagcctagatgacgggaacaccaaattctctgacctgatccagctggttgacttttaccagctgaacaaaggagtcctgccttgcaaactcaagcaccactgcatccgagtggccttatgaccgcagatgtcctctcggctgaagactggaggaagtgaacactggagtgaagaagcggtctgtgcgttggtgaagaacacacatcgattctgcacctggggacccagagcgagatgggtttgttcggtgccagccgaccaagattgactagtttgttggacttaaacgacgatttgctgctgtgaacccagcagggtcgcctccctctgcatcggccaaattggggagggcatggaagatccagcggaaagttgaaaataaactggaatgatcatcttggcttgggccgcttaggaacaagaaccggagagaagtgattggaaatgaactcttgccctggaataatcttgacaattaaaactgatatgtttactttttttgtattgatcacttttttgcactccttctttgttttcaatattgtattcagcctattgtaggagggggatgtggcgtttcaactcatataatacagaaagagttttgaatgggcagatttcaaactgaatatgggtccccaaatgttcccagagggtcctccacaccctctgccgactaccacggtgtggattcagctcccaaatgacaaacccagcccttccca

SEQ ID NO: 8851 - DNA, 2050 bp, Homo sapiens
  source 1..2050: mol_type = unassigned DNA; mol_type = unassigned DNA
aaatgtaatttgaagaaggcagaaggaacccatggctttagccggctgcccagattcctttttgcaccatccgtactaccaggacaaggtggagcagacacctcgcagtcaacaagacccggcaggaccaggactccccgcacagtctgaccgacttgcgaatcaccaggaggatgatgtggacctggaagccctggtgaacgatatgaatgcatccctggagagcctgtactcggcctgcagcatgcagtcagacacggtgcccctcctgcagaatggccagcatgcccgcagccagcctcgggcttcaggccctcctcggtccatccagccacaggtgtccccgaggcagagggtgcagcgctcccagcctgtgcacatcctcgctgtcaggcgccttcaggaggaagaccagcagtttagaacctcatctctgccggccatccccaatccttttcctgaactctgtggccctgggagcccccctgtgctcacgccgggttctttacctccgagccaggccgccgcaaagcaggatgttaaagtctttagtgaagatgggacaagcaaagtggtggagattctagcagacatgacagccagagacctgtgccaattgctggtttacaaaagtcactgtgtggatgacaacagctggacactagtggagcaccacccgcacctaggattagagaggtgcttggaagaccatgagctggtggtccaggtggagagtaccatggccagtgagagtaaatttctattcaggaagaattacgcaaaatacgagttctttaaaaatcccatgaatttcttcccagaacagatggttacttggtgccagcagtcaaatggcagtcaaacccagcttttgcaggaacccagacacctgcagctgctggccgacctggaggacagcaacatcttctccctgatcgctggcaggaagcagtacaacgcccctacagaccacgggctctgcataaagccaaacaaagtcaggaatgaaactaaagagctgaggttgctctgtgcagaggacgagcaaaccaggacgtgctggatgacagcgttcagactcctcaagtatggaatgctcctttaccagaattaccgaatccctcagcagaggaaggccttgctgtccccgttctcgacgccagtgcgcagtgtctccgagaactccctcgtggcaatggatttttctgggcaaacaggacgcgtgatagagaatccggcagaggcccagagcgcagccctggaggagggccacgcctggaggaagcgaagcacacggatgaacatcctaggtagccaaagtcccctccacccttctaccctaagtacagtgattcacaggacacagcactggtttcacgggaggatctccagggaggaatcccacaggatcattaaacagcaagggctcgtggatgggctttttctcctccgtgacagccagagtaatccaaaggcatttgtactcacactgtgtcatcaccagaaaattaaaaatttccagatcttaccttgcgaggacgacgggcagacgttcttcagcctagatgacgggaacaccaaattctctgacctgatccagctggttgacttttaccagctgaacaaaggagtcctgccttgcaaactcaagcaccactgcatccgagtggccttatgaccgcagatgtcctctcggctgaagactggaggaagtgaacactggagtgaagaagcggtctgtgcgttggtgaagaacacacatcgattctgcacctggggacccagagcgagatgggtttgttcggtgccagccgaccaagattgactagtttgttggacttaaacgacgatttgctgctgtgaacccagcagggtcgcctccctctgcatcggccaaattggggagggcatggaagatccagcggaaagttgaaaataaactggaatgatcatcttggcttgggccgcttaggaacaagaaccggagagaagtgattggaaatgaactcttgccctggaataatcttgacaattaaaactgatatgttta

SEQ ID NO: 8852 - DNA, 2279 bp, Homo sapiens
  source 1..2279: mol_type = unassigned DNA; mol_type = unassigned DNA
cagctttggcgctgaccacaatgctgagcaggaagcagcagctgcaggcccagtgactggtagctcagtgaccagcagcccagtgaccggcagccaggtcctcacctgggtcctctcagtgaagccagggtggccgccccagcagacagtgctacagagccaactcctgacaggacaaggtggagcagacacctcgcagtcaacaagacccggcaggaccaggactccccgcacagtctgaccgacttgcgaatcaccaggaggatgatgtggacctggaagccctggtgaacgatatgaatgcatccctggagagcctgtactcggcctgcagcatgcagtcagacacggtgcccctcctgcagaatggccagcatgcccgcagccagcctcgggcttcaggccctcctcggtccatccagccacaggtgtccccgaggcagagggtgcagcgctcccagcctgtgcacatcctcgctgtcaggcgccttcaggaggaagaccagcagtttagaacctcatctctgccggccatccccaatccttttcctgaactctgtggccctgggagcccccctgtgctcacgccgggttctttacctccgagccaggccgccgcaaagcaggatgttaaagtctttagtgaagatgggacaagcaaagtggtggagattctagcagacatgacagccagagacctgtgccaattgctggtttacaaaagtcactgtgtggatgacaacagctggacactagtggagcaccacccgcacctaggattagagaggtgcttggaagaccatgagctggtggtccaggtggagagtaccatggccagtgagagtaaatttctattcaggaagaattacgcaaaatacgagttctttaaaaatcccatgaatttcttcccagaacagatggttacttggtgccagcagtcaaatggcagtcaaacccagcttttgcagaattttctgaactccagtagttgtcctgaaattcaagggtttttgcatgtgaaagagctgggaaagaaatcatggaaaaagctgtatgtgtgtttgcggagatctggcctttattgctccaccaagggaacttcaaaggaacccagacacctgcagctgctggccgacctggaggacagcaacatcttctccctgatcgctggcaggaagcagtacaacgcccctacagaccacgggctctgcataaagccaaacaaagtcaggaatgaaactaaagagctgaggttgctctgtgcagaggacgagcaaaccaggacgtgctggatgacagcgttcagactcctcaagtatggaatgctcctttaccagaattaccgaatccctcagcagaggaaggccttgctgtccccgttctcgacgccagtgcgcagtgtctccgagaactccctcgtggcaatggatttttctgggcaaacaggacgcgtgatagagaatccggcagaggcccagagcgcagccctggaggagggccacgcctggaggaagcgaagcacacggatgaacatcctaggtagccaaagtcccctccacccttctaccctaagtacagtgattcacaggacacagcactggtttcacgggaggatctccagggaggaatcccacaggatcattaaacagcaagggctcgtggatgggctttttctcctccgtgacagccagagtaatccaaaggcatttgtactcacactgtgtcatcaccagaaaattaaaaatttccagatcttaccttgcgaggacgacgggcagacgttcttcagcctagatgacgggaacaccaaattctctgacctgatccagctggttgacttttaccagctgaacaaaggagtcctgccttgcaaactcaagcaccactgcatccgagtggccttatgaccgcagatgtcctctcggctgaagactggaggaagtgaacactggagtgaagaagcggtctgtgcgttggtgaagaacacacatcgattctgcacctggggacccagagcgagatgggtttgttcggtgccagccgaccaagattgactagtttgttggacttaaacgacgatttgctgctgtgaacccagcagggtcgcctccctctgcatcggccaaattggggagggcatggaagatccagcggaaagttgaaaataaactggaatgatcatcttggcttgggccgcttaggaacaagaaccggagagaagtgattggaaatgaactcttgccctggaataatcttgacaattaaaactgatatgttta

SEQ ID NO: 8853 - DNA, 2627 bp, Homo sapiens
  source 1..2627: mol_type = unassigned DNA
cagcccggcccggctccgagcgctgtccatgcggagcgctgtccacgcgccgggcactgcgggggccgggccccgaagccctacccgggccggcggcgcacacgcagcgaccccgtgcggccagtgctgccgcccgctctccagacttgggaggctgcattctgataattctcaggaggaagaatgtataggagagaccagggtttttaaggtgtgacctctgaaccacctacatcagagctgactgcctctcgctttggcgctgaccacaatgctgagcaggaagcagcagctgcaggcccagtgactggtagctcagtgaccagcagcccagtgaccggcagccaggtcctcacctgggtcctctcagtgaagccagggtggccgccccagcagacagtgctacagagccaactcctgacaggtgctgcagcgcagtaaatgtaatttgaagaaggcagaaggaacccatggctttagccggctgcccagattcctttttgcaccatccgtactaccaggacaaggtggagcagacacctcgcagtcaacaagacccggcaggaccaggactccccgcacagtctgaccgacttgcgaatcaccaggaggatgatgtggacctggaagccctggtgaacgatatgaatgcatccctggagagcctgtactcggcctgcagcatgcagtcagacacggtgcccctcctgcagaatggccagcatgcccgcagccagcctcgggcttcaggccctcctcggtccatccagccacaggtgtccccgaggcagagggtgcagcgctcccagcctgtgcacatcctcgctgtcaggcgccttcaggaggaagaccagcagtttagaacctcatctctgccggccatccccaatccttttcctgaactctgtggccctgggagcccccctgtgctcacgccgggttctttacctccgagccaggccgccgcaaagcaggatgttaaagtctttagtgaagatgggacaagcaaagtggtggagattctagcagacatgacagccagagacctgtgccaattgctggtttacaaaagtcactgtgtggatgacaacagctggacactagtggagcaccacccgcacctaggattagagaggtgcttggaagaccatgagctggtggtccaggtggagagtaccatggccagtgagagtaaatttctattcaggaagaattacgcaaaatacgagttctttaaaaatcccatgaatttcttcccagaacagatggttacttggtgccagcagtcaaatggcagtcaaacccagcttttgcagaattttctgaactccagtagttgtcctgaaattcaagggtttttgcatgtgaaagagctgggaaagaaatcatggaaaaagctgtatgtgtgtttgcggagatctggcctttattgctccaccaagggaacttcaaaggaacccagacacctgcagctgctggccgacctggaggacagcaacatcttctccctgatcgctggcaggaagcagtacaacgcccctacagaccacgggctctgcataaagccaaacaaagtcaggaatgaaactaaagagctgaggttgctctgtgcagaggacgagcaaaccaggacgtgctggatgacagcgttcagactcctcaagtatggaatgctcctttaccagaattaccgaatccctcagcagaggaaggccttgctgtccccgttctcgacgccagtgcgcagtgtctccgagaactccctcgtggcaatggatttttctgggcaaacaggacgcgtgatagagaatccggcagaggcccagagcgcagccctggaggagggccacgcctggaggaagcgaagcacacggatgaacatcctaggtagccaaagtcccctccacccttctaccctaagtacagtgattcacaggacacagcactggtttcacgggaggatctccagggaggaatcccacaggatcattaaacagcaagggctcgtggatgggctttttctcctccgtgacagccagagtaatccaaaggcatttgtactcacactgtgtcatcaccagaaaattaaaaatttccagatcttaccttgcgaggacgacgggcagacgttcttcagcctagatgacgggaacaccaaattctctgacctgatccagctggttgacttttaccagctgaacaaaggagtcctgccttgcaaactcaagcaccactgcatccgagtggccttatgaccgcagatgtcctctcggctgaagactggaggaagtgaacactggagtgaagaagcggtctgtgcgttggtgaagaacacacatcgattctgcacctggggacccagagcgagatgggtttgttcggtgccagccgaccaagattgactagtttgttggacttaaacgacgatttgctgctgtgaacccagcagggtcgcctccctctgcatcggccaaattggggagggcatggaagatccagcggaaagttgaaaataaactggaatgatcatcttggcttgggccgcttaggaacaagaaccggagagaagtgattggaaatgaactcttgccctggaataatcttgacaattaaaactgatatgttta

SEQ ID NO: 8854 - DNA, 2289 bp, Homo sapiens
  source 1..2289: mol_type = unassigned DNA
gaagcgagctgcggccgggcgggctcggcgctcggagacccggtggagcccaaagtttccgcgcagcccctgggtggcggcagcgccggcggcgcggggcgcccgggacagtcttgagcgccggcctcgccccgcggggacccgcgcccgccgccggccacgccgagtgtcgcccgcagccacgcggaggcggcggggagccgcgcgcggcaggacaaggtggagcagacacctcgcagtcaacaagacccggcaggaccaggactccccgcacagtctgaccgacttgcgaatcaccaggaggatgatgtggacctggaagccctggtgaacgatatgaatgcatccctggagagcctgtactcggcctgcagcatgcagtcagacacggtgcccctcctgcagaatggccagcatgcccgcagccagcctcgggcttcaggccctcctcggtccatccagccacaggtgtccccgaggcagagggtgcagcgctcccagcctgtgcacatcctcgctgtcaggcgccttcaggaggaagaccagcagtttagaacctcatctctgccggccatccccaatccttttcctgaactctgtggccctgggagcccccctgtgctcacgccgggttctttacctccgagccaggccgccgcaaagcaggatgttaaagtctttagtgaagatgggacaagcaaagtggtggagattctagcagacatgacagccagagacctgtgccaattgctggtttacaaaagtcactgtgtggatgacaacagctggacactagtggagcaccacccgcacctaggattagagaggtgcttggaagaccatgagctggtggtccaggtggagagtaccatggccagtgagagtaaatttctattcaggaagaattacgcaaaatacgagttctttaaaaatcccatgaatttcttcccagaacagatggttacttggtgccagcagtcaaatggcagtcaaacccagcttttgcagaattttctgaactccagtagttgtcctgaaattcaagggtttttgcatgtgaaagagctgggaaagaaatcatggaaaaagctgtatgtgtgtttgcggagatctggcctttattgctccaccaagggaacttcaaaggaacccagacacctgcagctgctggccgacctggaggacagcaacatcttctccctgatcgctggcaggaagcagtacaacgcccctacagaccacgggctctgcataaagccaaacaaagtcaggaatgaaactaaagagctgaggttgctctgtgcagaggacgagcaaaccaggacgtgctggatgacagcgttcagactcctcaagtatggaatgctcctttaccagaattaccgaatccctcagcagaggaaggccttgctgtccccgttctcgacgccagtgcgcagtgtctccgagaactccctcgtggcaatggatttttctgggcaaacaggacgcgtgatagagaatccggcagaggcccagagcgcagccctggaggagggccacgcctggaggaagcgaagcacacggatgaacatcctaggtagccaaagtcccctccacccttctaccctaagtacagtgattcacaggacacagcactggtttcacgggaggatctccagggaggaatcccacaggatcattaaacagcaagggctcgtggatgggctttttctcctccgtgacagccagagtaatccaaaggcatttgtactcacactgtgtcatcaccagaaaattaaaaatttccagatcttaccttgcgaggacgacgggcagacgttcttcagcctagatgacgggaacaccaaattctctgacctgatccagctggttgacttttaccagctgaacaaaggagtcctgccttgcaaactcaagcaccactgcatccgagtggccttatgaccgcagatgtcctctcggctgaagactggaggaagtgaacactggagtgaagaagcggtctgtgcgttggtgaagaacacacatcgattctgcacctggggacccagagcgagatgggtttgttcggtgccagccgaccaagattgactagtttgttggacttaaacgacgatttgctgctgtgaacccagcagggtcgcctccctctgcatcggccaaattggggagggcatggaagatccagcggaaagttgaaaataaactggaatgatcatcttggcttgggccgcttaggaacaagaaccggagagaagtgattggaaatgaactcttgccctggaa

SEQ ID NO: 8855 - DNA, 624 bp, Homo sapiens
  source 1..624: mol_type = unassigned DNA
tatgcaggcacaaaataatccttttcatcctatagtttccctgccctaaccctgtagtcaggcatatccccaaggagcccagcttttttccaatggagaatgacaattcagaattaccgtcttggtgcttgcctggtgtgctgttgcccctagaggccacttaaatgccaaagcactgcactgaagcattgtggctccaagcctgtgtgtgtgtgtgtgtgtgtgtgtgtgtgtgtgtaagagagtgtgtgtgtgtgattagttccagattttaaaatattttagcaatcaactattttcccttccccaggctttttctcctccgtgacagccagagtaatccaaaggcatttgtactcacactgtgtcatcaccagaaaattaaaaatttccagatcttaccttgcgaggacgacgggcagacgttcttcagcctagatgacgggaacaccaaattctctgacctgatccagctggttgacttttaccagctgaacaaaggagtcctgccttgcaaactcaagcaccactgcatccgagtggccttatgaccgcagatgtcctctcggctgaagactggaggaagtgaacactggagtgaagaagcggtctgtgcgttggtga

SEQ ID NO: 8856 - DNA, 1065 bp, Homo sapiens
  source 1..1065: mol_type = unassigned DNA
tgcatgttgtagtaaaaaaatgggctcatgtttctggagtatttttcgttgtgtgtagtgcaatacaggaactttaaagaacaccatgggacccatgtgaaatgccactagtgaagctggaagtgcgcccaagaacagagaaaagtcacgacatgacaagaaaaacttaaattgcttgatacatactagagattgaatggttgccctccacaccacacagataattcattgtgtcaacatgtagacttacagaatcgaatgcagtacagtcccataattgtattgtctcttatgattttcttaataacatttttttctctagcttccttataaaaatatggtgtagaatacatatacgaaatatatgttaattaactgtttatgttatcattaaggcttctggtcaacagtaggccactagtaggtaagttttgggggagtcaaaagctatactcggattttttatttcaaggggcgtcattgctcctaatccctgtgttgatcagggtcagcggcactcaggctcctggaggctggtacagggcatcactccctgttccgcactcaacattgccctttcctgctgtggcgtttgtcacatgccgggcctcggggctcccgggccggtgactaactgtggcttctcctctccagtatggaatgctcctttaccagaattaccgaatccctcagcagaggaaggccttgctgtccccgttctcgacgccagtgcgcagtgtctccgagaactccctcgtggcaatggatttttctgggcaaacaggacgcgtgatagagaatccggcagaggcccagagcgcagccctggaggagggccacgcctggaggaagcgaagcacacggatgaacatcctaggtagccaaagtcccctccacccttctaccctaagtacagtgattcacaggacacagcactggtttcacgggaggatctccagggaggaatcccacaggatcattaaacagcaagggctcgtggatgggctttttctcctccgtgacagccagagtaatccaaaggcatttgtactcacactgtgtcat

SEQ ID NO: 8857 - DNA, 575 bp, Homo sapiens
  source 1..575: mol_type = unassigned DNA
atggaatgctcctttaccagaattaccgaatccctcagcagaggaaggccttgctgtccccgttctcgacgccagtgcgcagtgtctccgagaactccctcgtggcaatggatttttctgggcaaacaggacgcgtgatagagaatccggcagaggcccagagcgcagccctggaggagggccacgcctggagggtaaggccccggccctggccagcctggaggggcaccctcaaggtggtagccccaccacgtggtcttctcccagaggaacagctctatgcgggttggcaagaggggtgccatgttgggtggggtgagttctcagctgcaggaagcagttggcccttctaggccccttccatgttcccagcacccagcctttccccgctgtcccctgtcccctgggctttcatggaagggacaggagaggaacagagttctctgccctccgtggctcctatgcagaactgttctgctgatgaactggcagtggctgtctgtggagtgcacagagcccaggcctgagtggggccagcaggtgctcacatcaaggtctgctactaacagcctgga

SEQ ID NO: 8858 - DNA, 484 bp, Homo sapiens
  source 1..484: mol_type = unassigned DNA
ctagcagacatgacagccagagacctgtgccaattgctggtttacaaaagtcactgtgtggatgacaacagctggacactagtggagcaccacccgcacctaggattagagaggtgcttggaagaccatgagctggtggtccaggtggagagtaccatggccagtgagagtaaatttctattcaggaagaattacgcaaaatacgagttctttaaaaatcccatgaatttcttcccagaacagatggttacttggtgccagcagtcaaatggcagtcaaacccagcttttgcaggtactgggccacaatagatctctgctgaaatagactttctgaatagaaatcctcttggaactgaatggcagcattgtaaaaaacctaaagagatcgcatctttcaccatttataaccttggctcttaagccggaggggtggttggggggagggtttagagtaaccagaaattaaaagtttccttggaaaa

SEQ ID NO: 8859 - DNA, 733 bp, Homo sapiens
  source 1..733: mol_type = unassigned DNA
cgagctgcggccgggcgggctcggcgctcggagacccggtggagcccaaagtttccgcgcagcccctgggtggcggcagcgccggcggcgcggggcgcccgggacagtcttgagcgccggcctcgccccgcggggacccgcgcccgccgccggccacgccgagtgtcgcccgcagccacgcggaggcggcggggagccgcgcgcggcaggtgctgcagcgcagtaaatgtaatttgaagaaggcagaaggaacccatggctttagccggctgcccagattcctttttgcaccatccgtactaccaggttctgaaaatattgtgcacagggcaggctgaggacacagccacgtgatacccactgtagagagagggagagagagacctcctatgcaagctgccggccctctgttccgtagtaaggacaaggtggagcagacacctcgcagtcaacaagacccggcaggaccaggactccccgcacagtctgaccgacttgcgaatcaccaggaggatgatgtggacctggaagccctggtgaacgatatgaatgcatccctggagagcctgtactcggcctgcagcatgcagtcagacacggtgcccctcctgcagaatggccagcatgcccgcagccagcctcgggcttcaggccctcctcggtccatccagccacaggtgtccccgaggcagagggtgcagcgctcccagcctgtgcacatcctcgctgtcag

SEQ ID NO: 8860 - DNA, 381 bp, Homo sapiens
  source 1..381: mol_type = unassigned DNA
aagctggggtcccatggagctgccctgctccatgcttgcatgccatttctctcagcgttggagcagagccctcaacagtgagcgtggtgctgcagcgcagtaaatgtaatttgaagaaggcagaaggaacccatggctttagccggctgcccagattcctttttgcaccatccgtactaccagaaaaatgcaaaataggaaataaaatgtgcttggctacaaacttccgtacacaatgttgaactgagcattagaaatgaaacaacttgcatgtgaattttatcgtcattgtgaaaattggaagacacttatataaactttggcattgtgtttagcacacaaaagaccctgttaaatgtgagccactgtttggatgagctg

SEQ ID NO: 8861 - DNA, 657 bp, Homo sapiens
  source 1..657: mol_type = unassigned DNA
atgggtttggtcctgggattcctgttgtgctccaggaccgggcgctgctccgtcgtcctcccgctcctcaggagcgcccagtccctcggaggctgagtattgcagccgggcggcagccggctccgcggaggggcccccgggcacctgcgtggtgatggcgctgggagcccccgggcacgctcgggcggtggcgcggcatcccaccctcgcccggatggcgtccccagaggcggcgttggcccgcttttcgtgctagcgcgttcgcctggcgcgcggtggccccgaggccccgggtcggttttctgcgccgcaggcccctggccggggcggagccgtggaggaccagcccggcccggctccgagcgctgtccatgcggagcgctgtccacgcgccgggcactgcgggggccgggccccgaagccctacccgggccggcggcgcacacgcagcgaccccgtgcggccagtgctgccgcccgctctccagctttggcgctgaccacaatgctgagcaggaagcagcagctgcaggcccagtgactggtagctcagtgaccagcagcccagtgaccggcagccaggtcctcacctgggtcctctcagtgaagccagggtggccgccccagcagacagtgctacagagccaactcctgacag

SEQ ID NO: 8862 - DNA, 544 bp, Homo sapiens
  source 1..544: mol_type = unassigned DNA
gattatgacgtgctggcggccagggcctcgggtgctgcctggagtctcctgcgtgtctctgctcctttgatgtcagcatcggggtgtctgggagccagcttctgagtgttgtcaaggtagtcctggtggcttgagactggtgatgtgccgttgccaacaatggctgtgtaattctgagcagttgttcagcactcaagtgggatgagaatggcaaggagtgctctgggtggcttttgacaagggaccccgcctgtcattcactcaacaggtgtttgaggagccagtctgtctccgtcatctgttcctgccttacttagatggaaaataatgaaatctgtgtaggaagggaggaaattctctgaagaggacactttacctgctttggcgctgaccacaatgctgagcaggaagcagcagctgcaggcccagtgactggtagctcagtgaccagcagcccagtgaccggcagccaggtcctcacctgggtcctctcagtgaagccagggtggccgccccagcagacagtgctacagagccaactcct

SEQ ID NO: 8863 - DNA, 540 bp, Homo sapiens
  source 1..540: mol_type = unassigned DNA
acgcattccccctttggcctgggtgggaacaggggaggtggtgggcagggccagaagggcttactgggattttctttctctctgtcactccagagaaaggtggtaaagaacacttgtttcagtttgaggtgctcggcagccacgcgctgaaggacggtttttaattgtagggactgagaatggtgcatactaactgctgaggaacatggtgaatggagttatggtaattgcacgattggcatgaaggggtgagagaagttccagattggtcgattaaaatgtgtttgaggagccagtctgtctccgtcatctgttcctgccttacttagatggaaaataatgaaatctgtgtaggaagggaggtgtctttttctctagaaattctctgaagaggacactttacctgctgggaacactgaaccccaatgactcaataatttgcccagacatcagccgctaaggggtggcatctggagatgaaccaagactctctggtgcctggatttttagcaagcatgttcagcgggacctgtttcaaaa

SEQ ID NO: 8864 - DNA, 447 bp, Homo sapiens
  source 1..447: mol_type = unassigned DNA
ctccgtcatctgttcctgccttacttagatggaaaataatgaaatctgtgtaggaagggaggaaattctctgaagaggacactttacctggctggacaggaagcacggcagcatctactcggcttctgaggcgtcctcaggaaacctacaatcaaggtggaaggcgacaggggaagcagacatgttttatgtggctggaggaagaggaagagaagtggggggaggtgccacacacttaaacaaccaggtctcttgagaactccatcacaacagcaccacgaggatggtgctaaaccattcatgaaggatccaccaccacagtccagtcaccttccaccaggctccacctccaacactgggggttacaatttgaaatgagatttggtagggacacagaaccaaaccatatcagacagttcttaaaaatctttttcaatttaacattta

SEQ ID NO: 8865 - DNA, 524 bp, Homo sapiens
  source 1..524: mol_type = unassigned DNA
gggtgctgcctggagtctcctgcgtgtctctgctcctttgatgtcagcatcggggagaaaggtggtaaagaacacttgtttcagtttgaggtgctcggcagccacgcgctgaaggacggtttttaattgtagggtggggactgagaatggtgcatactaactgctgaggaacatggtgaatggagttatggtaattgcacgattggcatgaaggggtgagagaagttccagattggtcgattaaaatacttgggaggctgcattctgataattctcaggaggaagaatgtataggagagaccagggtttttaaggtgtgacctctgaaccacctacatcagagctgactgcctctcgtgtctgggagccagcttctgagtgttgtcaaggtgtttgaggagccagtctgtctccgtcatctgttcctgccttacttagatggaaaataatgaaatctgtgtaggaagggagggtgagtagagggatggcctgtgttgactgaacaataaaatagtgatgttaat

SEQ ID NO: 8866 - DNA, 599 bp, Homo sapiens
  source 1..599: mol_type = unassigned DNA
agcatcgggggtgggagcagggcccacgcattccccctttggcctgggtgggaacaggggaggtggtgggcagggccagaagggcttactgggattttctttctctctgtcactccagagaaaggtggtaaagaacacttgtttcagtttgaggtgctcggcagccacgcgctgaaggacggtttttaattgtagggtggggtgtgagtgcagtgtggttcagtcccctccccatcttgtgctacctgccgttgtacctggacctgtgaatcagggataatagttactatcttgtaggactgagaatggtgcatactaactgctgaggaacatgacttgggaggctgcattctgataattctcaggaggaagaatgtataggagagaccagggtttttaaggtgtgacctctgaaccacctacatcagagctgactgcctctcgtgtctgggagccagcttctgagtgttgtcaaggtagtcctggtggcttgagactggtgatgtgccgttgccaacaatggctgtgtaattctgagcagttgttcagcactcaagtgggatgagaatggcaaggagtgctctgggtggcttttgaca

SEQ ID NO: 8867 - DNA, 578 bp, Homo sapiens
  source 1..578: mol_type = unassigned DNA
tgtcagcatcgggggtgggagcagggcccacgcattccccctttggcctgggtgggaacaggggaggtggtgggcagggccagaagggcttactgggattttctttctctctgtcactccagagaaaggtggtaaagaacacttgtttcagtttgaggtgctcggcagccacgcgctgaaggacggtttttaattgtagggtggggtgtgagtgcagtgtggttcagtcccctccccatcttgtgctacctgccgttgtacctggacctgtgaatcagggataatagttactatcttgtaggactgagaatggtgcatactaactgctgaggaacatggtgaatggagttatggtaattgcacgattggcatgaaggggtgagagaagttccagattggtcgattaaaatacttgggaggctgcattctgataattctcaggaggaagaatgtataggagagaccagggtttttaaggtgtgacctctgaaccacctacatcagagctgactgcctctcgtgtctgggagccagcttctgagtgttgtcaaggtagtcctggtggcttgagactggtg

SEQ ID NO: 8868 - DNA, 4705 bp, Homo sapiens
  source 1..4705: mol_type = unassigned DNA
aaatgtaatttgaagaaggcagaaggaacccatggctttagccggctgcccagattcctttttgcaccatccgtactaccaggacaaggtggagcagacacctcgcagtcaacaagacccggcaggaccaggactccccgcacagtctgaccgacttgcgaatcaccaggaggatgatgtggacctggaagccctggtgaacgatatgaatgcatccctggagagcctgtactcggcctgcagcatgcagtcagacacggtgcccctcctgcagaatggccagcatgcccgcagccagcctcgggcttcaggccctcctcggtccatccagccacaggtgtccccgaggcagagggtgcagcgctcccagcctgtgcacatcctcgctgtcaggcgccttcaggaggaagaccagcagtttagaacctcatctctgccggccatccccaatccttttcctgaactctgtggccctgggagcccccctgtgctcacgccgggttctttacctccgagccaggccgccgcaaagcaggatgttaaagtctttagtgaagatgggacaagcaaagtggtggagattctagcagacatgacagccagagacctgtgccaattgctggtttacaaaagtcactgtgtggatgacaacagctggacactagtggagcaccacccgcacctaggattagagaggtgcttggaagaccatgagctggtggtccaggtggagagtaccatggccagtgagagtaaatttctattcaggaagaattacgcaaaatacgagttctttaaaaatcccatgaatttcttcccagaacagatggttacttggtgccagcagtcaaatggcagtcaaacccagcttttgcagaattttctgaactccagtagttgtcctgaaattcaagggtttttgcatgtgaaagagctgggaaagaaatcatggaaaaagctgtatgtgtgtttgcggagatctggcctttattgctccaccaagggaacttcaaaggaacccagacacctgcagctgctggccgacctggaggacagcaacatcttctccctgatcgctggcaggaagcagtacaacgcccctacagaccacgggctctgcataaagccaaacaaagtcaggaatgaaactaaagagctgaggttgctctgtgcagaggacgagcaaaccaggacgtgctggatgacagcgttcagactcctcaagtatggaatgctcctttaccagaattaccgaatccctcagcagaggaaggccttgctgtccccgttctcgacgccagtgcgcagtgtctccgagaactccctcgtggcaatggatttttctgggcaaacaggacgcgtgatagagaatccggcagaggcccagagcgcagccctggaggagggccacgcctggaggaagcgaagcacacggatgaacatcctaggtagccaaagtcccctccacccttctaccctaagtacagtgattcacaggacacagcactggtttcacgggaggatctccagggaggaatcccacaggatcattaaacagcaagggctcgtggatgggctttttctcctccgtgacagccagagtaatccaaaggcatttgtactcacactgtgtcatcaccagaaaattaaaaatttccagatcttaccttgcgaggacgacgggcagacgttcttcagcctagatgacgggaacaccaaattctctgacctgatccagctggttgacttttaccagctgaacaaaggagtcctgccttgcaaactcaagcaccactgcatccgagtggccttatgaccgcagatgtcctctcggctgaagactggaggaagtgaacactggagtgaagaagcggtctgtgcgttggtgaagaacacacatcgattctgcacctggggacccagagcgagatgggtttgttcggtgccagccgaccaagattgactagtttgttggacttaaacgacgatttgctgctgtgaacccagcagggtcgcctccctctgcatcggccaaattggggagggcatggaagatccagcggaaagttgaaaataaactggaatgatcatcttggcttgggccgcttaggaacaagaaccggagagaagtgattggaaatgaactcttgccctggaataatcttgacaattaaaactgatatgtttactttttttgtattgatcacttttttgcactccttctttgttttcaatattgtattcagcctattgtaggagggggatgtggcgtttcaactcatataatacagaaagagttttgaatgggcagatttcaaactgaatatgggtccccaaatgttcccagagggtcctccacaccctctgccgactaccacggtgtggattcagctcccaaatgacaaacccagcccttcccagtatacttgaaaagctttcttgttaaaataaaaggtgtcactgtggtaggcatttggcatattttgtggactcagtcaagcaaccacagtctgttaatcatttctctatgctcagatgtcagatcctcttgttattagtgtgtcttgttctgcacagtgcaggagactttattcctttggaaaattcactgttccacaaacagcaggctgaatggcctcgcctctagattgacgtgggccagcctccttgagacacacctggcacccgtcatcggccagcggtggatgctgcataatccacctgggtacttcagccttgcgtttccacagccttcagcctgttctagaacgatcactgccttacccctgctgctgcagtggtgtgagtcgtttcacggctgatgtccctcgggggattaaaggatctaaagagaaaatggcacctggttgtcttcgtgctgtgtctcatgggtttccatagtgataaagacaaggaaacgctgcaggggccacaggcacaggctgatatttaaagatctttgcttgcagccctccgtcctgctgaaaacccccataagccagtgaacacagagcagctagaggctcctcctctgctggcttagggtcagaagtacctcacagtggttgtggacatggaagagttttgtcaacacaacactttgtccccgctccgggagatgagtcagatggtggcttgagttgtcacttggtcccctccgcccctcgggtggccccctttgccacgtccccttagcttagtgatcaggtgtgagagtggccatttccttacctttgatccctgtaaagcagaaaggactcctttgacaggcgacaaactactgtggtgagcagaatgatttcctttttcaagacaacacctgcctggcttctattaatgtgtgctggccatgatattgccccaaatccgccccactgaagtgttccctaaggaacagcatttctctgctcctcagtcaacccccgtagcctagagcagtgtcacaagcttcagtaaggccagtcagctggaagtcagtctaccgtatagtaacactgtatgtcagtctacagaccacactctagttgttttccatgaaaggtatacaaatgaagaattttctagcaaaacatgtttttaaccatcagtgctcaattgcattttcttcctttcgcagccagtcagtctttcaaactattgacagtaagataattctcacgttcacacctggtggcaggcttcactgtagggacggacattgcagttacaccacgattccttcctcttcactggctcgaggtaaacccttttcaaggaaaaacaactctaggatttcttttttctgtgtacgtagaccagtcccatcagtgtataatctctctctcacacgcctctctccaatagacagcttgtatttgcagtatttcatatttataaatatgcgtttatttaaaaggagaacaaaagcttgactctgattcacagttttgtatgtagctggtttgacgtagtcttttgtattttccctgccgaagtgaattgttggagaatgtaaaccgcctccacgtggcggcagacttcctaaggccccagctcgctggcctcgcgctgggcggctgggaattccacctgagaacaagtcccgcaaaccggggacggaaggacatttgacttttatttttgtatttaattgacatgaatgtaaaggggacagctcagggttgttttggagcctgttgactttgtatctctgcctgtgattttcttttctaaatgaaactccatgtagcaaccaggacgaagttgagaaggaaaacgccaaatgctttggttattagagtttaataggtaagctctgttacactaggtgttagagttccagaatgttcttttgtttgctaaaccttgaagaaacatgtgcctcagcctagatgttttgtcttctcttttctgcacttaatacctgacagtatgaccgatctctgcgcctttctgggggcgggcaagctggcggtagatttgtgatgtcacagtgcaaactgcagtgactgtaaattggcctggcgtgtataaacgttttcagggaatgcagaaggtattaatgaagagacaaaacctttattccatgtgctttgcttcattctgtacatagctctttggctcgtgaacctaattgtaaactttcaggtatttttgtacaaataagggactgatgttctgtttcttgtaattagaaataaacattaatacagtgttcttcattttc

SEQ ID NO: 8869 - DNA, 5032 bp, Homo sapiens
  source 1..5032: mol_type = unassigned DNA
ggggaggtcgggaggaggcagagagggaagcgagctgcggccgggcgggctcggcgctcggagacccggtggagcccaaagtttccgcgcagcccctgggtggcggcagcgccggcggcgcggggcgcccgggacagtcttgagcgccggcctcgccccgcggggacccgcgcccgccgccggccacgccgagtgtcgcccgcagccacgcggaggcggcggggagccgcgcgcggcagctttggcgctgaccacaatgctgagcaggaagcagcagctgcaggcccagtgactggtagctcagtgaccagcagcccagtgaccggcagccaggtcctcacctgggtcctctcagtgaagccagggtggccgccccagcagacagtgctacagagccaactcctgacaggacaaggtggagcagacacctcgcagtcaacaagacccggcaggaccaggactccccgcacagtctgaccgacttgcgaatcaccaggaggatgatgtggacctggaagccctggtgaacgatatgaatgcatccctggagagcctgtactcggcctgcagcatgcagtcagacacggtgcccctcctgcagaatggccagcatgcccgcagccagcctcgggcttcaggccctcctcggtccatccagccacaggtgtccccgaggcagagggtgcagcgctcccagcctgtgcacatcctcgctgtcaggcgccttcaggaggaagaccagcagtttagaacctcatctctgccggccatccccaatccttttcctgaactctgtggccctgggagcccccctgtgctcacgccgggttctttacctccgagccaggccgccgcaaagcaggatgttaaagtctttagtgaagatgggacaagcaaagtggtggagattctagcagacatgacagccagagacctgtgccaattgctggtttacaaaagtcactgtgtggatgacaacagctggacactagtggagcaccacccgcacctaggattagagaggtgcttggaagaccatgagctggtggtccaggtggagagtaccatggccagtgagagtaaatttctattcaggaagaattacgcaaaatacgagttctttaaaaatcccatgaatttcttcccagaacagatggttacttggtgccagcagtcaaatggcagtcaaacccagcttttgcagaattttctgaactccagtagttgtcctgaaattcaagggtttttgcatgtgaaagagctgggaaagaaatcatggaaaaagctgtatgtgtgtttgcggagatctggcctttattgctccaccaagggaacttcaaaggaacccagacacctgcagctgctggccgacctggaggacagcaacatcttctccctgatcgctggcaggaagcagtacaacgcccctacagaccacgggctctgcataaagccaaacaaagtcaggaatgaaactaaagagctgaggttgctctgtgcagaggacgagcaaaccaggacgtgctggatgacagcgttcagactcctcaagtatggaatgctcctttaccagaattaccgaatccctcagcagaggaaggccttgctgtccccgttctcgacgccagtgcgcagtgtctccgagaactccctcgtggcaatggatttttctgggcaaacaggacgcgtgatagagaatccggcagaggcccagagcgcagccctggaggagggccacgcctggaggaagcgaagcacacggatgaacatcctaggtagccaaagtcccctccacccttctaccctaagtacagtgattcacaggacacagcactggtttcacgggaggatctccagggaggaatcccacaggatcattaaacagcaagggctcgtggatgggctttttctcctccgtgacagccagagtaatccaaaggcatttgtactcacactgtgtcatcaccagaaaattaaaaatttccagatcttaccttgcgaggacgacgggcagacgttcttcagcctagatgacgggaacaccaaattctctgacctgatccagctggttgacttttaccagctgaacaaaggagtcctgccttgcaaactcaagcaccactgcatccgagtggccttatgaccgcagatgtcctctcggctgaagactggaggaagtgaacactggagtgaagaagcggtctgtgcgttggtgaagaacacacatcgattctgcacctggggacccagagcgagatgggtttgttcggtgccagccgaccaagattgactagtttgttggacttaaacgacgatttgctgctgtgaacccagcagggtcgcctccctctgcatcggccaaattggggagggcatggaagatccagcggaaagttgaaaataaactggaatgatcatcttggcttgggccgcttaggaacaagaaccggagagaagtgattggaaatgaactcttgccctggaataatcttgacaattaaaactgatatgtttactttttttgtattgatcacttttttgcactccttctttgttttcaatattgtattcagcctattgtaggagggggatgtggcgtttcaactcatataatacagaaagagttttgaatgggcagatttcaaactgaatatgggtccccaaatgttcccagagggtcctccacaccctctgccgactaccacggtgtggattcagctcccaaatgacaaacccagcccttcccagtatacttgaaaagctttcttgttaaaataaaaggtgtcactgtggtaggcatttggcatattttgtggactcagtcaagcaaccacagtctgttaatcatttctctatgctcagatgtcagatcctcttgttattagtgtgtcttgttctgcacagtgcaggagactttattcctttggaaaattcactgttccacaaacagcaggctgaatggcctcgcctctagattgacgtgggccagcctccttgagacacacctggcacccgtcatcggccagcggtggatgctgcataatccacctgggtacttcagccttgcgtttccacagccttcagcctgttctagaacgatcactgccttacccctgctgctgcagtggtgtgagtcgtttcacggctgatgtccctcgggggattaaaggatctaaagagaaaatggcacctggttgtcttcgtgctgtgtctcatgggtttccatagtgataaagacaaggaaacgctgcaggggccacaggcacaggctgatatttaaagatctttgcttgcagccctccgtcctgctgaaaacccccataagccagtgaacacagagcagctagaggctcctcctctgctggcttagggtcagaagtacctcacagtggttgtggacatggaagagttttgtcaacacaacactttgtccccgctccgggagatgagtcagatggtggcttgagttgtcacttggtcccctccgcccctcgggtggccccctttgccacgtccccttagcttagtgatcaggtgtgagagtggccatttccttacctttgatccctgtaaagcagaaaggactcctttgacaggcgacaaactactgtggtgagcagaatgatttcctttttcaagacaacacctgcctggcttctattaatgtgtgctggccatgatattgccccaaatccgccccactgaagtgttccctaaggaacagcatttctctgctcctcagtcaacccccgtagcctagagcagtgtcacaagcttcagtaaggccagtcagctggaagtcagtctaccgtatagtaacactgtatgtcagtctacagaccacactctagttgttttccatgaaaggtatacaaatgaagaattttctagcaaaacatgtttttaaccatcagtgctcaattgcattttcttcctttcgcagccagtcagtctttcaaactattgacagtaagataattctcacgttcacacctggtggcaggcttcactgtagggacggacattgcagttacaccacgattccttcctcttcactggctcgaggtaaacccttttcaaggaaaaacaactctaggatttcttttttctgtgtacgtagaccagtcccatcagtgtataatctctctctcacacgcctctctccaatagacagcttgtatttgcagtatttcatatttataaatatgcgtttatttaaaaggagaacaaaagcttgactctgattcacagttttgtatgtagctggtttgacgtagtcttttgtattttccctgccgaagtgaattgttggagaatgtaaaccgcctccacgtggcggcagacttcctaaggccccagctcgctggcctcgcgctgggcggctgggaattccacctgagaacaagtcccgcaaaccggggacggaaggacatttgacttttatttttgtatttaattgacatgaatgtaaaggggacagctcagggttgttttggagcctgttgactttgtatctctgcctgtgattttcttttctaaatgaaactccatgtagcaaccaggacgaagttgagaaggaaaacgccaaatgctttggttattagagtttaataggtaagctctgttacactaggtgttagagttccagaatgttcttttgtttgctaaaccttgaagaaacatgtgcctcagcctagatgttttgtcttctcttttctgcacttaatacctgacagtatgaccgatctctgcgcctttctgggggcgggcaagctggcggtagatttgtgatgtcacagtgcaaactgcagtgactgtaaattggcctggcgtgtataaacgttttcagggaatgcagaaggtattaatgaagagacaaaacctttattccatgtgctttgcttcattctgtacatagctctttggctcgtgaacctaattgtaaactttcaggtatttttgtacaaataagggactgatgttctgtttcttgtaattagaaataaacattaatacagtgttcttcattttc

SEQ ID NO: 8870 - DNA, 4785 bp, Homo sapiens
  source 1..4785: mol_type = unassigned DNA
cgcaactttgcctcccagggaacaaacatcctccttctaagtggtagatgtgggtgagctgaccctgctggagtctgtcccctgggctaccctctgcttccccccattgtgagtggtccgtgaagcacagcgttgaccagacctaaacctgtttgctcccaggacaaggtggagcagacacctcgcagtcaacaagacccggcaggaccaggactccccgcacagtctgaccgacttgcgaatcaccaggaggatgatgtggacctggaagccctggtgaacgatatgaatgcatccctggagagcctgtactcggcctgcagcatgcagtcagacacggtgcccctcctgcagaatggccagcatgcccgcagccagcctcgggcttcaggccctcctcggtccatccagccacaggtgtccccgaggcagagggtgcagcgctcccagcctgtgcacatcctcgctgtcaggcgccttcaggaggaagaccagcagtttagaacctcatctctgccggccatccccaatccttttcctgaactctgtggccctgggagcccccctgtgctcacgccgggttctttacctccgagccaggccgccgcaaagcaggatgttaaagtctttagtgaagatgggacaagcaaagtggtggagattctagcagacatgacagccagagacctgtgccaattgctggtttacaaaagtcactgtgtggatgacaacagctggacactagtggagcaccacccgcacctaggattagagaggtgcttggaagaccatgagctggtggtccaggtggagagtaccatggccagtgagagtaaatttctattcaggaagaattacgcaaaatacgagttctttaaaaatcccatgaatttcttcccagaacagatggttacttggtgccagcagtcaaatggcagtcaaacccagcttttgcagaattttctgaactccagtagttgtcctgaaattcaagggtttttgcatgtgaaagagctgggaaagaaatcatggaaaaagctgtatgtgtgtttgcggagatctggcctttattgctccaccaagggaacttcaaaggaacccagacacctgcagctgctggccgacctggaggacagcaacatcttctccctgatcgctggcaggaagcagtacaacgcccctacagaccacgggctctgcataaagccaaacaaagtcaggaatgaaactaaagagctgaggttgctctgtgcagaggacgagcaaaccaggacgtgctggatgacagcgttcagactcctcaagtatggaatgctcctttaccagaattaccgaatccctcagcagaggaaggccttgctgtccccgttctcgacgccagtgcgcagtgtctccgagaactccctcgtggcaatggatttttctgggcaaacaggacgcgtgatagagaatccggcagaggcccagagcgcagccctggaggagggccacgcctggaggaagcgaagcacacggatgaacatcctaggtagccaaagtcccctccacccttctaccctaagtacagtgattcacaggacacagcactggtttcacgggaggatctccagggaggaatcccacaggatcattaaacagcaagggctcgtggatgggctttttctcctccgtgacagccagagtaatccaaaggcatttgtactcacactgtgtcatcaccagaaaattaaaaatttccagatcttaccttgcgaggacgacgggcagacgttcttcagcctagatgacgggaacaccaaattctctgacctgatccagctggttgacttttaccagctgaacaaaggagtcctgccttgcaaactcaagcaccactgcatccgagtggccttatgaccgcagatgtcctctcggctgaagactggaggaagtgaacactggagtgaagaagcggtctgtgcgttggtgaagaacacacatcgattctgcacctggggacccagagcgagatgggtttgttcggtgccagccgaccaagattgactagtttgttggacttaaacgacgatttgctgctgtgaacccagcagggtcgcctccctctgcatcggccaaattggggagggcatggaagatccagcggaaagttgaaaataaactggaatgatcatcttggcttgggccgcttaggaacaagaaccggagagaagtgattggaaatgaactcttgccctggaataatcttgacaattaaaactgatatgtttactttttttgtattgatcacttttttgcactccttctttgttttcaatattgtattcagcctattgtaggagggggatgtggcgtttcaactcatataatacagaaagagttttgaatgggcagatttcaaactgaatatgggtccccaaatgttcccagagggtcctccacaccctctgccgactaccacggtgtggattcagctcccaaatgacaaacccagcccttcccagtatacttgaaaagctttcttgttaaaataaaaggtgtcactgtggtaggcatttggcatattttgtggactcagtcaagcaaccacagtctgttaatcatttctctatgctcagatgtcagatcctcttgttattagtgtgtcttgttctgcacagtgcaggagactttattcctttggaaaattcactgttccacaaacagcaggctgaatggcctcgcctctagattgacgtgggccagcctccttgagacacacctggcacccgtcatcggccagcggtggatgctgcataatccacctgggtacttcagccttgcgtttccacagccttcagcctgttctagaacgatcactgccttacccctgctgctgcagtggtgtgagtcgtttcacggctgatgtccctcgggggattaaaggatctaaagagaaaatggcacctggttgtcttcgtgctgtgtctcatgggtttccatagtgataaagacaaggaaacgctgcaggggccacaggcacaggctgatatttaaagatctttgcttgcagccctccgtcctgctgaaaacccccataagccagtgaacacagagcagctagaggctcctcctctgctggcttagggtcagaagtacctcacagtggttgtggacatggaagagttttgtcaacacaacactttgtccccgctccgggagatgagtcagatggtggcttgagttgtcacttggtcccctccgcccctcgggtggccccctttgccacgtccccttagcttagtgatcaggtgtgagagtggccatttccttacctttgatccctgtaaagcagaaaggactcctttgacaggcgacaaactactgtggtgagcagaatgatttcctttttcaagacaacacctgcctggcttctattaatgtgtgctggccatgatattgccccaaatccgccccactgaagtgttccctaaggaacagcatttctctgctcctcagtcaacccccgtagcctagagcagtgtcacaagcttcagtaaggccagtcagctggaagtcagtctaccgtatagtaacactgtatgtcagtctacagaccacactctagttgttttccatgaaaggtatacaaatgaagaattttctagcaaaacatgtttttaaccatcagtgctcaattgcattttcttcctttcgcagccagtcagtctttcaaactattgacagtaagataattctcacgttcacacctggtggcaggcttcactgtagggacggacattgcagttacaccacgattccttcctcttcactggctcgaggtaaacccttttcaaggaaaaacaactctaggatttcttttttctgtgtacgtagaccagtcccatcagtgtataatctctctctcacacgcctctctccaatagacagcttgtatttgcagtatttcatatttataaatatgcgtttatttaaaaggagaacaaaagcttgactctgattcacagttttgtatgtagctggtttgacgtagtcttttgtattttccctgccgaagtgaattgttggagaatgtaaaccgcctccacgtggcggcagacttcctaaggccccagctcgctggcctcgcgctgggcggctgggaattccacctgagaacaagtcccgcaaaccggggacggaaggacatttgacttttatttttgtatttaattgacatgaatgtaaaggggacagctcagggttgttttggagcctgttgactttgtatctctgcctgtgattttcttttctaaatgaaactccatgtagcaaccaggacgaagttgagaaggaaaacgccaaatgctttggttattagagtttaataggtaagctctgttacactaggtgttagagttccagaatgttcttttgtttgctaaaccttgaagaaacatgtgcctcagcctagatgttttgtcttctcttttctgcacttaatacctgacagtatgaccgatctctgcgcctttctgggggcgggcaagctggcggtagatttgtgatgtcacagtgcaaactgcagtgactgtaaattggcctggcgtgtataaacgttttcagggaatgcagaaggtattaatgaagagacaaaacctttattccatgtgctttgcttcattctgtacatagctctttggctcgtgaacctaattgtaaactttcaggtatttttgtacaaataagggactgatgttctgtttcttgtaattagaaataaacattaatacagtgttcttcattttc

SEQ ID NO: 8871 - DNA, 1983 bp, Homo sapiens
  source 1..1983: mol_type = unassigned DNA; mol_type = unassigned DNA
cggcacctcgcctcccgccgcgcaaaccccttctccccacgcgccgagtctcccatgacgcccgagccccccggccggcgacaatgaccacttccctgcaagatgggcagagcgccgcgagcagggcggctgcccgggattcgccgctggccgcccaggtgtgtggcgctgcccaggggaggggcgacgcccacgacctggcgccggccccctggctgcacgcgcgagcgctcctgccccttccggacgggacccgcggctgtgctgcagacaggagaaaaaagaaagatcttgatgttccggaaatgccatctattccaaacccttttcctgagctatgctgttctccatttacatctgtgttgtcagcagacctatttcccaaagcaaattcaaggaaaaaacaggtgattaaagtatacagtgaagatgaaaccagcagggctttagatgtacccagtgacataacggctcgagatgtttgtcagctgttgatcctgaagaatcattacattgatgaccacagctggaccctttttgagcacctgcctcacataggtgtagaaagaacaatagaagaccacgaactggtgattgaagtgctatccaactgggggatagaagaagaaaacaaactatactttagaaaaaattatgccaaatatgagttctttaaaaacccaatgtatttttttccagagcatatggtatcttttgcaactgaaaccaatggtgaaatatcccccacacagattttgcagatgtttctgagttcaagcacatatcctgaaattcatggtttcttacatgcgaaagaacagggaaagaagtcttggaaaaaaatttacttttttctaagaagatctggtttatatttttctactaaaggaacatcaaaggaaccgcggcatttgcagtttttcagcgaatttggcaatagtgatatttatgtgtcactggcaggcaaaaaaaaacatggagcaccgactaactatggattctgctttaaggtgttaccttcaagatatgcattaacgataaacaatgtgctgtggccttctagcctaacaaagcgggagggccccgagacctgaaaatgctctgtgcagaagaagagcagagtaggacgtgctgggtgaccgcgattagattgcttaagtatggcatgcagctgtaccagaattatatgcatccatatcaaggtagaagtggctgcagttcacagagcatatcacctatgagaagtatatcagagaattccctggtagcaatggacttctcaggccagaaaagcagagttatagaaaatcccactgaagccctttcagttgcggttgaagaaggactcgcttggaggaaaaaaggatgtttacgcctgggcactcacggtagccccactgcctcttcacagagctctgccacaaacatggctatccaccggtcccagccatggtttcaccacaaaatttctagagatgaggctcagcgattgattattcagcaaggacttgtggatggagttttcttggtacgggatagtcagagtaaccccaaaactttcgtactgtcaatgagtcatggacaaaaaataaagcactttcaaattataccagtagaagatgacggtgaaatgttccacacactggatgatggccacacaagatttacagatctaatacagctggtggagttctatcaactcaataagggcgttcttccttgcaagttgaaacattattgtgctaggattgctctctagacaagccagaagtgacttattaaactattgaaggaaaaggactcaagaaaaataataaaagaccataaataagggcgaaaacattaccatgtgaaaagaatgtatttcacctgcaagttacaaaaaaatagtttgtgcattgcaaataagcaaagacttggattgactttacattcatcatttaaaattcattagttaaaattaaaccttaggaaaaaaatgac

SEQ ID NO: 8872 - DNA, 2382 bp, Homo sapiens
  source 1..2382: mol_type = unassigned DNA
atgagggtcagggctgcgcggacccctatcccgcctgcggtcctcccggcaagcccagcgggagcgcccgctcggctgggtccccgcctccagcggcgccggggccgcccagaccctgggctcagcctcgcgccccggtgcccacctgaggaggcagcggtcccggcctcgcgtcccggatgggacggcgcgggagcaatgccagtggccccgagcgccccgggccacgcgcggggccggccagccgctctcgcgccctccccgccccctccgcgccttgcctcgccgcccgcggcccccacccaccggccgctcctcccctctccccaccctcctcctccgccccctcccctcccccgccgcctcgcagatagctcggccgcgcgtctcagccgccggggccccgagcgcaggcggcgaggccaccacacctgcagagcgctcgggctgcctagccggcacctcgcctcccgccgcgcaaaccccttctccccacgcgccgagtctcccatgacgcccgagccccccggccggcgacaatgaccacttccctgcaagatgggcagagcgccgcgagcagggcggctgcccgggattcgccgctggccgcccaggtgtgtggcgctgcccaggggaggggcgacgcccacgacctggcgccggccccctggctgcacgcgcgagcgctcctgccccttccggacgggacccgcggctgtgctgcagacaggagaaaaaagaaagatcttgatgttccggaaatgccatctattccaaacccttttcctgagctatgctgttctccatttacatctgtgttgtcagcagacctatttcccaaagcaaattcaaggaaaaaacaggtgattaaagtatacagtgaagatgaaaccagcagggctttagatgtacccagtgacataacggctcgagatgtttgtcagctgttgatcctgaagaatcattacattgatgaccacagctggaccctttttgagcacctgcctcacataggtgtagaaagaacaatagaagaccacgaactggtgattgaagtgctatccaactgggggatagaagaagaaaacaaactatactttagaaaaaattatgccaaatatgagttctttaaaaacccaatgtatttttttccagagcatatggtatcttttgcaactgaaaccaatggtgaaatatcccccacacagattttgcagatgtttctgagttcaagcacatatcctgaaattcatggtttcttacatgcgaaagaacagggaaagaagtcttggaaaaaaatttacttttttctaagaagatctggtttatatttttctactaaaggaacatcaaaggaaccgcggcatttgcagtttttcagcgaatttggcaatagtgatatttatgtgtcactggcaggcaaaaaaaaacatggagcaccgactaactatggattctgctttaagcctaacaaagcgggagggccccgagacctgaaaatgctctgtgcagaagaagagcagagtaggacgtgctgggtgaccgcgattagattgcttaagtatggcatgcagctgtaccagaattatatgcatccatatcaaggtagaagtggctgcagttcacagagcatatcacctatgagaagtatatcagagaattccctggtagcaatggacttctcaggccagaaaagcagagttatagaaaatcccactgaagccctttcagttgcggttgaagaaggactcgcttggaggaaaaaaggatgtttacgcctgggcactcacggtagccccactgcctcttcacagagctctgccacaaacatggctatccaccggtcccagccatggtttcaccacaaaatttctagagatgaggctcagcgattgattattcagcaaggacttgtggatggagttttcttggtacgggatagtcagagtaaccccaaaactttcgtactgtcaatgagtcatggacaaaaaataaagcactttcaaattataccagtagaagatgacggtgaaatgttccacacactggatgatggccacacaagatttacagatctaatacagctggtggagttctatcaactcaataagggcgttcttccttgcaagttgaaacattattgtgctaggattgctctctagacaagccagaagtgacttattaaactattgaaggaaaaggactcaagaaaaataataaaagaccataaataagggcgaaaacattaccatgtgaaaagaatgtatttcacctgcaagttacaaaaaaatagtttgtgcattgcaaataagcaaagacttggattgactttacattcatcatttaaaattcattagttaaaattaaaccttaggaaaaaaa

SEQ ID NO: 8873 - DNA, 406 bp, Homo sapiens
  source 1..406: mol_type = unassigned DNA
agatgaggctcagcgattgattattcagcaaggacttgtggatgggtagaagatgacggtgaaatgttccacacactggatgatggccacacaagatttacagatctaatacagctggtggagttctatcaactcaataagggcgttcttccttgcaagttgaaacattattgtgctaggattgctctctagacaagccagaagtgacttattaaactattgaaggaaaaggactcaagaaaaataataaaagaccataaataagggcgaaaacattaccatgtgaaaagaatgtatttcacctgcaagttacaaaaaaatagtttgtgcattgcaaataagcaaagacttggattgactttacattcatcatttaaaattcattagttaaaattaaaccttagga

SEQ ID NO: 8874 - DNA, 1435 bp, Homo sapiens
  source 1..1435: mol_type = unassigned DNA
atagctcggccgcgcgtctcagccgccggggccccgagcgcaggcggcgaggccaccacacctgcagagcgctcgggctgcctagccggcacctcgcctcccgccgcgcaaaccccttctccccacgcgccgagtctcccatgacgcccgagccccccggccggcgacaatgaccacttccctgcaagatgggcagagcgccgcgagcagggcggctgcccgggattcgccgctggccgcccaggagaaaaaagaaagatcttgatgttccggaaatgccatctattccaaacccttttcctgagctatgctgttctccatttacatctgtgttgtcagcagacctatttcccaaagcaaattcaaggaaaaaacaggtgattaaagtatacagtgaagatgaaaccagcagggctttagatgtacccagtgacataacggctcgagatgtttgtcagctgttgatcctgaagaatcattacattgatgaccacagctggaccctttttgagcacctgcctcacataggtgtagaaagaacaatagaagaccacgaactggtgattgaagtgctatccaactgggggatagaagaagaaaacaaactatactttagaaaaaattatgccaaatatgagttctttaaaaacccaatgtatttttttccagagcatatggtatcttttgcaactgaaaccaatggtgaaatatcccccacacagattttgcagatgtttctgagttcaagcacatatcctgaaattcatggtttcttacatgcgaaagaacagggaaagaagtcttggaaaaaaatttacttttttctaagaagatctggtttatatttttctactaaaggaacatcaaaggaaccgcggcatttgcagtttttcagcgaatttggcaatagtgatatttatgtgtcactggcaggcaaaaaaaaacatggagcaccgactaactatggattctgctttaagcctaacaaagcgggagggccccgagacctgaaaatgctctgtgcagaagaagagcagagtaggacgtgctgggtgaccgcgattagattgcttaagtatggcatgcagctgtaccagaattatatgcatccatatcaaggtagaagtggctgcagttcacagagcatatcacctatgagaagtatatcagagaattccctggtagcaatggacttctcaggccagaaaagcagagttatagaaaatcccactgaagccctttcagttgcggttgaagaaggactcgcttggaggaaaaaaggatgtttacgcctgggcactcacggtagccccactgcctcttcacagagctctgccacaaacatggctatccaccggtcccagccatggtttcaccacaaaatttctagagatgaggctcagcgattgattattcagcaaggacttgtggatgg

SEQ ID NO: 8875 - DNA, 984 bp, Homo sapiens
  source 1..984: mol_type = unassigned DNA
agttgtttcattgcactgagccctgagattcccaaggagtaaccataaaagatttcttttattttgtccatgacctacgagacaggatcattctaagaagagcaggcatgagtttgagtgcaagaagagtcactctgcctgcaataacgccaataattctacagaaaagggtgattaaagtatacagtgaagatgaaaccagcagggctttagatgtacccagtgacataacggctcgagatgtttgtcagctgttgatcctgaagaatcattacattgatgaccacagctggaccctttttgagcacctgcctcacataggtgtagactacctgtggctccctggaatgatccccacctatctgtcatttctactagctgtacatgcagccattgtaccatcttcacacgtggtctgtttatgagatttagtgtttgtgagatcctgaggcctcatagaaagaacaatagaagaccacgaactggtgattgaagtgctatccaactgggggatagaagaagaaaacaaactatactttagaaaaaattatgccaaatatgagttctttaaaaacccaatgtatttttttccagagcatatggtatcttttgcaactgaaaccaatggtgaaatatcccccacacagattttgcagatgtttctgagttcaagcacatatcctgaaattcatggtttcttacatgcgaaagaacagggaaagaagtcttggaaaaaaatttacttttttctaagaagatctggtttatatttttctactaaaggaacatcaaaggaaccgcggcatttgcagtttttcagcgaatttggcaatagtgatatttatgtgtcactggcaggcaaaaaaaaacatggagcaccgactaactatggattctgctttaaggtacaggcttaatattttgatagatgaataaagcaagcctcagccttttaggtaagcttgagtttcctttaattgcttt

SEQ ID NO: 8876 - DNA, 587 bp, Homo sapiens
  source 1..587: mol_type = unassigned DNA
cttttctatatactttatataatatgagccttgtcacagagtggtacatgttcgccttagcacactttttattcctgacagcaattatattttacattctgttttatgtaaattacatcctatgttctcttactgtaggagaaaaaagaaagatcttgatgttccggaaatgccatctattccaaacccttttcctgagctatgctgttctccatttacatctgtgttgtcagcagacctatttcccaaagcaaattcaaggaaaaaacaggtgattaaagtatacagtgaagatgaaaccagcagggctttagatgtacccagtgacataacggctcgagatgtttgtcagctgttgatcctgaagaatcattacattgatgaccacagctggaccctttttgagcacctgcctcacataggtgtagaaagaacaatagaagaccacgaactggtgattgaagtgctatccaactgggggatagaagaagaaaacaaactatactttagaaaaaattatgccaaatatgagttctttaaaaacccaatgtatttttttccagagcatatggtatcttttgcaactg

SEQ ID NO: 8877 - DNA, 612 bp, Homo sapiens
  source 1..612: mol_type = unassigned DNA
aagataattttagtttccttgggcctggaatctggacacacagggctcccccccgcctctgacttctctgtccgaagtcgggacaccctcctaccacctgtagagaagcgggagtggatctgaaataaaatccaggaatctgggggttcctagacggagccagacttcggaacgggtgtcctgctactcctgctggggctcctccaggacaagggcacacaactggttccgttaagcccctctcttgctcagacgccatggagctggatctgtctccacctcatcttagcagctctccggaagacctttgcccagcccctgggacccctcctgggactccccggccccctgatacccctctgcctgaggaggtaaagaggtcccagcctctcctcatcccaaccaccggcaggaaacttcgagaggaggagaggcgtgccacctccctcccctctatccccaaccccttccctgagctctgcagtcctccctcacagagcccaattctcgggggcccctccagtgcaagggggctgctcccccgcgatgccagccgcccccattcgtgtgcaattcctggggcgcaggtagtaaaggtgtacagtgaggatg

SEQ ID NO: 8878 - DNA, 2243 bp, Homo sapiens
  source 1..2243: mol_type = unassigned DNA
aagataattttagtttccttgggcctggaatctggacacacagggctcccccccgcctctgacttctctgtccgaagtcgggacaccctcctaccacctgtagagaagcgggagtggatctgaaataaaatccaggaatctgggggttcctagacggagccagacttcggaacgggtgtcctgctactcctgctggggctcctccaggacaagggcacacaactggttccgttaagcccctctcttgctcagacgccatggagctggatctgtctccacctcatcttagcagctctccggaagacctttgcccagcccctgggacccctcctgggactccccggccccctgatacccctctgcctgaggaggtaaagaggtcccagcctctcctcatcccaaccaccggcaggaaacttcgagaggaggagaggcgtgccacctccctcccctctatccccaaccccttccctgagctctgcagtcctccctcacagagcccaattctcgggggcccctccagtgcaagggggctgctcccccgcgatgccagccgcccccatgtagtaaaggtgtacagtgaggatggggcctgcaggtctgtggaggtggcagcaggtgccacagctcgccacgtgtgtgaaatgctggtgcagcgagctcacgccttgagcgacgagacctgggggctggtggagtgccacccccacctagcactggagcggggtttggaggaccacgagtccgtggtggaagtgcaggctgcctggcccgtgggcggagatagccgcttcgtcttccggaaaaacttcgccaagtacgaactgttcaagagctccccacactccctgttcccagaaaaaatggtctccagctgtctcgatgcacacactggtatatcccatgaagacctcatccagaacttcctgaatgctggcagctttcctgagatccagggctttctgcagctgcggggttcaggacggaagctttggaaacgctttttctgcttcttgcgccgatctggcctctattactccaccaagggcacctctaaggatccgaggcacctgcagtacgtggcagatgtgaacgagtccaacgtgtacgtggtgacgcagggccgcaagctctacgggatgcccactgacttcggtttctgtgtcaagcccaacaagcttcgaaatggccacaaggggcttcggatcttctgcagtgaagatgagcagagccgcacctgctggctggctgccttccgcctcttcaagtacggggtgcagctgtacaagaattaccagcaggcacagtctcgccatctgcatccatcttgtttgggctccccacccttgagaagtgcctcagataataccctggtggccatggacttctctggccatgctgggcgtgtcattgagaacccccgggaggctctgagtgtggccctggaggaggcccaggcctggaggaagaagacaaaccaccgcctcagcctgcccatgccagcctccggcacgagcctcagtgcagccatccaccgcacccaactctggttccacgggcgcatttcccgtgaggagagccagcggcttattggacagcagggcttggtagacggcctgttcctggtccgggagagtcagcggaacccccagggctttgtcctctctttgtgccacctgcagaaagtgaagcattatctcatcctgccgagcgaggaggagggccgcctgtacttcagcatggatgatggccagacccgcttcactgacctgctgcagctcgtggagttccaccagctgaaccgcggcatcctgccgtgcttgctgcgccattgctgcacgcgggtggccctctgaccaggccgtggactggctcatgcctcagcccgccttcaggctgcccgccgcccctccacccatccagtggactctggggcgcggccacaggggacgggatgaggagcgggagggttccgccactccagttttctcctctgcttctttgcctccctcagatagaaaacagcccccactccagtccactcctgacccctctcctcaagggaaggccttgggtggccccctctccttctcctagctctggaggtgctgctctagggcagggaattatgggagaagtgggggcagcccaggcggtttcacgccccacactttgtacagaccgagaggccagttgatctgctctgttttatactagtgacaataaagattattttttgatac

SEQ ID NO: 8879 - DNA, 879 bp, Homo sapiens
  source 1..879: mol_type = unassigned DNA; mol_type = unassigned DNA
gcctggaatctggacacacagggctcccccccgcctctgacttctctgtccgaagtcgggacaccctcctaccacctgtagagaagcgggagtggatctgaaataaaatccaggaatctgggggttcctagacggagccagacttcggaacgggtgtcctgctactcctgctggggctcctccaggacaagggcacacaactggttccgttaagcccctctcttgctcagacgccatggagctggatctgtctccacctcatcttagcagctctccggaagacctttgcccagcccctgggacccctcctgggactccccggccccctgatacccctctgcctgaggaggtaaagaggtcccagcctctcctcatcccaaccaccggcaggaaacttcgagaggaggagaggcgtgccacctccctcccctctatccccaaccccttccctgagctctgcagtcctccctcacagagcccaattctcgggggcccctccagtgcaagggggctgctcccccgcgatgccagccgcccccatgtgagttgtccctcagaagggaagggagggatgcacgggttctgggtctgtgggagatacacagccgcttccatggaggcaggggatcttggttaggagtccctgagggtctagcaggtgcggaaagggaatgaatcaccctttgcctcccctcaagtcgtgtgcaattcctggggcgcaggtagtaaaggtgtacagtgaggatggggcctgcaggtctgtggaggtggcagcaggtgccacagctcgccacgtgtgtgaaatgctggtgcagcgagctcacgccttgagcgacgagacctgggggctggtggagtgccacccccacctagcactgg

SEQ ID NO: 8880 - DNA, 560 bp, Homo sapiens
  source 1..560: mol_type = unassigned DNA; mol_type = unassigned DNA
acacacagggctcccccccgcctctgacttctctgtccgaagtcgggacaccctcctaccacctgtagagaagcgggagtggatctgaaataaaatccaggaatctgggggttcctagacggagccagacttcggaacgggtgtcctgctactcctgctggggctcctccaggacaagggcacacaactggttccgttaagcccctctcttgctcagacgccatggagctggatctgtctccacctcatcttagcagctctccggaagacctttgcccagcccctgggacccctcctgggactccccggccccctgatacccctctgcctgaggaggtctgtggaggtggcagcaggtgccacagctcgccacgtgtgtgaaatgctggtgcagcgagctcacgccttgagcgacgagacctgggggctggtggagtgccacccccacctagcactggagcggggtttggaggaccacgagtccgtggtggaagtgcaggctgcctggcccgtgggcggagatagccgcttcgtcttccggaaaaacttcgccaagtacg

SEQ ID NO: 8881 - DNA, 570 bp, Homo sapiens
  source 1..570: mol_type = unassigned DNA; mol_type = unassigned DNA
cccccccgcctctgacttctctgtccgaagtcgggacaccctcctaccacctgtagagaagcgggagtggatctgaaataaaatccaggaatctgggggttcctagacggagccagacttcggaacgggtgtcctgctactcctgctggggctcctccagcgctccttgttccctccctgtacacctccctgcaggcagcagctgagaatgggaaggaagacctgattctctcctccgacttggctttcccgctgaaactagcccctccccgcacacccggggagagccgccctcactctctggctcgcccagtttaccccagtttgggtttccccaagtctctaagacagacgtctctgcgggctgcggggagatgtggggagggccccctccactttggagggcagtgaaggagagggatcctctaaattgtcgaggcttcatctctccagattgtatgcccttctcagcaacaccgcctccggccctccgatgggaaagtggaggccgggtgagacggggtccctcctggcttcagcatgaaatgggcaggaaggctggaggggtgt

SEQ ID NO: 8882 - DNA, 1146 bp, Homo sapiens
  source 1..1146: mol_type = unassigned DNA; mol_type = unassigned DNA
gctggagggggacaggtagttaagggcctggcgtctccctccctgaagacgtggtcccagccgggtgtcctgacgctcggggttcaggacaagggcacacaactggttccgttaagcccctctcttgctcagacgccatggagctggatctgtctccacctcatcttagcagctctccggaagacctttgcccagcccctgggacccctcctgggactccccggccccctgatacccctctgcctgaggaggtaaagaggtcccagcctctcctcatcccaaccaccggcaggaaacttcgagaggaggagaggcgtgccacctccctcccctctatccccaaccccttccctgagctctgcagtcctccctcacagagcccaattctcgggggcccctccagtgcaagggggctgctcccccgcgatgccagccgcccccatgtgagttgtccctcagaagggaagggagggatgcacgggttctgggtctgtgggagatacacagccgcttccatggaggcaggggatcttggttaggagtccctgagggtctagcaggtgcggaaagggaatgaatcaccctttgcctcccctcaagtcgtgtgcaattcctggggcgcaggtagtaaaggtgtacagtgaggatggggcctgcaggtctgtggaggtggcagcaggtgccacagctcgccacgtgtgtgaaatgctggtgcagcgagctcacgccttgagcgacgagacctgggggctggtggagtgccacccccacctagcactggagcggggtttggaggaccacgagtccgtggtggaagtgcaggctgcctggcccgtgggcggagatagccgcttcgtcttccggaaaaacttcgccaacactccctgttcccagaaaaaatggtctccagctgtctcgatgcacacactggtatatcccatgaagacctcatccagaacttcctgaatgctggcagctttcctgagatccagggctttctgcagctgcggggttcaggacggaagctttggaaacgctttttctgcttcttgcgccgatctggcctctattactccaccaagggcacctctaaggatccgaggcacctgcagtacgtggcagatgtgaacgagtccaacgtgtacg

SEQ ID NO: 8883 - DNA, 2093 bp, Homo sapiens
  source 1..2093: mol_type = unassigned DNA; mol_type = unassigned DNA
cgtctccctccctgaagacgtggtcccagccgggtgtcctgacgctcggggttcaggacaagggcacacaactggttccgttaagcccctctcttgctcagacgccatggagctggatctgtctccacctcatcttagcagctctccggaagacctttgcccagcccctgggacccctcctgggactccccggccccctgatacccctctgcctgaggaggtaaagaggtcccagcctctcctcatcccaaccaccggcaggaaacttcgagaggaggagaggcgtgccacctccctcccctctatccccaaccccttccctgagctctgcagtcctccctcacagagcccaattctcgggggcccctccagtgcaagggggctgctcccccgcgatgccagccgcccccatgtagtaaaggtgtacagtgaggatggggcctgcaggtctgtggaggtggcagcaggtgccacagctcgccacgtgtgtgaaatgctggtgcagcgagctcacgccttgagcgacgagacctgggggctggtggagtgccacccccacctagcactggagcggggtttggaggaccacgagtccgtggtggaagtgcaggctgcctggcccgtgggcggagatagccgcttcgtcttccggaaaaacttcgccaagtacgaactgttcaagagctccccacactccctgttcccagaaaaaatggtctccagctgtctcgatgcacacactggtatatcccatgaagacctcatccagaacttcctgaatgctggcagctttcctgagatccagggctttctgcagctgcggggttcaggacggaagctttggaaacgctttttctgcttcttgcgccgatctggcctctattactccaccaagggcacctctaaggatccgaggcacctgcagtacgtggcagatgtgaacgagtccaacgtgtacgtggtgacgcagggccgcaagctctacgggatgcccactgacttcggtttctgtgtcaagcccaacaagcttcgaaatggccacaaggggcttcggatcttctgcagtgaagatgagcagagccgcacctgctggctggctgccttccgcctcttcaagtacggggtgcagctgtacaagaattaccagcaggcacagtctcgccatctgcatccatcttgtttgggctccccacccttgagaagtgcctcagataataccctggtggccatggacttctctggccatgctgggcgtgtcattgagaacccccgggaggctctgagtgtggccctggaggaggcccaggcctggaggaagaagacaaaccaccgcctcagcctgcccatgccagcctccggcacgagcctcagtgcagccatccaccgcacccaactctggttccacgggcgcatttcccgtgaggagagccagcggcttattggacagcagggcttggtagacggcctgttcctggtccgggagagtcagcggaacccccagggctttgtcctctctttgtgccacctgcagaaagtgaagcattatctcatcctgccgagcgaggaggagggccgcctgtacttcagcatggatgatggccagacccgcttcactgacctgctgcagctcgtggagttccaccagctgaaccgcggcatcctgccgtgcttgctgcgccattgctgcacgcgggtggccctctgaccaggccgtggactggctcatgcctcagcccgccttcaggctgcccgccgcccctccacccatccagtggactctggggcgcggccacaggggacgggatgaggagcgggagggttccgccactccagttttctcctctgcttctttgcctccctcagatagaaaacagcccccactccagtccactcctgacccctctcctcaagggaaggccttgggtggccccctctccttctcctagctctggaggtgctgctctagggcagggaattatgggagaagtgggggcagcccaggcggtttcacgccccacactttgtacagaccgagaggccagttgatctgctctgttttatactagtgacaataaagattattttttgataca

SEQ ID NO: 8884 - DNA, 630 bp, Homo sapiens
  source 1..630: mol_type = unassigned DNA; mol_type = unassigned DNA
gacgtggtcccagccgggtgtcctgacgctcggggttcaggacaagggcacacaactggttccgttaagcccctctcttgctcagacgccatggagctggatctgtctccacctcatcttagcagctctccggaagacctttgcccagcccctgggacccctcctgggactccccggccccctgatacccctctgcctgaggaggtaaagaggtcccagcctctcctcatcccaaccaccggcaggaaacttcgagaggaggagaggcgtgccacctccctcccctctatccccaaccccttccctgagctctgcagtcctccctcacagagcccaattctcgggggcccctccagtgcaagggggctgctcccccgcgatgccagccgcccccatagcggggtttggaggaccacgagtccgtggtggaagtgcaggctgcctggcccgtgggcggagatagccgcttcgtcttccggaaaaacttcgccaagtacgaactgttcaagagctccccacactccctgttcccagaaaaaatggtctccagctgtctcgatgcacacactggtatatcccatgaagacctcatccagaacttcctgaatgctggcagctttcctgagatcc
